United States Patent Application Publication US 2012/0023611 A1 - sequence listing, part 3

SEQ ID NO: 6740 - DNA, 560 bp, Zea mays
  misc_feature (209)..(209): n is a, c, g, or t
  misc_feature (221)..(221): n is a, c, g, or t
  misc_feature (230)..(230): n is a, c, g, or t
  misc_feature (238)..(238): n is a, c, g, or t
  misc_feature (242)..(242): n is a, c, g, or t
  misc_feature (252)..(253): n is a, c, g, or t
  misc_feature (262)..(262): n is a, c, g, or t
  misc_feature (265)..(265): n is a, c, g, or t
  misc_feature (271)..(271): n is a, c, g, or t
  misc_feature (279)..(279): n is a, c, g, or t
  misc_feature (282)..(282): n is a, c, g, or t
  misc_feature (286)..(286): n is a, c, g, or t
  misc_feature (293)..(293): n is a, c, g, or t
  misc_feature (302)..(302): n is a, c, g, or t
  misc_feature (305)..(305): n is a, c, g, or t
  misc_feature (308)..(308): n is a, c, g, or t
  misc_feature (326)..(326): n is a, c, g, or t
  misc_feature (332)..(332): n is a, c, g, or t
  misc_feature (337)..(338): n is a, c, g, or t
  misc_feature (344)..(347): n is a, c, g, or t
  misc_feature (349)..(349): n is a, c, g, or t
  misc_feature (354)..(354): n is a, c, g, or t
  misc_feature (366)..(367): n is a, c, g, or t
  misc_feature (373)..(374): n is a, c, g, or t
  misc_feature (376)..(376): n is a, c, g, or t
  misc_feature (382)..(383): n is a, c, g, or t
  misc_feature (386)..(386): n is a, c, g, or t
  misc_feature (393)..(393): n is a, c, g, or t
  misc_feature (395)..(395): n is a, c, g, or t
  misc_feature (400)..(400): n is a, c, g, or t
  misc_feature (417)..(417): n is a, c, g, or t
  misc_feature (425)..(425): n is a, c, g, or t
  misc_feature (432)..(432): n is a, c, g, or t
  misc_feature (434)..(435): n is a, c, g, or t
  misc_feature (439)..(439): n is a, c, g, or t
  misc_feature (441)..(442): n is a, c, g, or t
  misc_feature (444)..(444): n is a, c, g, or t
  misc_feature (450)..(450): n is a, c, g, or t
  misc_feature (454)..(454): n is a, c, g, or t
  misc_feature (457)..(457): n is a, c, g, or t
  misc_feature (460)..(460): n is a, c, g, or t
  misc_feature (468)..(468): n is a, c, g, or t
  misc_feature (473)..(474): n is a, c, g, or t
  misc_feature (483)..(483): n is a, c, g, or t
  misc_feature (485)..(485): n is a, c, g, or t
  misc_feature (490)..(492): n is a, c, g, or t
  misc_feature (494)..(494): n is a, c, g, or t
  misc_feature (500)..(501): n is a, c, g, or t
  misc_feature (507)..(508): n is a, c, g, or t
  misc_feature (513)..(513): n is a, c, g, or t
  misc_feature (528)..(528): n is a, c, g, or t
  misc_feature (531)..(531): n is a, c, g, or t
  misc_feature (534)..(535): n is a, c, g, or t
  misc_feature (540)..(540): n is a, c, g, or t
  misc_feature (545)..(545): n is a, c, g, or t
  misc_feature (552)..(552): n is a, c, g, or t
  misc_feature (554)..(554): n is a, c, g, or t
  misc_feature (557)..(557): n is a, c, g, or t
  misc_feature (559)..(559): n is a, c, g, or t
  Peptide Sequence Number=SeqID_11195
  Probeset Number=SeqID_21143
gaattattttgatcctgcataccccacacaagaatcctagatccgccacacacaccagctgatacaggaagattacttttatctatactccaccttctttcgtggctatggcactagcagctatctataaccttttcatcattaacaaatctggcggccttatatactacaaggactaatggttcagtatgggaggaaggataccaaangacagctttaanattaacaangcctctgncatncgatgcatgnntatcctcgnagnaactgnccccctancancggntgtactnggaatttgnatntcntacaaggttcaaaacttntggatnttccnnttggtnnnncngtccntacagagggaanntaaatnntntccgcnntanggcgaantnggatnttactaaaaatggggantatggtcnaattttnannggtncnncnatcccngtanatngcncttgccgnccctnnaataatccngnattcnnncngtacgnnattatnngatangcagtctaactgcgnacnagnntacanataantctaganangcnant

SEQ ID NO: 6741 - DNA, 506 bp, Zea mays
  Probeset Number=SeqID_21144
agtcgacgaagctgatgaacctgggtccgtcgccgaccgcctcgagtggcgacacccatccatcctcctcaacgcacacgcgcacactctctctctcctatcactcccaattctccccctcttccacatccaggccagccaaccctagcgcggcggcgatggattcagacccggccacggcccctgacgacgcggccgcagccgagaatggccacgacaacgacaatggccacggaaacggcaacggcccgtccccgtcgaagcgcccccgggcggtgatcacggcggccgagatccgcgccgagttcgcgcaccacgacgccgccgtggcgcgcgtcaacaacggcagtttcggctgctgcccggcctcggtcctcgccgcgcaggcccactggcagcgcctctttcttgcgcagcccgacgccttctactttcacagcctccagcagggcctcatccgctcgcgcgccgccgtcgccgaggcggtgggcgctggcgacgtctcc

SEQ ID NO: 6742 - DNA, 286 bp, Zea mays
  misc_feature (22)..(22): n is a, c, g, or t
  misc_feature (38)..(38): n is a, c, g, or t
  misc_feature (50)..(50): n is a, c, g, or t
  misc_feature (63)..(63): n is a, c, g, or t
  misc_feature (83)..(83): n is a, c, g, or t
  misc_feature (88)..(89): n is a, c, g, or t
  misc_feature (134)..(134): n is a, c, g, or t
  misc_feature (137)..(138): n is a, c, g, or t
  misc_feature (140)..(140): n is a, c, g, or t
  misc_feature (142)..(143): n is a, c, g, or t
  misc_feature (184)..(184): n is a, c, g, or t
  Peptide Sequence Number=SeqID_11196
  Probeset Number=SeqID_21145
gtttctgtttcttggtgtgcancccctctttctctcgnggtcgacgacgncaaccgtgcacancccccctatgtgctaggtgncaggnnccgtcgcgaccttcgctggcgacgagcaactaccaggcgacccantgnngngnncgagaacgtttccgcgggcgagaggccggaccccagtgaangaagatgatctgactaccgacgtacgcagaacgaggcgttcgttgacatcttcttctcctttgagtatatgatactatgcaacatccacggtatcaacattc

SEQ ID NO: 6743 - DNA, 484 bp, Zea mays
  Probeset Number=SeqID_21146
ctttctccctcctgtgactcagtcggtcatggcggctcagatccagactcctccggcgtgggcgggcgtgagatccccgacagcacggccctagcagcggccacccccggtgggcacggcttgtgcgcgaccgtcccggcctgtgcgcgggcgcggcgtggcccttgacggcgcgctggcaagcgccctgctggtgcacaggcgggcagccacgacggcgcgcgagcgaggacccccggcgacgcgtggccccggctccgatccagtctcgtccggcgggcgcgggccctgccccggcggctccccgtgaccctggtgcatgtctacgaacaacgggtaacagtagaatccaaggctacacaagatatgcatgcgtcccgacagcgagtgtgctgcaactgcagggccatgcaggaagatgttccatagtgctggaggtgaagaggtcattgatcgaccatctctctctcgcaacgacmttatc

SEQ ID NO: 6744 - DNA, 839 bp, Zea mays
  misc_feature (1)..(19): n is a, c, g, or t
  misc_feature (25)..(26): n is a, c, g, or t
  misc_feature (826)..(839): n is a, c, g, or t
  Peptide Sequence Number=SeqID_11197
  Probeset Number=SeqID_21147
nnnnnnnnnnnnnnnnnnncacatnnraatatttaaatccatagrctcatcaattkcatcacaaaagtctcattcatagtcataataagacacatctcatctagtactaataagagacaatatctcatacatagtcataataaaagtctcaagtatcataacacataacatggaggtcctatagmggtcaagcagacttaagatggaggcacatggcctcgattgaagcttaattattgacyaaggaagtcgagcagatgttcttgctaaaattgaaacctggtccaaaaaaagcagtactcaatctgaagagcctaataggtcatacacaaattcatgagcaacattccttttgtaccatggmgttcactgttcagtccgagcatcaccagacaaaggtagtagcgggctataactggaagactgcaaaccttcyattgcaggcttggtacagmgctagccttgayagttagacgcgatctgatgagggctatggagcaggatagcaagcgctgagatttgccatgggctcaccgaaggagcatgagattgaggtcgcaggttcbaggcttggagctcgtagtgcaggtggcgtcgacacatcggaggagcaggagctcgatagaggaggccgctcgccgccatcggaggagcaggagctcgataaacaaggtgcctgacggcgggcgggggcgccgactgggcggggcgggcgagccggcgaggtgcgtgtggggcgcggcgagcgggggcgggcgaaccggcggggcgggcgtggggtgcggcgggcggttgctgcaaggaacgggagcgagaaaggatactnnnnnnnnnnnnnn

SEQ ID NO: 6745 - DNA, 374 bp, Zea mays
  misc_feature (1)..(34): n is a, c, g, or t
  Probeset Number=SeqID_21148
nnnnnnnnnnnnnnnnnnnnnnnnnnnnnnnnnnctcgtacattatccttggtctctacctacacctacatctcaacctaccgaacatcagctaccttgccaatgcaggaacgagaagacagggttagactttgtcgaaaccctcttcgctagtggaggtatcgaccaccactcgtcgctataccccgatggcgatcggcgatcgtgagcttccatgttatgtgttgtgatacttgacacttttattatgactatgtatgagatattgtctcttattatgactggatgagatgtatcttattatgactatggatgagacttttatgatgtaatttgtgagattatggatttaaatattgttatgtgattgtgta

SEQ ID NO: 6746 - DNA, 1078 bp, Zea mays
  misc_feature (1)..(30): n is a, c, g, or t
  misc_feature (652)..(652): n is a, c, g, or t
  misc_feature (767)..(1078): n is a, c, g, or t
  Peptide Sequence Number=SeqID_10731
  Probeset Number=SeqID_21149
nnnnnnnnnnnnnnnnnnnnnnnnnnnnnncatactgcggtggcgtggcggtgacgtgccggcgcggcgccgataagaggttgagagagagggaaaaaaagaacaatcaattctccagaccctccccggcaaccgcgtccggccgtccgcttccgtctccttggataaccacgacgcccgccggcaagcgaaagcgaagcgagccaacccagccatggagaaggcgatcgatcggcagcgggtcctcctggcgcacctcctcccctccccctccgccgcctcctcgcagcctcagcttgcggagtccccccccccccccctggacagcgccttctaccaaagttctactccttcggggaccactgcctgtgtctattcttcttcctccacgccgacaggcccgctctcaccagattgtgaacaccccggcaccgtacgaccccccgccccgagcacaatacaacaagccgctccccacaaccgtttatccccaccccccagcccaaccacaacttccctcaaacaaccctttcaggtcttcccccttaccacccgatacccccgtgtccccgagaccgcccgcataatcatacacaccccaacaccaagaagacagccaagtccctccccacaggccccactttatcaaccnaaaaccaccgtcacgccaccgcacttagaatccccccacccacccatactcccccaccttagtttcttctctccaccccccaaataacaacacgtgtgttgcctaggcatttcgnnnnnnnnnnnnnnnnnnnnnnnnnnnnnnnnnnnnnnnnnnnnnnnnnnnnnnnnnnnnnnnnnnnnnnnnnnnnnnnnnnnnnnnnnnnnnnnnnnnnnnnnnnnnnnnnnnnnnnnnnnnnnnnnnnnnnnnnnnnnnnnnnnnnnnnnnnnnnnnnnnnnnnnnnnnnnnnnnnnnnnnnnnnnnnnnnnnnnnnnnnnnnnnnnnnnnnnnnnnnnnnnnnnnnnnnnnnnnnnnnnnnnnnnnnnnnnnnnnnnnnnnnnnnnnnnnnnnnnnnnnnnnnnnnnnnnnnnnnnnnnnnnnnnnnnn

SEQ ID NO: 6747 - DNA, 1078 bp, Zea mays
  misc_feature (1)..(440): n is a, c, g, or t
  misc_feature (1049)..(1078): n is a, c, g, or t
  Peptide Sequence Number=SeqID_10732
  Probeset Number=SeqID_21150
nnnnnnnnnnnnnnnnnnnnnnnnnnnnnnnnnnnnnnnnnnnnnnnnnnnnnnnnnnnnnnnnnnnnnnnnnnnnnnnnnnnnnnnnnnnnnnnnnnnnnnnnnnnnnnnnnnnnnnnnnnnnnnnnnnnnnnnnnnnnnnnnnnnnnnnnnnnnnnnnnnnnnnnnnnnnnnnnnnnnnnnnnnnnnnnnnnnnnnnnnnnnnnnnnnnnnnnnnnnnnnnnnnnnnnnnnnnnnnnnnnnnnnnnnnnnnnnnnnnnnnnnnnnnnnnnnnnnnnnnnnnnnnnnnnnnnnnnnnnnnnnnnnnnnnnnnnnnnnnnnnnnnnnnnnnnnnnnnnnnnnnnnnnnnnnnnnnnnnnnnnnnnnnnnnnnnnnnnnnnnnnnnnnnnnnnnnnnnnnnnnnnnnnnnnnnnnnnnnnnnnnnnnnnnnnnnnnnnnnngggcctgtggggagggacttggctgtcttcttggtgttggggtgtgtatgattatgcgggcggtctcggggacacgggggtatcgggtggtaagggggaagacctgaaagggttgtttgagggaagttgtggttgggctggggggtggggataaacggttgtggggagcggcttgttgtattgtgctcggggcggggggtcgtacggtgccggggtgttcacaatctggtgagagcgggcctgtcggcgtggaggaagaagaatagacacaggcagtggtccccgaaggagtagaactttggtagaaggcgctgtccagggggggggggggggactccgcaagctgaggctgcgaggaggcggcggagggggaggggaggaggtgcgccaggaggacccgctgccgatcgatcgccttctccatggctgggttggctcgcttcgctttcgcttgccggcgggcgtcgtggttatccaaggagacggaagcggacggccggacgcggttgccggggagggtctggagaattgattgttctttttttccctctctctcaacctcttatcggcgccgcgccggcacgtcaccgccacgccaccgcagtatgnnnnnnnnnnnnnnnnnnnnnnnnnnnnnn

SEQ ID NO: 6748 - DNA, 623 bp, Zea mays
  misc_feature (1)..(4): n is a, c, g, or t
  misc_feature (623)..(623): n is a, c, g, or t
  Probeset Number=SeqID_21151
nnnnacgacccattgtggatttacgtacagaaactatcccgtaaatgattgcaccttttacagggcccaataaatattctgggatttgccgccctttggagtttggcaaataattatttgagagttgagttttgtgaaattttaccattttgtgctgtgcagtttttggagtaacagaattatttactacttctgcaagcaaggtaaacttatggttgattagaagaaacgaaaggcagcggctcaagttttgatgtagcttcttggaggaattcagacaacaagaaagcaaggaacagcggttcaagtttcctaaaaccaacgtgttatgtgcgttggtgtatggtgttacagaacacgttttttgtgcacacgcttatacaacagtctgtgtccagctatggtttccatggcaatttacaggattctttctgctcttacttcacaactattagcaattccagctatgatttcccctaccattctttcttacttgaattgattcgcaggaaggatccaaattacaaaaggatggtaatggcctgcttcattcaagcagtctacctgcttgaactggacagacaggacaagaaaggcgaagaggatggccttgctccaaaatn

SEQ ID NO: 6749 - DNA, 372 bp, Zea mays
  misc_feature (293)..(372): n is a, c, g, or t
  Peptide Sequence Number=SeqID_10733
  Probeset Number=SeqID_21152
gcgtggtcgcggccgaggcacaggcgcgcaaccccaacggcaacagcgggaagcacaaccaattaccgattcatcatgcaacctacaagaagcacataaaaaagtaaaaggaaagaggcacaatcttgttggatacggcggccctgccctggcccctgccccctgggaaggaaagggcaccgggagctcatcgttattcggacacggcctcctcttcgtcttcgtcctcgtccggcccatcaagtaatggaaaacgctaataattctcctcccttcctccacgcgcgtcagcnnnnnnnnnnnnnnnnnnnnnnnnnnnnnnnnnnnnnnnnnnnnnnnnnnnnnnnnnnnnnnnnnnnnnnnnnnnnnnnn

SEQ ID NO: 6750 - DNA, 595 bp, Zea mays
  Probeset Number=SeqID_21153
tcatatttttatttagcaacagagactaagttggttgtgcacacatcaagaggcgcaaggtccctgattcccactgctctggttctgaagtaaatcgattagtttcctgcttttttctgtttcagcattgcagtatcattgaaggaaccttttcatgtcctctcatatttgcctgtaccataaccatacatgctctgctgcatagcatgatgaaaatcattcaagggtatctctcatgcattctccatcacttaaaggtgcctttacctttggatttgtgtctactgtttattcctgctcaagtctattacgataaatggtgattagtgccgctatatgcataacttcagtttgtttccaaattcactttctaatgttcaccaattttcttcatgtgaaccttttgcagactagatcatgctcacttcaaggttcagtgaagttgaggaacctatttgctgatcagccacacagaaaatttggtgacttcattaaaggagtatttgctctcttccacagatttgggaaatgtttatttgcctgctgtagtgaattaagaaattttcatgtccctatattttcttatttgccatgt

SEQ ID NO: 6751 - DNA, 732 bp, Zea mays
  misc_feature (1)..(132): n is a, c, g, or t
  Peptide Sequence Number=SeqID_10734
  Probeset Number=SeqID_21154
nnnnnnnnnnnnnnnnnnnnnnnnnnnnnnnnnnnnnnnnnnnnnnnnnnnnnnnnnnnnnnnnnnnnnnnnnnnnnnnnnnnnnnnnnnnnnnnnnnnnnnnnnnnnnnnnnnnnnnnnnnnnnnnnnnnnagatctattctccgcaagtaacctctactcggtcggtaagaatgatgggtagtggacggggggcccgagcggcgggggtgaagcgagtcaggggaaaggcaggcgaaagataaggagggccagtagaagagcgggaggagggggagaaggcaggtgggcgacggcatcggagagagcatgtaggaacagggaccggcgccgaagagatcgtttataataaagttgtactgaggttgtggcggcgcggtgtggtatggcccccgtgacggcggtggggggggtggtgggcagatggggaggtggggggcgtgcgtacccccaggtagatgcggggaagggcgtgtggcaatcaggggcggtacatagtgccacccgggcggtgtcaccgcccacgatgaggtagtcgtagtaggacacgctgggcgccagcgccgcgtccttcacgaacgtgtagttcacgccacgtacttgtagcgagctgcataggagtacaaagaagaagctcgtagcgagaagggtggacattgtgaagtgccttgatcgtccagacattgtaaacgcgcaagctttgatcggacaactttgtgtgttatttatgtt

SEQ ID NO: 6752 - DNA, 458 bp, Zea mays
  misc_feature (3)..(3): n is a, c, g, or t
  misc_feature (5)..(5): n is a, c, g, or t
  misc_feature (11)..(11): n is a, c, g, or t
  misc_feature (23)..(23): n is a, c, g, or t
  misc_feature (43)..(43): n is a, c, g, or t
  misc_feature (50)..(50): n is a, c, g, or t
  misc_feature (53)..(56): n is a, c, g, or t
  misc_feature (60)..(60): n is a, c, g, or t
  misc_feature (67)..(67): n is a, c, g, or t
  misc_feature (81)..(82): n is a, c, g, or t
  misc_feature (90)..(90): n is a, c, g, or t
  misc_feature (101)..(102): n is a, c, g, or t
  misc_feature (104)..(104): n is a, c, g, or t
  misc_feature (108)..(108): n is a, c, g, or t
  misc_feature (122)..(122): n is a, c, g, or t
  misc_feature (135)..(135): n is a, c, g, or t
  misc_feature (163)..(163): n is a, c, g, or t
  misc_feature (165)..(165): n is a, c, g, or t
  misc_feature (180)..(180): n is a, c, g, or t
  misc_feature (183)..(184): n is a, c, g, or t
  misc_feature (192)..(193): n is a, c, g, or t
  misc_feature (233)..(233): n is a, c, g, or t
  misc_feature (236)..(236): n is a, c, g, or t
  misc_feature (244)..(245): n is a, c, g, or t
  misc_feature (272)..(272): n is a, c, g, or t
  misc_feature (274)..(274): n is a, c, g, or t
  misc_feature (287)..(287): n is a, c, g, or t
  misc_feature (307)..(307): n is a, c, g, or t
  misc_feature (366)..(366): n is a, c, g, or t
  Peptide Sequence Number=SeqID_10735
  Probeset Number=SeqID_21155
agngnccgacncctccctttccncttccctccctccctctccncgcgttncgnnnnaggnaatttcnccctcgattcgacnncgattctnccgcccgtganngncatnccctccgccaagtncgtatctgaacgntgcgctccgtgtcgccgactcgaatccntnatgaaggaggctcanatnnaagggcgnngccaaggccgatgcctgagctggcggtgaagagcaagggnttngagaagcnngccaagggcagtgaaagggaagggcgngnaaggaccccaacnagcctaggagggctcccagngctttcttcgtgttcatggaggaattttcgcaaggagttcaaggagaagaaccctaagnaacaagtctggtcgctgcggtggggaaaagctgctggcgacaggtggaaatccctggagcgagtcggacaaggctccctatgtagccaaggt

SEQ ID NO: 6753 - DNA, 634 bp, Zea mays
  misc_feature (1)..(3): n is a, c, g, or t
  misc_feature (623)..(634): n is a, c, g, or t
  Probeset Number=SeqID_21156
nnnaaaagcttttagccgtcactgcctctcctatcgtctcctacatccttgcctcaagctttcacaaaacagcagccatggcagaacagactgagaaggcttttctcaagcaacctaaggtcttccttagctcgaagatatctggaaagggaaagcgacctggtaagggtggaaaccggttctcgaagaacatcggtttgggcttcaagactcctcgtgaagccattcaaggaacttacattgacagaaaatgtcccttcaccggaactgtctccattagaggtcgtatcttagccggtacttgccacagcgccaagatgcagaggaccatcatcgtgagaaggaactacctccactttgtcaagaagtatcagaggtacgagaagagacactcgaacatccctgctcatgtctcaccatgcttccgtgtcaaggaaggagaccatgtcatcatcggccaatgcaggcctttgtccaagactgtgaggttcaatggggttgaaggtgataccagcctggtgccttctgctttccccaaagaaggctttcactggaaggcaacaagggggcttttcatgggtaggttaggggtttgggaggcaattcccccttttacctatggnnnnnnnnnnnn

SEQ ID NO: 6754 - DNA, 605 bp, Zea mays
  misc_feature (584)..(584): n is a, c, g, or t
  misc_feature (601)..(605): n is a, c, g, or t
  Peptide Sequence Number=SeqID_10736
  Probeset Number=SeqID_21157
attactttcatttcatcagtcgctgcctcgcctctcgcatctcatttcgcctcaatccatcagcggagagcagcagcagcaaccagtagccatggcggaacagacggagaaggcatttctaaagcagccaaaggttttcctaagctcgaagaaatcagggaaaggaaagaggcctggaaaaggtggaaaccgtttctggaagaacattggtttgggtttcaagactccccgcgacgccattgatggacattacattgacaagaaatgtccattcactggaactgtctctgtgagaggacgtatcttagctggtacttgccacagtgctaagatgcagagaacaatcattgttcgccggaactatctccacttcgtcaagaagtatcaaagatacgagaagaggcattccaacatccctgcccatgtctcaccctgcttccgtgttaaagaaggtgaccatgtcatcattggccaatgcaggcctttgtcaaagacggtgaggttcaatgtgctgaaaggtgatcccggcaggcgcatctgcctttgcaaagaaggcattcactgggatgtaagagctttgaagntatggagatttaacttnnnnn

SEQ ID NO: 6755 - DNA, 491 bp, Zea mays
  Peptide Sequence Number=SeqID_10737
  Probeset Number=SeqID_21158
cttcccgaagcttttgccgtcgctgcctacaaccttgcctcagagcagaacagcagcagccatggccgaacagactgagaaagctttcctaaagcaacctaaggtcttcctcagctcgaagatatctggaaagggaaagagacctggaaagggtggaaacagattcgtgaagaacattgggttgggcttcaagactcctcgtgaagccagtcaaggaacatacattgacagtaaatgtcccttcactggaactgtttcgattagaggacgtatcttagccggtacttgccacagtgccaaaatgcagaggaccattatcgtccgaaggaactaccttcactttgttaagaagtatcagaggtatgagaagaggcattcgaacatccctgctcatgtctcaccatgcttccgtgtcaaggaaggagaccatgtcatcattggacaatgcaggcctttgtccaagactgtgaggttcaatgtgttgaaggtga

SEQ ID NO: 6756 - DNA, 469 bp, Zea mays
  misc_feature (65)..(65): n is a, c, g, or t
  misc_feature (69)..(69): n is a, c, g, or t
  misc_feature (100)..(100): n is a, c, g, or t
  misc_feature (105)..(105): n is a, c, g, or t
  misc_feature (109)..(109): n is a, c, g, or t
  misc_feature (115)..(115): n is a, c, g, or t
  misc_feature (123)..(123): n is a, c, g, or t
  misc_feature (133)..(133): n is a, c, g, or t
  misc_feature (158)..(158): n is a, c, g, or t
  misc_feature (169)..(169): n is a, c, g, or t
  misc_feature (213)..(213): n is a, c, g, or t
  misc_feature (236)..(236): n is a, c, g, or t
  misc_feature (238)..(238): n is a, c, g, or t
  misc_feature (242)..(242): n is a, c, g, or t
  misc_feature (251)..(251): n is a, c, g, or t
  misc_feature (275)..(275): n is a, c, g, or t
  misc_feature (285)..(285): n is a, c, g, or t
  misc_feature (333)..(333): n is a, c, g, or t
  misc_feature (337)..(337): n is a, c, g, or t
  misc_feature (341)..(341): n is a, c, g, or t
  misc_feature (345)..(345): n is a, c, g, or t
  misc_feature (355)..(355): n is a, c, g, or t
  misc_feature (368)..(368): n is a, c, g, or t
  misc_feature (376)..(376): n is a, c, g, or t
  misc_feature (379)..(379): n is a, c, g, or t
  misc_feature (386)..(386): n is a, c, g, or t
  misc_feature (388)..(388): n is a, c, g, or t
  misc_feature (406)..(407): n is a, c, g, or t
  misc_feature (410)..(410): n is a, c, g, or t
  misc_feature (412)..(412): n is a, c, g, or t
  misc_feature (429)..(429): n is a, c, g, or t
  misc_feature (441)..(441): n is a, c, g, or t
  misc_feature (443)..(443): n is a, c, g, or t
  misc_feature (449)..(450): n is a, c, g, or t
  misc_feature (452)..(452): n is a, c, g, or t
  misc_feature (459)..(459): n is a, c, g, or t
  misc_feature (462)..(463): n is a, c, g, or t
  misc_feature (465)..(465): n is a, c, g, or t
  misc_feature (467)..(468): n is a, c, g, or t
  Peptide Sequence Number=SeqID_10738
  Probeset Number=SeqID_21159
gaatccggcagcaccatgcagaaccccgtcgcgaaccctttcactgcggccgccgccgctgcggnaggnaacggcgtccaagcatcgggggctggagggnagcgnccgnaggacncgtcaaancaaaactggngaggtgacgagctcgatccaaaaangctgggcctgntcaccagttaacctcacggtctcctccttaaatctgcctccagntccccctcttcagggcctgatgngntggngcggactcnaacgatgcaaaactccccgagggngcaaatcagngcctatggaggcgtcatttgatcgacgatggaaaaacccgacgagtcnttanggangggncaaaagttgntcgccaaaaacanatccccanggnaaaatgncnttttaagggctaaggaannttntnttgaggagttgaaaaantttcctgggggngnaaaaannanggggaanacnngntnnt

SEQ ID NO: 6757 - DNA, 840 bp, Zea mays
  misc_feature (436)..(436): n is a, c, g, or t
  misc_feature (840)..(840): n is a, c, g, or t
  Probeset Number=SeqID_21160
gtgggatgggtccagattttcgtgttctggtgagaaaaaactgccttctattttagtggatgaaacatctgtgcaaaagattcaggcactaacaccaaatattggagttgtctatagtgggatgggtccagattttcgtgttctggtgagaaaaagtcgaaagcaggcacaacagtattatcggttgtacaaggagcatatacctgtaacacagcttgtgcgggagactgctgctgtgatgcaggagttcacacagtcaggtggtgtaagaccatttggagtatcactgttgattgctgggtatgatgacaatggcccacagttgtatcaggkkgatcccctcaggactcatascttctccctggakaggcactcagsccaatgggaacaaaaktgtgtcaaactgcaawagatcattttcttgaaatagagatancacacgagggataatggaacmttgakagatgccaatccaccacctgmaacttttgacktttgacaagaaaggattatgagggggccaaatkttcctcacaagcaactatwtgasaatccggaagtatatatacgagctgactgtwgagttkcagagagttacataagcccattagagatcaaggatttcttggaagaggtggagtaagttgtctgttgatgatttactgtttcaaacaagaatagcagcatcacttatgagcagccagcctgaagcttgtcttggttttatcactctgtaaactgatttgctccagcgacatgtggttcttacatttgaaaccctcctgaacgcatactgtagacaaatgagatacgtaagatggatgttgtatttgacagtcn

SEQ ID NO: 6758 - DNA, 930 bp, Zea mays
  misc_feature (1)..(192): n is a, c, g, or t
  misc_feature (200)..(201): n is a, c, g, or t
  misc_feature (269)..(269): n is a, c, g, or t
  misc_feature (274)..(278): n is a, c, g, or t
  misc_feature (504)..(507): n is a, c, g, or t
  misc_feature (925)..(930): n is a, c, g, or t
  Peptide Sequence Number=SeqID_10739
  Probeset Number=SeqID_21161
nnnnnnnnnnnnnnnnnnnnnnnnnnnnnnnnnnnnnnnnnnnnnnnnnnnnnnnnnnnnnnnnnnnnnnnnnnnnnnnnnnnnnnnnnnnnnnnnnnnnnnnnnnnnnnnnnnnnnnnnnnnnnnnnnnnnnnnnnnnnnnnnnnnnnnnnnnnnnnnnnnnnnnnnnnnnnnnnnnnnnnnnnnnnnnnngcgccgcnncttgggccttgggccttggactggccacttatccgctgacctggcaactgctggcggtcaccgcgacntgtgnnnnnaggggtgatgggcgtgcatggtttgttgcggcccctcgcacagttgaaccagcgagcccggttgattgccgacaacccgctgagccaggcgatctacaccggacgcggggatgagttcgggcgcatcgagttcgccatgcagatgctggaagcccaagtgggcgcggtggtgggccggattggcgatgcctcgcaacgcctgtccgggcacgccgccgcgctggtnnnnacaactggacagcagccacaccagcagtctcggccaacagtcccagacagatcaggtcgccgccgcgatcaatcaaatggccgccagcgtggcacaagttgccgagcatgcgctgcaagcctccaaggccgctgatcaggccggcagcgagacccgggaaggtcatcaacgggtggatgaaagccgcgacgcggtgctgcggttgtcccaggaactggcgcgcgccaccgacgtgatccatcaacttgaaagccacagcggcgatatttccggggtgctggaagtgattcgggcgattgccgagcagaccaacctcctggcgctcaatgccgccattgaagccgcacgggccggagaacagggacgcgggtttgccgtggtagctgatgaagtgcgcgggctggcccagcgtacgcannnnnn

SEQ ID NO: 6759 - DNA, 762 bp, Zea mays
  misc_feature (1)..(17): n is a, c, g, or t
  misc_feature (720)..(762): n is a, c, g, or t
  Peptide Sequence Number=SeqID_10740
  Probeset Number=SeqID_21162
nnnnnnnnnnnnnnnnncaggtcccttaccataacgtgcatttacgtgggacatcctaatcgaaaaaaggttgtcttgttgctatagaaacacaaacacagaaaccaaaatctcagactgaagatagtttgtatttgtgttagaaaagaaaatggctagcttcactgcctctgcttccaccgtctctgtcgctcgtcctgctctccttctcaagcccaccctcgccatctccgctcctgttcttggtttgcctccaatggggaagaggaagggaggggtgagatgctcaatggagccaaagcaaggaaacgtctcagccgtgggggctggagtttccgcggcggcgacagcagctttaacggctgtgatgagcaacccggccatggcgttggtggatgacaggatgtccacggaaggaaccggactaccctttgggctgagcaacaacctcttggggtggattcttttgggagtgtttggtttgatctggacgttctactttacctacacttcatctctcgacgaggatgaagaatctggtctttctctctgaacatgaacatgtactactattatatatgtctcttttagtcttcatcagtgttcatctctctcattttccatttcatgtcaggacttgaatcaacaatgatcttcttcttctggtttcttgttgttaaatgaacacaaaaaatttaatggtaaaaaaaaaaaaaaaannnnnnnnnnnnnnnnnnnnnnnnnnnnnnnnnnnnnnnnnnn

SEQ ID NO: 6760 - DNA, 648 bp, Zea mays
  misc_feature (1)..(1): n is a, c, g, or t
  misc_feature (599)..(599): n is a, c, g, or t
  misc_feature (618)..(618): n is a, c, g, or t
  misc_feature (634)..(648): n is a, c, g, or t
  Peptide Sequence Number=SeqID_10741
  Probeset Number=SeqID_21163
ncaaatctcataccactctctacaacaacaacatcaatctaacacgtctaatcgattttgtcgcaatggaaaccaccggaaaagtgaagaaggctttcggaggaaggaaagcgggtggccccaagaccaaatccgtctcgaaatcgatcaaagccggtctccagtttccggtggggagaatcactcgtttcctgaagaagggacggtacgcacagaggctcggcggtggagctccggtttacatggccgccgttctcgagtacctcgccgcagaagttctggagcttgctggtaacgctgcgagagacaacaagaagtcgagaatcatcccgaggcatcttctgttggcgattaggaacgatgaagagttggggaaacttctcagtggagttacgatcgctcacggtggtgtcttgccaaacattaactctgttcttttgcctaagaagtctgctaagtcgtccgaggatgctgcacccaagtcgcctggcaaatctcccaagaaggcttaatcatctcgacgttacttgaattcacctggttgggggtataaggggttggttacttttgggaggggactatgtagaaagcttttttangtatgtatttttggggganattggaggtctcctcnnnnnnnnnnnnnnn

SEQ ID NO: 6761 - DNA, 625 bp, Zea mays
  misc_feature (601)..(625): n is a, c, g, or t
  Peptide Sequence Number=SeqID_10742
  Probeset Number=SeqID_21164
aatacaaatctccaatctccttccactataaccatcagtaatctttcagtcagcgcaaaccttcatcccgtgcaatggaaaccaccggaaaagtgaagaaggctttcggaggaagaaaggccggtggcccaaagaccaaatcggtttcgaaatcgatcaaagccggtctccagttcccggtcgggagaatcactcgtttcctgaggaagggacggtacgctcagagactcggtggtggagctccggtctacatggccgccgttctcgagtacctcgccgccgaagttctggagcttgctggtaacgcagcgagggacaacaagaagtcgaggatcattccgaggcatcttcttttggcgattaggaacgatgaggagttggggaagcttctgagtggtgtcacgatcgctcacggtggtgtgttgcctaacattaactctgttctcttgcctaagaagtctgctaaatcgactgaggaagttgcgtccaagtccccagctaaatctccgaagaaagcttaaaatggtcctcggggcgggttgggttcgccgacagagttaatgggggttccggtgttttatatgtagaaaatctatctttnnnnnnnnnnnnnnnnnnnnnnnnn

SEQ ID NO: 6762 - DNA, 771 bp, Zea mays
  misc_feature (29)..(29): n is a, c, g, or t
  misc_feature (308)..(308): n is a, c, g, or t
  misc_feature (321)..(321): n is a, c, g, or t
  misc_feature (393)..(393): n is a, c, g, or t
  misc_feature (415)..(415): n is a, c, g, or t
  misc_feature (422)..(422): n is a, c, g, or t
  misc_feature (437)..(437): n is a, c, g, or t
  misc_feature (452)..(452): n is a, c, g, or t
  misc_feature (468)..(468): n is a, c, g, or t
  misc_feature (473)..(473): n is a, c, g, or t
  misc_feature (490)..(517): n is a, c, g, or t
  misc_feature (519)..(522): n is a, c, g, or t
  misc_feature (525)..(538): n is a, c, g, or t
  misc_feature (543)..(547): n is a, c, g, or t
  misc_feature (549)..(581): n is a, c, g, or t
  misc_feature (592)..(611): n is a, c, g, or t
  misc_feature (614)..(614): n is a, c, g, or t
  misc_feature (616)..(718): n is a, c, g, or t
  misc_feature (724)..(743): n is a, c, g, or t
  misc_feature (749)..(771): n is a, c, g, or t
  Peptide Sequence Number=SeqID_10743
  Probeset Number=SeqID_21165
ttttttttttttttttgttaatagcgganacgacagatatggatcaatcatatacatcttagcattgatcttgtttggcattttttttttttttttgtaatttgcaagcattatatagcctggagtctggacagatagcgactgaaaaaaggccaaaaaggtggtgttcaactaaagtcccttctctcatgctagctgacatccacaaagatcagtgtgtgttttacaagaaaaaacacaccgagaacggatgaagtgtcatggcatatatacgttcaagtacgtacgggagcatcgttttggtttanacatttttttttnaacaccaccgtcatcatccgtagcatcaccaccaccattaggaggagggaggagctcgattcacttgttcanaaccaccaccaccaccaccatnaacaganattgtttcgccaaanagctttatggtcttnacgttctggagtgganacaanctcactgggttgttggnnnnnnnnnnnnnnnnnnnnnnnnnnnngnnnnggnnnnnnnnnnnnnnagggnnnnnannnnnnnnnnnnnnnnnnnnnnnnnnnnnnnnnaaaaaaaaaannnnnnnnnnnnnnnnnnnnttntnnnnnnnnnnnnnnnnnnnnnnnnnnnnnnnnnnnnnnnnnnnnnnnnnnnnnnnnnnnnnnnnnnnnnnnnnnnnnnnnnnnnnnnnnnnnnnnnnnnnnnnccccannnnnnnnnnnnnnnnnnnnaaattnnnnnnnnnnnnnnnnnnnnnnn

SEQ ID NO: 6763 - DNA, 857 bp, Zea mays
  misc_feature (41)..(43): n is a, c, g, or t
  misc_feature (54)..(64): n is a, c, g, or t
  misc_feature (128)..(130): n is a, c, g, or t
  misc_feature (132)..(132): n is a, c, g, or t
  misc_feature (828)..(837): n is a, c, g, or t
  misc_feature (840)..(840): n is a, c, g, or t
  misc_feature (844)..(853): n is a, c, g, or t
  misc_feature (855)..(857): n is a, c, g, or t
  Probeset Number=SeqID_21166
ggcgcttttgactgttcacttcgttattatgtttcgtacannngcggttgctannnnnnnnnnnttctactcattttggggcagccttcattcatcgaatgtagtggttagtgaaacgcaatactagnnngntgttgttgtacccctgcccggcgtaaataattgtgcctgtgggctgtggtcattttcgtgtgcctcctaagttaaatctgaactgtttctctttaggcaatctctagtagcactgttggtctgatatgaactttatttacatgtgatgcatatgcttctgctattattgtactgtcttgtccttttttttctgtagtggttactagtggaagtttagcacactgattccgtcatagtgggatccttgccaaatgaagtgtccatccaaccaacccaactaactgtactgaaatctcattgctttcagaatggtacggttagtaaattgaggttggtggtgggtttggtggccatactaggggaaggtacgtgtttgttctttatagatggtgacttggtttcaacctgagggttttgcccttgatgataggttgtcatagaattagtgggatatatgatggtttaatcacagtgactaaaatctggattctaaattgctaatagtagaaacagtagctatctagtgccggtagtgtttgggggtgtcttttgggctatgctgatgtggtgggttggagttgatattgtggttgttttgtatggcacattgttcaaatatcgctctctatgagctactttttatgtttcatttttcctcgaggtaggttagtagatgtctggaatggatattgccannnnnnnnnnttntctnnnnnnnnnngnnn

SEQ ID NO: 6764 - DNA, 248 bp, Zea mays
  misc_feature (1)..(71): n is a, c, g, or t
  Peptide Sequence Number=SeqID_10744
  Probeset Number=SeqID_21167
nnnnnnnnnnnnnnnnnnnnnnnnnnnnnnnnnnnnnnnnnnnnnnnnnnnnnnnnnnnnnnnnnnnnnnntgaaggatggtgatgtagctcttttgcacgaaactattgttggttgggtctcttttgaagatataaccatagttgacctcaatgttcaaaggatggccagaaagccaggaacataactcaggcgttggcgattggcatctccctcccctgagccatggccaccgggcggccgctcga

SEQ ID NO: 6765 - DNA, 857 bp, Zea mays
  misc_feature (1)..(115): n is a, c, g, or t
  misc_feature (857)..(857): n is a, c, g, or t
  Probeset Number=SeqID_21168
nnnnnnnnnnnnnnnnnnnnnnnnnnnnnnnnnnnnnnnnnnnnnnnnnnnnnnnnnnnnnnnnnnnnnnnnnnnnnnnnnnnnnnnnnnnnnnnnnnnnnnnnnnnnnnnnnnncttagatggagggcgcttggaatagagaggagcgggaaaaggacttggttaaaagaaaactttttttgttgttacatgttgcttgttgaacctaaaaactcagaggtgtataaataacccttcactaaaaccaatataacctcaaataacctatttctaagtaccgcaaggttctgacttcacatcaaatgaacatatatgtttttgatctctttttatggctgctggcgcagagtgcttgttattgacgtccctgtattatgcagaatgggatgaccaggaagaaggcaacgaagccgtccagcagtgggaggatgattgggatgacgatgacgtgaacgatgatttctcgctgcagcttaaggaagagctggacggaagcaacggccagaagagctgaagttttatttctctagtttgtagatgataaatgattgttatgtgctatatggatgggttgatatggttgtgctatgtgaacggcagaaagtttacggacatcagtcggcaatttgacagcactgtacctgttccggtggaacatatcgtcgttaggacaggtctctatccgaaacgctagaaaccccacattgagtatcttcaactgtttcctactaatgcccaatctcgttttttttagcgacatgagataaataccaagcttgttcggctggttttttcaagtaatttgataaatgtacaaattttttcttgttttcatgtccaatttggattttccccn

SEQ ID NO: 6766 - DNA, 611 bp, Zea mays
  misc_feature (601)..(611): n is a, c, g, or t
  Peptide Sequence Number=SeqID_10745
  Probeset Number=SeqID_21169
atttccacaagacccttgcgtgctctctctctctcctcttggcgacgactgggtggcaggtgcccaggtcttcttgggacccttcgccggcgacaagcaccaccagcttgcaggtttcaagatggaagtggtaaaaactacacatgctgggcatgcaaaatctcttgtatcaactattgattttagtacctgtcctgatggtattgtatgtgtgggtggtgatgggattgtaaatgaggtcctcaatggtcttctatgcagagatgatcaaaatatgtctgcctctgtaccaataggtataatacctggctgggtctgataactcacttatttggacagtcttgggtgtcaaggatccaatttctgcagcattgtcaattggtcaggggaggtcttacacctatttgatggtttttttctgttgaatgggattcaaagtgggactattgcattatggtacaccgatcactaaatttttgggtttggggtaagcggatgttcttgagcttctcagagaagtatcagaaaggcattttgggccctttagcaaacttttggaaaatggcctttcccccaaccccgggtgttgcgccaagacacnnnnnnnnnnn

SEQ ID NO: 6767 - DNA, 594 bp, Zea mays
  misc_feature (1)..(10): n is a, c, g, or t
  Peptide Sequence Number=SeqID_10746
  Probeset Number=SeqID_21170
nnnnnnnnnngactggttcttctaggcccagcggcgggtgagagactggttcttccgggtccattgaagcgcagccatgggatcggaggattatgtagacttcttccgggatgcaaacatgtccagtgacactgatatgagtaaggtgtttgaagacagaacgtttgtgtcatctatccttaattcgcaactctccagcggcgaggagaggaaggccgtggtgatggtggtggcggctgacatgccgcccgcgctgcagcgccgcgcgttctgctgcgcccatgacgagctcgcggcgatgccgcacttcccgcgccggctcgagcccaagcgcctcgcgctggcgctcaagaagctcatttggaaggttctcagagttgctgatcccaccattggcagttcaagtatcaagaggccattggtgacagaagctacaacatccatggttattagatgtacatgtcattttctttcacccttttcctgaataacttgttggcattaagatgcatgacactattaccttcttcctgaataactttgagcgagatgtataaaatatgtagttttttatgttgaaaatactgaagtacg

SEQ ID NO: 6768 - DNA, 834 bp, Zea mays
  misc_feature (1)..(56): n is a, c, g, or t
  misc_feature (808)..(811): n is a, c, g, or t
  misc_feature (830)..(834): n is a, c, g, or t
  Peptide Sequence Number=SeqID_10747
  Probeset Number=SeqID_21171
nnnnnnnnnnnnnnnnnnnnnnnnnnnnnnnnnnnnnnnnnnnnnnnnnnnnnnnnagccgcgcaccgctgcctctacctctcccttccctcttctctctcccctcacctctctcctcccttccctcgcctcgctcctctctgtcccgaccaagcagcagcggccgagccctggccgaacctgcccccgaagccggagcccttcaagccgctgcccttcgccccaaggtcgacgccggcgagcagcccaagtccaaggaatggatcgacgagcgcgaggccgaagagcttgaggaactcgaagacgaccgcttcctcgagcagtactcggagaagagcgccgcgttcacgagccggagcatgctatgcgttctttctccgagaaagatattctttctctaattgctaaacttgtactaaggggtgttgaacaaaaagatttttgtcggaggcgttgcttgggagacaactgaagatttatatgagccaacaacttaatgattgcacccgctgaagttggtgcataaggctgcaacaccatctagtggagggtgttctggacaaagaaagcttgtaccttaaaacaggaggatacaagaagctggagtggttgtctgaaggcttttgaactgcttgaagcattagtgtagctttggtgcttttgtgactgatcagctctggagcagctagagtgatatagttgtgggcttttgaacaatagttggagtgatatgaaacattagtgatctagttgtgaatgatattataattgtgatgcttttgtgaatatataattgtgatgcttttgnnnntaaaaaaaaaaaaaaaagnnnnn

SEQ ID NO: 6769 - DNA, 649 bp, Zea mays
  misc_feature (624)..(649): n is a, c, g, or t
  Peptide Sequence Number=SeqID_10748
  Probeset Number=SeqID_21172
atacaacggtgtcagcggactccctacgccaccgtcctcatccgacgccgtcgtccactacaccgccacggtcgtcctcggtcgcgaccgcgatccttcgttgtcatccagcggcacggtttacggtttgaggactcctccatcgtgtccttgcctcttctccatcatctccttgcctcatctctcctctgagttctccctctggtcacggtcttggttgctctgttgcttttcattcaaatcgtcgtgcatccagatctggtgtctatttttgggccaaatgcttatttcttgcagaaaccatgcatcaagatctagagtgttctgagcacaaaagttgtacaggtatgacctattgatcaggaaagttgtaccagacacgttcgtcgtcacgaacatcgtcaagccgtgtgcctactgcactggccggtgagcatctgcaagacgtgtgactggtgcccctgaccagaactatgcgtctctgttctcacatgatgattagatgggatctgatcaccgcgtctctgaagacctgatcaccgggagctcttcatatgtaagaaggcatgcaacatcaatgcttggacaagagtttatggcgtgtacacatgattatggcattgnnnnnnnnnnnnnnnnnnnnnnnnnn

SEQ ID NO: 6770 - DNA, 649 bp, Zea mays
  misc_feature (1)..(26): n is a, c, g, or t
  Probeset Number=SeqID_21173
nnnnnnnnnnnnnnnnnnnnnnnnnncaatgccataatcatgtgtacacgccataaactcttgtccaagcattgatgttgcatgccttcttacatatgaagagctcccggtgatcaggtcttcagagacgcggtgatcagatcccatctaatcatcatgtgagaacagagacgcatagttctggtcaggggcaccagtcacacgtcttgcagatgctcaccggccagtgcagtaggcacacggcttgacgatgttcgtgacgacgaacgtgtctggtacaactttcctgatcaataggtcatacctgtacaacttttgtgctcagaacactctagatcttgatgcatggtttctgcaagaaataagcatttggcccaaaaatagacaccagatctggatgcacgacgatttgaatgaaaagcaacagagcaaccaagaccgtgaccagagggagaactcagaggagagatgaggcaaggagatgatggagaagaggcaaggacacgatggaggagtcctcaaaccgtaaaccgtgccgctggatgacaacgaaggatcgcggtcgcgaccgaggacgaccgtggcggtgtagtggacgacggcgtcggatgaggacggtggcgtagggagtccgctgacaccgttgtat

SEQ ID NO: 6771 - DNA, 640 bp, Zea mays
  misc_feature (1)..(38): n is a, c, g, or t
  misc_feature (601)..(640): n is a, c, g, or t
  Peptide Sequence Number=SeqID_10749
  Probeset Number=SeqID_21174
nnnnnnnnnnnnnnnnnnnnnnnnnnnnnnnnnnnnnnccccttctctcgacggcgccaccatgccgcctccgccctcaaccctacccgtatcgcgcccttgccctgcctccagccccgcgcagtatgctgctcgctccgggctccggtcatctaccatgcgtcgttggctactcgcctgctcccatgctcccttcggatctgctgctctcggtgatttagcgccgcctcctcgtgctccaacggcttcacctccgacccatcgcctcccccgcctcgcgggtcgcctctgtctcctgcttcagcggcgttcagcgccgccgggaatgggcgatcttcgtcgctctggtggaccaccccgacggcgggggcggagagcaactcaactaggaagtactttcccacggacgtgaatggacttctggcaagggttccgggcggagtccgttgctggcatctccgcgagatgcccccgacccatcattccatttcacgcgcccggaaaaaaagtaaataagaacccctttatctaccgggttccgcccaaaagaatttgaaacagctgcttgaaagggccactataggctaaatttgccatgaannnnnnnnnnnnnnnnnnnnnnnnnnnnnnnnnnnnnnnn

SEQ ID NO: 6772 - DNA, 640 bp, Zea mays
  misc_feature (1)..(40): n is a, c, g, or t
  misc_feature (603)..(640): n is a, c, g, or t
  Probeset Number=SeqID_21175
nnnnnnnnnnnnnnnnnnnnnnnnnnnnnnnnnnnnnnnnttcatggcaaatttagcctatagtggccctttcaagcagctgtttcaaattcttttgggcggaacccggtagataaaggggttcttatttactttttttccgggcgcgtgaaatggaatgatgggtcgggggcatctcgcggagatgccagcaacggactccgcccggaacccttgccagaagtccattcacgtccgtgggaaagtacttcctagttgagttgctctccgcccccgccgtcggggtggtccaccagagcgacgaagatcgcccattcccggcggcgctgaacgccgctgaagcaggagacagaggcgacccgcgaggcgggggaggcgatgggtcggaggtgaagccgttggagcacgaggaggcggcgctaaatcaccgagagcagcagatccgaagggagcatgggagcaggcgagtagccaacgacgcatggtagatgaccggagcccggagcgagcagcatactgcgcggggctggaggcagggcaagggcgcgatacgggtagggttgagggcggaggcggcatggtggcgccgtcgagagaaggggnnnnnnnnnnnnnnnnnnnnnnnnnnnnnnnnnnnnnn

SEQ ID NO: 6773 - DNA, 643 bp, Zea mays
  misc_feature (643)..(643): n is a, c, g, or t
  Peptide Sequence Number=SeqID_10750
  Probeset Number=SeqID_21176
tttcctaccctcagttactgaattggtttcctttttgtgtttttgtcttctgtgtcttttttgtagtcccgcataatgccattgcagattgttttgtagtccgaccttatgcaatagtggcaatcgggccttaacccacagaagacactattcttttgactttgattaatcattttattattagcgcgtcttgtctatatatctactctgctcactaagatttggacaggtaacttggtgaaagttgcaattccacggcctgaccccagcggtgctcctgttgctggtgttggaaaggtgtttttggaatatgcagatgtggagggctcaaccaaagcaaagacagggatgcatgggcggaaattcggcgggaaccaggtggtggcggtgttctatcctgaggacaagtttgcagctgagcagtacgactgaaaagttttagaaaacccctattctagagttgcacttgtggcacacaatgtggttgttttgaccttttgaaccttatgtatctaagatggtttcggtccatcaatcgactgacatatacaacatctaggatccagtagttgctcccgtgggttgctcattttaagcgggtttattgccaaaatgggaaacgagaggacgtttccaatagagn

SEQ ID NO: 6774 - DNA, 547 bp, Zea mays
  misc_feature (119)..(119): n is a, c, g, or t
  misc_feature (311)..(311): n is a, c, g, or t
  misc_feature (318)..(318): n is a, c, g, or t
  misc_feature (320)..(320): n is a, c, g, or t
  misc_feature (322)..(322): n is a, c, g, or t
  misc_feature (341)..(342): n is a, c, g, or t
  misc_feature (345)..(345): n is a, c, g, or t
  misc_feature (424)..(424): n is a, c, g, or t
  misc_feature (430)..(430): n is a, c, g, or t
  misc_feature (440)..(440): n is a, c, g, or t
  misc_feature (445)..(446): n is a, c, g, or t
  misc_feature (452)..(453): n is a, c, g, or t
  misc_feature (459)..(460): n is a, c, g, or t
  misc_feature (462)..(462): n is a, c, g, or t
  misc_feature (465)..(465): n is a, c, g, or t
  misc_feature (467)..(468): n is a, c, g, or t
  misc_feature (470)..(470): n is a, c, g, or t
  misc_feature (480)..(480): n is a, c, g, or t
  misc_feature (482)..(482): n is a, c, g, or t
  misc_feature (485)..(485): n is a, c, g, or t
  misc_feature (487)..(497): n is a, c, g, or t
  misc_feature (499)..(499): n is a, c, g, or t
  misc_feature (501)..(504): n is a, c, g, or t
  misc_feature (506)..(507): n is a, c, g, or t
  misc_feature (510)..(510): n is a, c, g, or t
  misc_feature (512)..(516): n is a, c, g, or t
  misc_feature (518)..(547): n is a, c, g, or t
  Peptide Sequence Number=SeqID_10751
  Probeset Number=SeqID_21177
aaaaaaaaaaacccaaaatagcaatcagctcatctgtcagcgccacaggtgaccggaaaaccacggccggcgttcctgctttctctacccggtccgaattgctgaccggatcaacccgnagaccttgcaggattatcgatctgattgcggcatgatccgcttcatcctgctgcagaaccgggcaggggaaagactcggactggcccaagtattacgtccccgctcgaggactcggaaaaggcacaaggttgggaatacgaggtacaccccgggcttcgtgggtcaatcgggggaaccctaagttcaccacntttttcngncngagggtttacctggatacnnaanatgaaatttattctttggctgggggagctgcaagaaacaagcaaaaaggcaataattgagcgaatgggtgaactggganaactgnaatgatgaanaccannaaatgnntgcccnngnggngnngnattccaattngnatnannnnnnnnnnngngnnnnannttngnnnnncnnnnnnnnnnnnnnnnnnnnnnnnnnnnnn

SEQ ID NO: 6775 - DNA, 1425 bp, Zea mays
  misc_feature (3)..(4): n is a, c, g, or t
  misc_feature (6)..(7): n is a, c, g, or t
  misc_feature (1115)..(1143): n is a, c, g, or t
  misc_feature (1146)..(1150): n is a, c, g, or t
  misc_feature (1158)..(1165): n is a, c, g, or t
  misc_feature (1167)..(1167): n is a, c, g, or t
  misc_feature (1169)..(1174): n is a, c, g, or t
  misc_feature (1185)..(1189): n is a, c, g, or t
  misc_feature (1193)..(1201): n is a, c, g, or t
  misc_feature (1203)..(1204): n is a, c, g, or t
  misc_feature (1213)..(1215): n is a, c, g, or t
  misc_feature (1230)..(1232): n is a, c, g, or t
  misc_feature (1236)..(1249): n is a, c, g, or t
  misc_feature (1255)..(1257): n is a, c, g, or t
  misc_feature (1263)..(1263): n is a, c, g, or t
  misc_feature (1265)..(1271): n is a, c, g, or t
  misc_feature (1283)..(1293): n is a, c, g, or t
  misc_feature (1297)..(1302): n is a, c, g, or t
  misc_feature (1341)..(1342): n is a, c, g, or t
  misc_feature (1348)..(1353): n is a, c, g, or t
  misc_feature (1356)..(1359): n is a, c, g, or t
  misc_feature (1381)..(1385): n is a, c, g, or t
  misc_feature (1389)..(1393): n is a, c, g, or t
  misc_feature (1412)..(1421): n is a, c, g, or t
  misc_feature (1425)..(1425): n is a, c, g, or t
  Probeset Number=SeqID_21178
ganngnnacccgaacgcccggtcctaccggttcgggagccagccacccaccaccacaccacccatagcagccagtcgcccgcacgactctttcccggctacccacaccgcgcgagatctccgatccccgcccaaatcccacgacgccggcggcggccatgggcggcaaggacctgacggaggaccagatcgcctcgatgcgggaggccttctcgctgttcgacacggacggggacggccgcatcgcgccctcggagctgggcgtcctcatgcgctccctcggcgggaaccccacgcaggcgcagctccgggacatcgcggcgcaggagaagctcaccgcacccttcgacttcccgcgctttctcgacctcatgcgcgcccacctcaagcccgagcccttcgaccgcccgctccgcgacgccttccgcgtcctcgacaaggacggctccggcaccgtcgccgtcgccgacctccgccacgtcctcacctccatcggcgagaagctcgaggcccacgagttcgacgagtggatccgcgaggtcgacgtcgcgcccgacggcaccatccgctacgacgacttcatcctccgcatcgtcgccaaatgatcccgtcccttctccctcgagtctccgattcgccgatccaccacccccgcgctcttcgtctgtaatgacttcgtctcccgtccgccgtgatttcattttgtttacccgctagctcatttgaattcagtttggcctcttcgttccgggactgcaacctagggtctggataaacacataatggttggtgtgtgagtgtgtgtgattatcgcccaaacaatggatcgattaattaatggatctggctagtgatgttgcttttgcttagctacctgtaatgtactactattactactgcaatgtaaagtgtggatctgcttcctcttcaatacttatgaaaataaaatggaatgtggaaatgtcattgggcctgctgtataacttataaaatagaaccgcagctgtgctgggatctgcactggcctttggcctgctgtagaacttctgctacttttgtttgggtcataggttgtattggaatctggaaatttcattggcctgctttaggattagnnnnnnnnnnnnnnnnnnnnnnnnnnnnntgnnnnnctgtgcgnnnnnnnngnannnnnngacgaagaccnnnnnatcnnnnnnnnncnnaggtagtannncgctagatatatagnnngagnnnnnnnnnnnnnngaaagnnncccagncnnnnnnnctccaaaccaannnnnnnnnnnccannnnnnagtccgagaagggtgagagaatataagtgtcttcccagnnctggannnnnnaannnnacacaacaccaccaccaacttnnnnncatnnnnngactgctgtcatgctacgnnnnnnnnnngtcn

SEQ ID NO: 6776 - DNA, 914 bp, Zea mays
  misc_feature (1)..(2): n is a, c, g, or t
  misc_feature (4)..(9): n is a, c, g, or t
  misc_feature (11)..(37): n is a, c, g, or t
  misc_feature (39)..(45): n is a, c, g, or t
  misc_feature (56)..(65): n is a, c, g, or t
  misc_feature (76)..(88): n is a, c, g, or t
  misc_feature (93)..(97): n is a, c, g, or t
  misc_feature (100)..(105): n is a, c, g, or t
  misc_feature (112)..(117): n is a, c, g, or t
  misc_feature (120)..(128): n is a, c, g, or t
  misc_feature (134)..(134): n is a, c, g, or t
  misc_feature (138)..(143): n is a, c, g, or t
  misc_feature (151)..(153): n is a, c, g, or t
  misc_feature (156)..(161): n is a, c, g, or t
  misc_feature (168)..(173): n is a, c, g, or t
  misc_feature (193)..(195): n is a, c, g, or t
  misc_feature (250)..(254): n is a, c, g, or t
  misc_feature (287)..(289): n is a, c, g, or t
  misc_feature (819)..(819): n is a, c, g, or t
  misc_feature (914)..(914): n is a, c, g, or t
  Peptide Sequence Number=SeqID_10752
  Probeset Number=SeqID_21179
nngnnnnnntnnnnnnnnnnnnnnnnnnnnnnnnnnntnnnnnnntgggcattgannnnnnnnnngagcagatacnnnnnnnnnnnnngggannnnnagnnnnnntgcttcnnnnnnatnnnnnnnnncagtancagnnnnnncacacacnnngtnnnnnnagatcannnnnnggctagcagagctactcgannnggaaggagctgatataatccaaaccgagggtgggaaatgttctagcccgacaaannnnnggagtgcttggattgattgaaaaggcaacaccnnncactcgccgcagcatactccatctctcgggctgttagtattccagtgatgtgctcgtcagggttaagctcggtgactgcaccaatggcagtaactgcaggagctgctggagttggagtcggttctgctattaataaactcaacgacgttgtggcaatgatcgctgaggtgagaagcattgcgcaagcaatggagcttgcgccaagaatcgtgtccgaaaacctgagaacaattagttactagtggctaggaatacccttgccatttctgagcaaacttgagcagtcaataagaaagcaaaagagaggcatcgactctgcattttattctctctacgctgtcttttgcctgtggcagtgaatagcgcattagcatcatagaagtattagcttgatcaatggaagttgttcatgcgcttcttcatcgctgcaagtgttgtcatcttgtcgaactcacaataagcttagataagtgctgggtttgtgggaataaaaaaaaaaaaaaaagcggccccaggtgcacgatctcatntatattgcacatacgatgttccacagacgcagcattacctagcttattgtagaacatcgtaggtggcagatctcatgtatattgcacaaacgatn

SEQ ID NO: 6777 - DNA, 304 bp, Zea mays
  Peptide Sequence Number=SeqID_10753
  Probeset Number=SeqID_21180
tttttttttttttttttgatcaaatagacttggattgatcaaggggagtgttacaaaatattatgtacaaagtgatcaatcctctctgacagttttctcacaaaagacatgtcccttgggagacactacatccattgtatataagagatcatatctgcaataaagtggacaaccgttacttcactttctcccttctctctatctcattaccgctgagtattacaacagttcagagtctaaccgatgtcggtggtggcggggtggggagcgggactgcaggtgagagaggatccgtgggcgtggt

SEQ ID NO: 6778 - DNA, 871 bp, Zea mays
  misc_feature (1)..(270): n is a, c, g, or t
  misc_feature (871)..(871): n is a, c, g, or t
  Peptide Sequence Number=SeqID_10754
  Probeset Number=SeqID_21181
nnnnnnnnnnnnnnnnnnnnnnnnnnnnnnnnnnnnnnnnnnnnnnnnnnnnnnnnnnnnnnnnnnnnnnnnnnnnnnnnnnnnnnnnnnnnnnnnnnnnnnnnnnnnnnnnnnnnnnnnnnnnnnnnnnnnnnnnnnnnnnnnnnnnnnnnnnnnnnnnnnnnnnnnnnnnnnnnnnnnnnnnnnnnnnnnnnnnnnnnnnnnnnnnnnnnnnnnnnnnnnnnnnnnnnnnnnnnnnnnnnnnnnnnnnnnnnnnnnnnnnnnnnnnnngttgagattcctagaggcagcaaggttaagtatgagttggacaaagcaactggtcttatcaaggttgatcgtgttctgtactcctcagttgtgtacccacacaattatggcttcattccacgcacactctgcgaggataatgacccgatggacgtccttgtcctgatgcaggaacaagttgttcctggttgcttcctgcgtgcccgtgctattgggcttatgcctatgattgatcagggtgggaaagatgacaagatcatagctgtctgtgctgatgatcctgagtaccgtcacttcaaggacatcagtgaactccccccgcatcgcctacaagagatccgccgcttctttgaagactacaaaaagaatgaaaacaaagaagttgcagtgaatgatttcctcccagccgaagatgccatcaaagcaatcaagtactcgatggacctctatggctcgtacgtcatggaaagcctgaggaggtgatctgctgctgcttgattgtggatgctacgtaattttctcaactgctgatcgtttcagcatgaacagaaggtaatatcccttggtcatgattccagttcgtgcgtgttaacatttgccn

SEQ ID NO: 6779 - DNA, 452 bp, Zea mays
  misc_feature (269)..(269): n is a, c, g, or t
  Peptide Sequence Number=SeqID_10755
  Probeset Number=SeqID_21182
gcttctcttggtctgcatgcagatcgtggcgattcttttgtggaacccaaagtagagtatggggcagtttctcttctttatcagttacacggttgacaaagttcacaatacatctctgttgccttctgttgtgctcagtggcggacccaggatttgaggacagcctaggcaagattaagttactatcctctatgcctgtgcttgcttgcttctctccattgccgtagattaagcgtatggtgcttgcttgcttctctccattgccgtanagcagcccaggccaccgcctgtggtgcctgggtggtgagtccgccgctggttgtgctggctttggtcattaatgagtttataatgtgagtgctctacctcttccatggacaataaatacatctatgcttctcttggtctactaactgtttcgctgtccttatgtgagtctccattgaaatcat

SEQ ID NO: 6780 - DNA, 626 bp, Zea mays
  misc_feature (1)..(26): n is a, c, g, or t
  Probeset Number=SeqID_21183
nnnnnnnnnnnnnnnnnnnnnnnnnntgcagtaattcagtaaaaagtactgcattacctgctggctgctacctaaagcagatcagcatccaaacaaaaacgattaatcgcccaaaaccagagtgaagcccagtactgtagatgggccaaaaaccagagtgaatcccagtaccaaaactgcaacgaccaaaaacgaccacgaagtgttcgaccagacgactaatcgcccaggtcgacgactagtcgaacgactaggacgactagaaaccctaatcgcgtcgtcctcctaatcgccctcttccaggcgaccagcccgactaatcgcgattaatcgcgattagtcggacgacttgtaaacactggcaattaccataaagataattgacaattgtgaccatacaagaaattttaggttatgagagattttcttgtgtttccatccagtccggtgcactgactattagagcatctccaagagctcctaataaatgtcccccaaaactagttttggcaaataaggcgaaaaaatcactgctccaacagtatccaactcgtagcccaatattttggcaacaccaaaaatcggcacagttctctaattccagtcgaagaactgccatctcaatc

SEQ ID NO: 6781 - DNA, 581 bp, Zea mays
  misc_feature (579)..(581): n is a, c, g, or t
  Peptide Sequence Number=SeqID_10756
  Probeset Number=SeqID_21184
accaggcaggcctttgtcgaacgcatgaaccgggtcaataacgcagtcgtcgagttcgtcaacggcattccggtggtcaaggccttcggtgccatcggcaaggcccacgcaagctaccgcaaagcggtggatgatttcagcaaagccttcgttgaattcacccggccgctggtggggacgatggccaacgccaatgcaatgatcgccccggtgacggtgctggcaacggtgctgacgttcggcctggtgtttatcagcctgggctggatcagcgccgtagaggtgctgccgttcgccattgtcgcgccgggtatttgtgcgccgctgatgctgctgagttacatcactcacgacctgaacaacgccgttggcgccgccgagcgtgtacaggcactgctggcgacaccggtgctggcacaggtggaaccgggttccgagcggctgcccaaggacgccgaggtgcgcgtggaaaacctcgggtacgcctacgacccgcagaacccggtactgtcgaacatcagcttgaccctcaagcccggtaccgtcaccgccattgtcggcgcttcgggctcgggcaannn

SEQ ID NO: 6782 - DNA, 418 bp, Zea mays
  misc_feature (339)..(418): n is a, c, g, or t
  Peptide Sequence Number=SeqID_10757
  Probeset Number=SeqID_21185
gacacggcacaaccttgacaactatatataatacgggcacaagagctttatttatttattttacacacgacggtgatgagcgaattgaaataaaggataatggaggatggagggtgatcaggtctatttgaaggtgtcgccacttcggggtatgaggagattcaaagtcaaaggaaagttgtcccctcgcttcattggacctttcttgatcttaaagcgagtgggagaagttgcatatcaactgaagttacccgatcatctgtcagatatacatgatgtatttcatgtgtctcagctaaagaagtacctcagggtacctgaggagcagctaccactggnnnnnnnnnnnnnnnnnnnnnnnnnnnnnnnnnnnnnnnnnnnnnnnnnnnnnnnnnnnnnnnnnnnnnnnnnnnnnnnn

SEQ ID NO: 6783 - DNA, 291 bp, Zea mays
  misc_feature (265)..(291): n is a, c, g, or t
  Peptide Sequence Number=SeqID_10758
  Probeset Number=SeqID_21186
tagcgtggtcgcggccgaggtactttccaagctccggcgggagcgcgccagtaaagcggttattgctaaacctaaatattgacagtgacggcaacgggccgatggtcgctgggatctcgccggagaagttgtttctgaagaggtacaggtttcggaaggtgagtttggtgaactgcgctggaagaactagcacactcgcagggttctccattgctttgcttcttgcttctttcgctttgctctccgttgtgttagttagccagtnnnnnnnnnnnnnnnnnnnnnnnnnnn

SEQ ID NO: 6784 - DNA, 521 bp, Zea mays
  misc_feature (175)..(175): n is a, c, g, or t
  misc_feature (278)..(278): n is a, c, g, or t
  misc_feature (360)..(360): n is a, c, g, or t
  misc_feature (393)..(393): n is a, c, g, or t
  misc_feature (398)..(398): n is a, c, g, or t
  misc_feature (403)..(403): n is a, c, g, or t
  misc_feature (406)..(406): n is a, c, g, or t
  misc_feature (411)..(411): n is a, c, g, or t
  misc_feature (414)..(414): n is a, c, g, or t
  misc_feature (416)..(416): n is a, c, g, or t
  misc_feature (420)..(420): n is a, c, g, or t
  misc_feature (424)..(424): n is a, c, g, or t
  misc_feature (426)..(427): n is a, c, g, or t
  misc_feature (434)..(435): n is a, c, g, or t
  misc_feature (438)..(438): n is a, c, g, or t
  misc_feature (440)..(440): n is a, c, g, or t
  misc_feature (442)..(442): n is a, c, g, or t
  misc_feature (444)..(444): n is a, c, g, or t
  misc_feature (450)..(450): n is a, c, g, or t
  misc_feature (458)..(458): n is a, c, g, or t
  misc_feature (461)..(461): n is a, c, g, or t
  misc_feature (464)..(464): n is a, c, g, or t
  misc_feature (473)..(474): n is a, c, g, or t
  misc_feature (476)..(476): n is a, c, g, or t
  misc_feature (481)..(484): n is a, c, g, or t
  misc_feature (486)..(486): n is a, c, g, or t
  misc_feature (490)..(492): n is a, c, g, or t
  misc_feature (494)..(495): n is a, c, g, or t
  misc_feature (497)..(499): n is a, c, g, or t
  misc_feature (501)..(502): n is a, c, g, or t
  misc_feature (504)..(505): n is a, c, g, or t
  misc_feature (508)..(508): n is a, c, g, or t
  misc_feature (510)..(521): n is a, c, g, or t
  Peptide Sequence Number=SeqID_10759
  Probeset Number=SeqID_21187
atacgcttcgagcctgccttggttttccatttactctcagcctgctctctctctctcatggcggacgaactggggtgggccgtcgctaccaacggcacacccaggtattcttgggaccctgcgccggcgacgagcaccgcaagggaaatgatccagcacaggccctatgatcatnaatgttgatgtctatagctttggcatcgtcttgtgggagctaataaccggcatgcttcctttcaccaccatgacgggccgttcaggaagctttttgctgtggnaaataaagggtgctccgtccggtgatccctcaagactgcctatcttctctaagccacattatgactcgcttgctgggatggnaaaccctgaaagttcgcccgccattttactganattgnctgcntgnttganagngntganatgnanntcctgannaangngngnaaagangcttccgntgntgnatttctganncntgacnnnnantgannngnnannngnngnntanannnnnnnnnnnn

SEQ ID NO: 6785 - DNA, 382 bp, Zea mays
  Peptide Sequence Number=SeqID_10760
  Probeset Number=SeqID_21188
ttttttttttttttttcttatatattagtgcttgcttctgatcttgctaaaggctgctcattaagagtcccatctcattgtgctttgaacggtgacaaaacacggctagctagctagctagctagctcgatcgatcaccatgacgccgcgtggaatcccaccgaattccatgctgcttcgagcaacgtcgtcgtggacggaagcagatcgacgacggcactccagcgcgcagcccatgcatgcttgtcgttgtcgccatatatatggcgcccatgcatgcggcatgccctccgagtggatcgtcgtctgcgatttgcattcatctcactcatctccccacgccgacgcagccctgtcatgtgcccatgaaaaagacgcctct

SEQ ID NO: 6786 - DNA, 524 bp, Zea mays
  misc_feature (7)..(7): n is a, c, g, or t
  misc_feature (11)..(16): n is a, c, g, or t
  Probeset Number=SeqID_21189
gaccctngagnnnnnncgggccaattccagaaaacacctatccaaatccaccatcgggctaggcggcagaagcatgttggtcgtggagggagccgccgccggggactccggctagccgatgttgatccctagggagtgggccgtggggatggctgggtccaccaagaggtctctcacggcctcgcctggcgggattggaccggtggccagatcaccagcgcgggagctccatgtgaagcgtcctgtttgtgtggacagcctattcgtccccctcatctccgtgcggttacgaggatctgaggaatcaccctgttacctggatctcaagtgccaggtcaagaacaggtaccgcaggatgaggcgcatggaggatgctgcgatgagttcgtgagagagatctaggccgtcgtctcccagtcaactttggattgctggatcgttgcctccttatatgtaattatttattttgtatagaactcctattatatagtaaagttgtaacattcataaaaaaaaaaaaaaaa

SEQ ID NO: 6787 - DNA, 477 bp, Zea mays
  Peptide Sequence Number=SeqID_10761
  Probeset Number=SeqID_21190
tttttttttttttttttgtggaaaaagtattcagctggtagggggttaaaatgcgaaatggccgtctaccgttggatcatcatcgtgaggtcctagttgagtgcttgcacgattgaacagatgtgctgattgtgattacataccagtcgccgcctacatcacctgcccgcaccggaccctctacacatgtacgagagggagagggatgacgcttgctaatttcctactaggagcgtgcgagcgagccagagggagcggtcatttgcagcgacgacgtacgacagcttcgtcgtcttggtggcgtggcaccatgggcggcgcctactgccgccgccgctcgccgctcgagcagcaactcctcccggcagtgctggtgctgctcgtcatcgtcgccgccagcagcagcttctggggtgtggccgccaaggagacgggccggaatgtgatcacgcacatcaaggggttccgaggcccgct

SEQ ID NO: 6788 - DNA, 327 bp, Zea mays
  Probeset Number=SeqID_21191
aattttttcacctacccccttagccgccacaagccattttccctgccttcttctcctctcacgcgcagctcttctctgttcctagacgtgcgcaggggcagaagctccagcagccatggcgtccctctcctccagtcgctcccatggatggcgcccaagcccttcttccacctctagccggacctgcccagcgccactcctttctctccatggccggcgcacaggaagcccgcagccatggacgcccaggcccgacgccctacctgcgtacctccatggctggcgctccccttccttggtgccccatggctgctcgttcagatgccc

SEQ ID NO: 6789 - DNA, 517 bp, Zea mays
  Peptide Sequence Number=SeqID_10762
  Probeset Number=SeqID_21192
ttttttttttttttttctttttttttgacaatcttgaacttatgtcttagtcttaccaatttacaagcagtgcagttaataagtatatccacagctagctgctgttaacaaggcaaacaataatgccgtacgcaagacatgcatgggcccatcgcggtagccggtagggatgcttcctccttggcgcacgggatgcgcgcgcgcgggcggcggcgagtttggcgcttgctttgccgcatgcatgcctgtgccagcgtgcacggtcttccggccgcgccaccagggtgaaagacgcctttgccctttcccctcgcgctggccactggccgcagcagcggaacttgcacgcgagttcgtgcttgcagaaacccggccgacgaagcatccagcggctcgcggtcatcaatggggcatgtcgatgatatgcacgcacgcacgcacgctcgacccttctggccagccatcggatatgctgacggacggaccggacgagtgaatccatcaagattcaccagac

SEQ ID NO: 6790 - DNA, 466 bp, Zea mays
  Probeset Number=SeqID_21193
ttttttttttttttttgacataaatactatactataacattaaggttggagtttcctaaactccaaaaataacacactttagggtttgatatttaaaacgtatcaatcaaacatcttttggcttccaataccataatattttcaaatactataatactacttcaaaactgcaaaaaataatgagattccaaaccgagcctaaaatcgcttcttctgcctcttcacgctccattctttcttcttcgcctagacgagtaggaagcctgcgcagactacgaagacggactagctagtgagttaacaagtggctctagggactcaccgtagaggagcatggtggtgggccgtgggcgtgccgcgtgcgcatggtccctgcgtggcgggtttcggcgacggcgcagccgcgcagcgacgctcggattcggaggcatcgcaagaagcaagcagatccggacggtttgggttt

SEQ ID NO: 6791 - DNA, 430 bp, Zea mays
  Peptide Sequence Number=SeqID_10763
  Probeset Number=SeqID_21194
ttttttttttttttttgttttttatgtccgacggtccttctgccagtcgtcgagcgtaggatattatgtccgacggttgctctgggccatcggatataatgttatctctggcggctgcctacgaggccatcagacataacagagccatcggaactctgtcgttttattgtagtgctcgccgttgccgtccaatggccacaccgatgttcgtcgtcggcggggatgggcagctggacgcccgcattggccgtcaccagcggccaccagatatgggcataggttgggtcagattggtggtcgtggtgatgatggacgctcccggcgacggctagctagcgatggtggcgagagccatggtcatcatcatcaatgctttttctagcatcctactggacgacaacatgatggccatggcttctggtggagatat

SEQ ID NO: 6792 - DNA, 244 bp, Zea mays
  misc_feature (2)..(2): n is a, c, g, or t
  Probeset Number=SeqID_21195
cntttttttttttttttttatatacccattgtacatattattgacattgtgtttttagtggtggtattaagtgaaccaactcaacaatatagatcacaataatattttggttccatccaatatctcaaagtttcctataccccttatatatctaaatatcaatacgacaacaatacatgagttgcatttgtgttttttggcatatatgtcttgctctcttgcaacattttagatgacacgccct

SEQ ID NO: 6793 - DNA, 478 bp, Zea mays
  Peptide Sequence Number=SeqID_10764
  Probeset Number=SeqID_21196
ttttttttttttttttcgttaattagtgaaatatattaaacaaactcatttcacttgacacaatttttacgtacaatttgctaaattacaattattcgttacaaataatgtaaaatgtaagtataaaaaccattatttatcacaaactcacactttttcactcccagtccttcctgagataattataggttttgtgcaaaaaatggcaccaatcgaataattcccacaaatgctccaaaaatcaccaaattagcgattacagagtcgcgggcctttttcttatcttcttcaggatcgcgagatccaaaattcggctggattcttcgcatttttaataattgtttatttttaataaaagtattttaattaaatcgatggtttttttgcagaaatccaattgaatttgaggcgtaaaagacgaaattcaaggaaaaagttaggttaagaggcgtgcagtgcaatgacctcgaaaattttt

SEQ ID NO: 6794 - DNA, 445 bp, Zea mays
  Peptide Sequence Number=SeqID_10765
  Probeset Number=SeqID_21197
ttttttttttttttttggtacagaaatcaatgtcacatatttattatataataaatgttatatacaaaatagctaaataaattacaccatatggtgacaacgatccttcacaaccatagttgactgggagatgacgacctagacctctccgaacttatcgtagcatccttcatgctcctcgtcttgcggtaccgtgttttggagaccaggaccgaacttcccatgtcgtggagcggctccgcgacggtgccgttgctccagcgagcagttctccgagttccgttcgcgcttgagctacgaattccccgcagcagcgtccgccgcgcttcaacgaagctccctaggcactctgctaagcccaacacgcactgccatcacgattcgaccgtggtggccctctccgttctctttctctcttctcggcaaagtggttttgggtctggac

SEQ ID NO: 6795 - DNA, 524 bp, Zea mays
  misc_feature (520)..(520): n is a, c, g, or t
  Probeset Number=SeqID_21198
ataattcttccatctctactttatagggatagtttggagtgtaggaattttataaagattaatttatcgtttatagatagtttggaatgcaagaatttactagtttagtttcgtagagaaaatatagagagataaaaagaatcccacatttcaaataaggctttagaggtatttggttccaccggaagtttaatttgtgtcacattaaatatttgaatgataattaagaatattaaatagtctaatctttctttattactacctctttaaagcatagttttgtgcatcatgtatgaaccttgtactccgtagttctgttcctctcctccatcagtttgatgcgtcgtgcaccacatacgaaacacatgtaacgtgcgaagcatgtaagggggtgtttggcagagctcatacaactccactcccagcgagaatcactctcacacagtcaaacgacaaaaatgtaaagtacttcatagtgggagtggagtgaatctaatcaccattttatactatagattgngagc

SEQ ID NO: 6796 - DNA, 202 bp, Zea mays
  Peptide Sequence Number=SeqID_10766
  Probeset Number=SeqID_21199
tttttttttttttttttcaaattttttatctactaacaattactcgtgaacccacaatacattgtttgagaaattaatagtgacacgctatatcagaaaggagagagaagggggccggcgcatagaggacgctgcaggggcagctgtgcggccgtaaagtgcccattcaggcgccatggaaggggaggggatgccagcgagc

SEQ ID NO: 6797 - DNA, 474 bp, Zea mays
  Probeset Number=SeqID_21200
ttttttttttttttttaaatgtcacaatcattattatatagcggaagtatcttacaaaaataaatgataacaataaagcgaactaaatattattccttggcgccataaagctgactaggagacgccgcctatataagctcatactcctcattgtagacctcctcctggactacctgctcttcaccttcaatgagctcctgctcaacagtttccacctactgaacacctaggtcctcggtcacttgttcatcaatgagtaggccctcaacgatgccagccatgtgcggcatggattcccggaggcgcactgctccggtgaggaatccccaggtctctagtgatctccgtgccaatcttcttgttcgatcaaggcggaggatgtatcccgactccaccggacacagggtgggggttcaagcgatggcataagccaatgtcgatggtgccggcgtttttcttcctcgctcggtgctc

SEQ ID NO: 6798 - DNA, 474 bp, Zea mays
  Peptide Sequence Number=SeqID_10767
  Probeset Number=SeqID_21201
tttttttttttttttttcatgaaattttaccagtcatccatagaaatttaaaatggcaaagatgtcatatatagaaagcaaaaaaaaacaagaaactatcaatatactcactatcggaaacttcacacaaacaacatcatactccatacatcaacttcattcttcaactccaaattcacttcatgtctgccatgctgtacaacgaaaaaccgtgccatcatgtttggtgacttgcgcagtagccatcacgactgtcgcaacatatgagacaaagagccatgcttttttgcttttttggtttctcccgagtaatggagttccaacaacatccccttttttctctgctggcgtgggatgcgagccgcaccgacggttggcctgcactctgtccatggcattcgagcatccggtccatgacgagagtgcggatgcaaagctcctaagagcggcctgttccgcaaggagtcgagggag

SEQ ID NO: 6799 - DNA, 445 bp, Zea mays
  Probeset Number=SeqID_21202
gcttttttttttttttttttatgagtaaagcaccgtgctcgcttcacaattctatcgattcaattattcacaggtaacctcaatattttaattcagaattcgattcatccctaaacgctaaatgcaaaagaaacgtacttcagcagaaaaactagtgtactgaaccacatttacatctgaatcgcaccaccgttgccaatccaccgaagcacgtcgatccaccaatgcataccgccgcatactgtctgcaggcccgccatttggcgcattggctgttatgccttgccgctaggctggtggccgcaacacggagcacccgcgctaccgcgaaaactccgtctccctggcgtaccgcgcggtggagctccggtgcccaccgccatccccacgctccatgggcgccggaagccttatttgttgtatcttcgatacatcctcaacactt

SEQ ID NO: 6800 - DNA, 466 bp, Zea mays
  Peptide Sequence Number=SeqID_10768
  Probeset Number=SeqID_21203
tttttttttttttttttactcaaattcaaataaatttattggatagctttgtctaaattttaaccataaaatttgggtattacaaaccttatatagagaggtgaacagttcaattatcctgacaccgccaggttacccgatgtgttacacgagttgtcacttctaaagttttgtatttgattctaatgtttgtggttgtcaccacaccttaaaccacccatcactatatacattaacacgcatgctagtattacatcaccacagacgccagcaatcatggggatacgcattagactaactcggacattgttacacaaactcaaaagttatttctaatctagtaactctgtctgtttaccttatcagattaacacctctaaataactttgacagattaatttatgacaatctgaaaacgaatcaatgagatagttgttttacattgttttgctccaacatctcagat

SEQ ID NO: 6801 - DNA, 374 bp, Zea mays
  Probeset Number=SeqID_21204
tttttttttttttttttgtaaaattttttttttgcctttgcccactctgaaccaatacattaccttttactatcccacgcggcaccccactacccaagcagcaatgaagagtttaaaccgagtggaaatcgtggtttgaacaggtaaatcccttcatcacactgtcagattcgaagccattgcatttgcatcagtaatctaaccgcagttttttttatatatctccattgcattctaaagttcgtggaacccccaccacgccggagcccgacatcgatcgcgcgctcctctcttctcttctctccgctacggcgtggtgggggttttacgtttttttttagatgcagtggagactggagactgtggtgagtggt

SEQ ID NO: 6802 - DNA, 326 bp, Zea mays
  misc_feature (191)..(191): n is a, c, g, or t
  misc_feature (226)..(226): n is a, c, g, or t
  misc_feature (258)..(258): n is a, c, g, or t
  misc_feature (271)..(271): n is a, c, g, or t
  misc_feature (282)..(282): n is a, c, g, or t
  misc_feature (286)..(286): n is a, c, g, or t
  misc_feature (326)..(326): n is a, c, g, or t
  Peptide Sequence Number=SeqID_10769
  Probeset Number=SeqID_21205
cgatttcgcaaatgtagtatgtagtggtagatggatccgataaattttctgtaattttgacgaggtaatcaggcaattgtctcgagattgttgttgtaaaaaaaaaaaaaaaaaaaaaaaagaaaaaaaaaaaaaaaaaaacttcccctcctgacctcctgtcctgtccagtcacacttgacgctcccggntcccgctcacctggtccctgtcctgtccatctgtnccgttccattccaattccatccccggaaagcncaagccgcggganagcggccggcntacntaccacgaggaccgccagcccagggccatggccgccggtn

SEQ ID NO: 6803 - DNA, 594 bp, Zea mays
  Probeset Number=SeqID_21206
attttaattctcttagctagatttcatcttcccttctcacttctccttcttttatttctgatcacagtcatacaaacccagggttgatataaatggagggtggtgcgagtgatgaagtagcagagagcagcaagaagatagggagagggaagatagagataaagaggatagagaacaccacgaatcgccaagtcactttctgcaaaagacgcaatggtctgctcaagaaagcttatgagctctctgtcttgtgtgacgctgaggttgctcttgtcatcttctccactcgcggtcgtctctacgagtaccccaaccacagtgtaagaggaaccatcgaaaggtacaagaaagcttgctccgacgctgttaatcctccttccgtcaccgaagctaatactcaataccatccgccagagtcatctaagctaccggagacagacccgggacatctcggaatccgaaccgacccattcttgccgaatcccctcccctcccttgaaactcaagggaactcaagaaaccttccaaagtagggtttgaaaaaagtaatcccgcttgggaaccagtccccaaaaaacaatgaaacagcctacg

SEQ ID NO: 6804 - DNA, 849 bp, Zea mays
  misc_feature (1)..(9): n is a, c, g, or t
  misc_feature (391)..(391): n is a, c, g, or t
  misc_feature (463)..(463): n is a, c, g, or t
  misc_feature (497)..(497): n is a, c, g, or t
  misc_feature (574)..(574): n is a, c, g, or t
  misc_feature (735)..(735): n is a, c, g, or t
  misc_feature (812)..(849): n is a, c, g, or t
  Peptide Sequence Number=SeqID_10770
  Probeset Number=SeqID_21207
nnnnnnnnnggaattcggcacgagagctcctgtcccccccccccagctgaggttccaaaatttgtatgtagaggtggactcaagctggaagctgcacttgagaagctagatgttgatgtttctgagaaagtagttcttgatgcaggactttctactggagggtttacggattgtttgctacgttatggtgctgctcatgtttatggcgtagatgttggttacggtcaggtagctgacaaaattcgcaatgataagaaagtgactgttatagaaaggacaaatctgagatacctcccaggactcccacaaaaagtcgatgtagtgacgcttgacctctctttcatttccattcttaaggtgatgccagctattatgaatgtgatgaaagaanatgcgactttagttacccttgttaaaccccaattttgaagctcgaagacacaggtcgggaagggtggcatantgagagatcccgaagtacatcaagaaggttcttngagaaagataataaccggtgttgagccgctatggatttacccaccaaaggctttatcgaatctcccattaaagggcncagacggaaacataaagtcttggcttgctttaatcgaaggacaataaaacctgaagccgaagaatagtagacttatattccattactgagtgggaagtttgaaccttgtgtgatatggtatttgtttcttttttcacgtattccattccccaatctcattntaactcgtcctttgcatagggttaacgttcaagtaaacttacctttttgtttggtgaaaaaaaaaaaaaaaaaaaannnnnnnnnnnnnnnnnnnnnnnnnnnnnnnnnnnnnn

SEQ ID NO: 6805 - DNA, 602 bp, Zea mays
  misc_feature (601)..(602): n is a, c, g, or t
  Peptide Sequence Number=SeqID_10771
  Probeset Number=SeqID_21208
gaatattatagcagcgccgacgaggaagcaggaagaagaagaagaagaatcaggaataatggcgaccggcaaaacggtgaaggatgtctctccacacgagttcgtcaaggcttacgcggcccacctcaagcgctccggcaagattgagctgccaccgtggacagacatcgtcaagaccggcaaacttaaggagcttgctccttatgaccctgactggtactacatcagagctgcgtcgatggcaaggaaagtgtacctgagaggtggacttggagttggtgcgttccgcaggatctatggaggaagcaagaggaacggaagcagaccacctcatttctgcaagagcagtggtggtgttgctcgtcacattcttcagcaactccagaccatgaacattgtcgacctcgacaccaaagggggggaggaagatcacgtccagtggtgagagagatcttgaccaagtcgcaggaaggatcgctgctgctatctaaaatcgatgatcacaggcttttttttttttttttttttttgagattaaaatacttttggaggggattggtttggaaacccaaaggggaaccccttccccctttttttgggnn

SEQ ID NO: 6806 - DNA, 510 bp, Zea mays
  misc_feature (1)..(1): n is a, c, g, or t
  misc_feature (4)..(4): n is a, c, g, or t
  misc_feature (6)..(6): n is a, c, g, or t
  misc_feature (12)..(12): n is a, c, g, or t
  misc_feature (17)..(17): n is a, c, g, or t
  misc_feature (19)..(19): n is a, c, g, or t
  misc_feature (24)..(24): n is a, c, g, or t
  misc_feature (27)..(29): n is a, c, g, or t
  misc_feature (32)..(32): n is a, c, g, or t
  misc_feature (38)..(38): n is a, c, g, or t
  misc_feature (45)..(46): n is a, c, g, or t
  misc_feature (55)..(56): n is a, c, g, or t
  misc_feature (60)..(60): n is a, c, g, or t
  misc_feature (66)..(67): n is a, c, g, or t
  misc_feature (73)..(74): n is a, c, g, or t
  misc_feature (78)..(78): n is a, c, g, or t
  misc_feature (81)..(81): n is a, c, g, or t
  misc_feature (83)..(84): n is a, c, g, or t
  misc_feature (141)..(141): n is a, c, g, or t
  misc_feature (173)..(174): n is a, c, g, or t
  misc_feature (259)..(259): n is a, c, g, or t
  misc_feature (273)..(273): n is a, c, g, or t
  misc_feature (365)..(365): n is a, c, g, or t
  Peptide Sequence Number=SeqID_10772
  Probeset Number=SeqID_21209
nccngncctaantagantnggacncgnnnggnacagcnacataannaacaaatannaggnaaaggnnaaaatnngagnacnannaccccccccgagagattttttttttttttctttattatagcacaaacaaagtcatcnttgggggattcccccccccccaaaaaacaatnncccaaattagttccaatgtgggaagaaatgggttccaaaggtccaccccaaaagtttaaaaccccaagagccccctgatgttccntgtgtgaacaaccnatggatcctccacgggttacttaatgaacccgatttcccctgggggttgctacggaaaaccccgtcggccagcagttgagaccaaacttccntgattagcccaggggagtttccacacacacggcataagggagacccaggcccgtatttcttaggatgagaattccagacgttggagtgacccatgattgtcgactgctctctgctaacagctcaaagcgattagatcaagaagac

SEQ ID NO: 6807 - DNA, 480 bp, Zea mays
  Peptide Sequence Number=SeqID_10773
  Probeset Number=SeqID_21210
aattcctggctgcctagcgacgagagcgcgaccgagagaggggtgagaggaagagagccgccgcagggggatcttcgatttggctgtcgccctcaccatcagtggtgtcgaggccgctctgctcgcgattgactgccaacttcgccagaatttctcatcgtcgatctcggtcatccatggattcatttgatgccgtgcgcagtgctgcttagtcatcgatcacgacgagcaagtgatcgaggacccaggtgttcagcaggtggaaattgctgagcaagagcttgttgaaggagaagaacaggtggttcaagaggaggccacaatgaggagtatgagcttatctaggtggcgtctcctagtcagcttgatggcaccaaggaataattatttaattcgttttattgttatcatctatttttgtaagacttccgctatgtaataatgatacttgtgacatttatcccaaaaaaaaaaaaaaaa

SEQ ID NO: 6808 - DNA, 1066 bp, Zea mays
  misc_feature (1064)..(1066): n is a, c, g, or t
  Probeset Number=SeqID_21211
agttacaagttcaaaaattagccaagttagtgacagatagttcactctgaactctgaaggacaactcaaggaaattaaattgtagtttctttcagttcaaaggatcctcagatctgccctgattcgacaccaggttctgcgacttcccttgactggtgtgtaagagctgaaaacccgattactcaccacgagctccggcgatgaccagtgagacccccagcaggagcagagcgaacatggcgaagaagagcaccgggtcagcctcgccgctggagacagccgtgacggcacaggaagccatgacgagccccgcggtggcggtgctgcggcgcatgaacgccgcgagagcacgtgcactgtcgaacgccgtagggacggtgggcgccgggttgtcgtcggccttgctgacgccaaaggcgacaaggttggagcgggcggggatctgactgagaaggcagcaattcgttgggagcaggtgagttcatcatgttctatcacttttcctcctttaatttcttcccatcctgtgaactgtgtgctcctgctccgttaatggtgtcgctgattgctacaaaaccacgagctccggcgatgaccagtgagacccccagcaggagcagagcgaacatggcgaagaagagcaccgggtcagcctcgccgctggagacagccgtgacggcacaggaagccatgacgagccccgcggtggcggtgctgcggcgcatgaacgccgcgagagcacgtgcactgtcgaacgccgtagggaaggtgggcgccgggttgtcgtcggccttgctgacgccaaaggcgacaaggttggcgccggcgaggatccccgtgaagctgaggagcaagccgaagccgcaggtgctgctgaagtggatacaaccgctgacggaaagcagcgtgatggtgaggccgatggccctggccctgctccccggcgtgctcatcggcggcggcggcgtggaaccgtagatagacatagacagactggtgcttggtatgcagtaggtgaaggagcggtaccggccgatggagcgagcgcggacgcgtagagcctnnn

SEQ ID NO: 6809 - DNA, 1066 bp, Zea mays
  misc_feature (1)..(3): n is a, c, g, or t
  Peptide Sequence Number=SeqID_10774
  Probeset Number=SeqID_21212
nnnaggctctacgcgtccgcgctcgctccatcggccggtaccgctccttcacctactgcataccaagcaccagtctgtctatgtctatctacggttccacgccgccgccgccgatgagcacgccggggagcagggccagggccatcggcctcaccatcacgctgctttccgtcagcggttgtatccacttcagcagcacctgcggcttcggcttgctcctcagcttcacggggatcctcgccggcgccaaccttgtcgcctttggcgtcagcaaggccgacgacaacccggcgcccaccttccctacggcgttcgacagtgcacgtgctctcgcggcgttcatgcgccgcagcaccgccaccgcggggctcgtcatggcttcctgtgccgtcacggctgtctccagcggcgaggctgacccggtgctcttcttcgccatgttcgctctgctcctgctgggggtctcactggtcatcgccggagctcgtggttttgtagcaatcagcgacaccattaacggagcaggagcacacagttcacaggatgggaagaaattaaaggaggaaaagtgatagaacatgatgaactcacctgctcccaacgaattgctgccttctcagtcagatccccgcccgctccaaccttgtcgcctttggcgtcagcaaggccgacgacaacccggcgcccaccgtccctacggcgttcgacagtgcacgtgctctcgcggcgttcatgcgccgcagcaccgccaccgcggggctcgtcatggcttcctgtgccgtcacggctgtctccagcggcgaggctgacccggtgctcttcttcgccatgttcgctctgctcctgctgggggtctcactggtcatcgccggagctcgtggtgagtaatcgggttttcagctcttacacaccagtcaagggaagtcgcagaacctggtgtcgaatcagggcagatctgaggatcctttgaactgaaagaaactacaatttaatttccttgagttgtccttcagagttcagagtgaactatctgtcactaacttggctaatttttgaacttgtaact

SEQ ID NO: 6810 - DNA, 810 bp, Zea mays
  misc_feature (1)..(2): n is a, c, g, or t
  misc_feature (810)..(810): n is a, c, g, or t
  Peptide Sequence Number=SeqID_10775
  Probeset Number=SeqID_21213
nnggtctcagtgctccgcgatcgcttcaccccttcccatgccttcaggagtgcgatgggagagttagggagattgctaatctatgaggcaactcgggattggctgccgacagtaacacgggagatccagacaccagtgggaactgcggttgttgaatctgtcagtgagatggagccaatcatgattgtacctattcttagagcagggcttgctcttgcagatcttgcaacatcaattttgccatcaactaaaactttccatttaggtatgtccagggatgagacaacgctgctgccctctgtttacttaaataagctacctgatagattcccaaaaggatgtaatatactccttgtggatcctatgctagcaactggtggaacagtcactgcagcagttgatctggttaaggagcgtggagctgaaatcagtcagataagaatcatatcagctgttgctgctcctcctgcaatcaagaagctcaatcaaagattcccagggatttgtgtgtatacaggaactatggatcaaattgtgaatgagaaaggtttcatagttccaggccttggggatgctggagaccgcagctatggaacatgactctgctggcggtctggccctttgccgatgaccattgttaggaatttcagcaaaacccagatttatttagttgatgcctgcttattttcgtagaccagatttgtgtaataatgtatatatataataatgtaatatgtactcatagtttcaacctctaccgccgttgcctccctgtcgtgaggacccatccctccctgttggaggggccgn

SEQ ID NO: 6811 - DNA, 657 bp, Zea mays
  misc_feature (651)..(657): n is a, c, g, or t
  Peptide Sequence Number=SeqID_10776
  Probeset Number=SeqID_21214
agtgcccttctgtctcctatctccccggagtccccgctgcccagcccggtctcactttccagtctccgagactccgagtctcgctcgcaccccgtcccctgcagcctgtgctctgggttggagggaggtgagctgcgagggagcgcggagggggcgaggagatggaggcagattcggcgaggaagagacttgcattgctggccctgcttctcctggcggcgcccgtccgcccggcctcggcggctccgggtgggaggatggcctgcctcagcaatggtgactttgagacagcaccaaagtggtggttttggtaaaatctggcttctgttggctgaggggtgcatcgtcaatcccctgggttggacgatcaacggggcacggtttgaactcccatttcagcagggccacaccaggggtggcatgatcctgattggtccccacaggggggaacccatgcagtaaagggctaggggaaatggatgccttagcggtgggggcaagggggggggaaccgtttgaagaaagggtttccggaggaatggcttatccacatttccaggggggtggccccggaacctgtggcaccaacttgggagggcacttggaaagggtttcccgtggctaagggggggcggggcccctccaaaacannnnnnn

SEQ ID NO: 6812 - DNA, 657 bp, Zea mays
  misc_feature (1)..(7): n is a, c, g, or t
  Probeset Number=SeqID_21215
nnnnnnntgttttggaggggccccgcccccccttagccacgggaaaccctttccaagtgccctcccaagttggtgccacaggttccggggccacccccctggaaatgtggataagccattcctccggaaaccctttcttcaaacggttcccccccccttgcccccaccgctaaggcatccatttcccctagccctttactgcatgggttcccccctgtggggaccaatcaggatcatgccacccctggtgtggccctgctgaaatgggagttcaaaccgtgccccgttgatcgtccaacccaggggattgacgatgcacccctcagccaacagaagccagattttaccaaaaccaccactttggtgctgtctcaaagtcaccattgctgaggcaggccatcctcccacccggagccgccgaggccgggcggacgggcgccgccaggagaagcagggccagcaatgcaagtctcttcctcgccgaatctgcctccatctcctcgccccctccgcgctccctcgcagctcacctccctccaacccagagcacaggctgcaggggacggggtgcgagcgagactcggagtctcggagactggaaagtgagaccgggctgggcagcggggactccggggagataggagacagaagggcact

SEQ ID NO: 6813 - DNA, 700 bp, Zea mays
  misc_feature (1)..(7): n is a, c, g, or t
  misc_feature (9)..(16): n is a, c, g, or t
  misc_feature (601)..(700): n is a, c, g, or t
  Peptide Sequence Number=SeqID_10777
  Probeset Number=SeqID_21216
nnnnnnngnnnnnnnnagtctcgtatactcatccagagagagacacggaggacctgggtttggttgcgctgcttgactcgctccgtgttccaagcgccttttgagcatgcaggcatatataaaattcctctttttacactacaatccccgcttgaatcagtagcagcaactctctccctctccgttcttggagagccgagacccttggccgtccgctctgcctcacctcctccggctcttgcttcccttgccggccggtgccttcccgaggtgtcagctgcgggaccggcctctagaaggaaggagttctagaccaccgccccgggctacaacaggccccggtatcctttgcccccccgacggaggggggtccgcttccgggggaacttttcggggcgggccccttacacggcctgcccgggggtggccccccccgacgtttccccgcccccccggtgggccccggcgggtcccccgggcgccccattggcggccgggggtatacactagcggcccccccccccgggtctgttcgggcccctccctgcccccaaggcggccccacacgggcccgagagtacttcctcgtccggggggggcnnnnnnnnnnnnnnnnnnnnnnnnnnnnnnnnnnnnnnnnnnnnnnnnnnnnnnnnnnnnnnnnnnnnnnnnnnnnnnnnnnnnnnnnnnnnnnnnnnnn

SEQ ID NO: 6814 - DNA, 664 bp, Zea mays
  misc_feature (601)..(664): n is a, c, g, or t
  Probeset Number=SeqID_21217
catccagagagagacacggaggacctgggtttggttgcgctgcttgactcgctccgtgttccaagcgccttttgagcattcaggcagatataaaattcctctttttacactacaatccccgctgaatcagcagcagcaactctctccctctccgttcttggtggtccgagacccttggccgtacgctctgcctcactcctccgtctcttgcttcccttgccggccggcggcgcgcggcgccgcgcgcgggtcgccggagcgagcgtgccgcacgccccccccatcagcaacattaggtccatgcggggtcccccccctgtgctcgtgctcatgtgccaattgtacctctcaaaaaccctgcaccacgtgtcgcatcatgagaccagctgtgctgtatacacatcatctcctcttaatgccggacacgcctgcatccccccacccccctctgcacccaccctcctatcactctgctctatgatctttaccaccgccaccgccccttattcccctcttctacgccctccattgttctcgcccccacatccccttccaccctctttttcccctcaccctcccatcccgacctacctcacctccnnnnnnnnnnnnnnnnnnnnnnnnnnnnnnnnnnnnnnnnnnnnnnnnnnnnnnnnnnnnnnnn

SEQ ID NO: 6815 - DNA, 664 bp, Zea mays
  misc_feature (1)..(64): n is a, c, g, or t
  Peptide Sequence Number=SeqID_10778
  Probeset Number=SeqID_21218
nnnnnnnnnnnnnnnnnnnnnnnnnnnnnnnnnnnnnnnnnnnnnnnnnnnnnnnnnnnnnnnnggaggtgaggtaggtcgggatgggagggtgaggggaaaaagagggtggaaggggatgtgggggcgagaacaatggagggcgtagaagaggggaataaggggcggtggcggtggtaaagatcatagagcagagtgataggagggtgggtgcagaggggggtggggggatgcaggcgtgtccggcattaagaggagatgatgtgtatacagcacagctggtctcatgatgcgacacgtggtgcagggtttttgagaggtacaattggcacatgagcacgagcacaggggggggaccccgcatggacctaatgttgctgatggggggggcgtgcggcacgctcgctccggcgacccgcgcgcggcgccgcgcgccgccggccggcaagggaagcaagagacggaggagtgaggcagagcgtacggccaagggtctcggaccaccaagaacggagagggagagagttgctgctgctgattcagcggggattgtagtgtaaaaagaggaattttatatctgcctgaatgctcaaaaggcgcttggaacacggagcgagtcaagcagcgcaaccaaacccaggtcctccgtgtctctctctggatg

SEQ ID NO: 6816 - DNA, 458 bp, Zea mays
  Probeset Number=SeqID_21219
gagtcaactacgtaggcccccccccccgatactggtggagcgttggcagtagctgatacgctgaactgaatggactccgcacatccagagggaagtgttaaaacgtttggcatcatttatagctggctggactggagtatattctgttagcgtttgttcggttaagaatggattaattgagattaaatttcctcatgagagctagtttagtgactagagatcatgggtgaatagcaaggggattcttttccatggatcctctcgtgatggatcaccaaattagcccttacgaggggatctaatccctttcaatacgaaaaaaatttgtcaagacattatggcatggagtataggaagtcaatttttttattgatgattgaattattttcagaacggaatatggatcctgcaaggctgcaactcctattttagatttgagaatgtttttttctctctcc

SEQ ID NO: 6817 - DNA, 521 bp, Zea mays
  misc_feature (3)..(3): n is a, c, g, or t
  misc_feature (8)..(8): n is a, c, g, or t
  misc_feature (37)..(37): n is a, c, g, or t
  misc_feature (41)..(41): n is a, c, g, or t
  misc_feature (48)..(48): n is a, c, g, or t
  misc_feature (53)..(54): n is a, c, g, or t
  misc_feature (58)..(58): n is a, c, g, or t
  misc_feature (70)..(70): n is a, c, g, or t
  misc_feature (78)..(79): n is a, c, g, or t
  misc_feature (83)..(83): n is a, c, g, or t
  misc_feature (97)..(97): n is a, c, g, or t
  misc_feature (102)..(104): n is a, c, g, or t
  misc_feature (107)..(107): n is a, c, g, or t
  misc_feature (111)..(111): n is a, c, g, or t
  misc_feature (115)..(115): n is a, c, g, or t
  misc_feature (117)..(117): n is a, c, g, or t
  misc_feature (123)..(123): n is a, c, g, or t
  misc_feature (141)..(141): n is a, c, g, or t
  misc_feature (146)..(146): n is a, c, g, or t
  misc_feature (159)..(159): n is a, c, g, or t
  misc_feature (164)..(164): n is a, c, g, or t
  misc_feature (170)..(170): n is a, c, g, or t
  misc_feature (174)..(174): n is a, c, g, or t
  misc_feature (177)..(177): n is a, c, g, or t
  misc_feature (180)..(180): n is a, c, g, or t
  misc_feature (183)..(183): n is a, c, g, or t
  misc_feature (185)..(185): n is a, c, g, or t
  misc_feature (187)..(189): n is a, c, g, or t
  misc_feature (198)..(198): n is a, c, g, or t
  misc_feature (206)..(206): n is a, c, g, or t
  misc_feature (220)..(220): n is a, c, g, or t
  misc_feature (222)..(222): n is a, c, g, or t
  misc_feature (229)..(229): n is a, c, g, or t
  misc_feature (241)..(241): n is a, c, g, or t
  misc_feature (245)..(245): n is a, c, g, or t
  misc_feature (247)..(247): n is a, c, g, or t
  misc_feature (251)..(251): n is a, c, g, or t
  misc_feature (281)..(281): n is a, c, g, or t
  misc_feature (365)..(365): n is a, c, g, or t
  misc_feature (384)..(384): n is a, c, g, or t
  misc_feature (421)..(421): n is a, c, g, or t
  misc_feature (425)..(425): n is a, c, g, or t
  misc_feature (488)..(488): n is a, c, g, or t
  misc_feature (503)..(503): n is a, c, g, or t
  misc_feature (508)..(508): n is a, c, g, or t
  misc_feature (515)..(515): n is a, c, g, or t
  Peptide Sequence Number=SeqID_10779
  Probeset Number=SeqID_21220
acnaatgnctatgctctgaattgccaatgtgctcgancaangatcacntccgnncctnctcctctccganggggacgnnggtntcacgctcggctanttccnnnagnagtncaancnacgcgnccgcccagctacacgagntggangacctcgccaacntcatnaggctntacncgnaanggnantnnngcctgatcncctactantccttcgaacagtncntgcgcanactcgagaaatnggtngncggnaaccgcgtcaggggagtgagaagtaagaanataataaaaaaagaagatatggctgccctgccactggccaccgccgaagtatgcgacgctaaccctcacctgatcatgaacggngagctccgcgcgctccagnccatcttccagatctacggacggtgccaggtcttcgncggncccatcgtcacgctcaagggctagggagggacaacgttcctggttccgcgagttcctcgaggnagaaagggcacggtnagggntcctcgnggtttg

SEQ ID NO: 6818 - DNA, 484 bp, Zea mays
  Peptide Sequence Number=SeqID_10780
  Probeset Number=SeqID_21221
ctaactcacttctcctgccccagccgtagcacttggccggcggcgctcctatagccgcttggcagtaggccacacttctctttgtacttgctctttcttgctcctttctttgttctttggatccggtcgactccctcctctcttcttctattgaacaccagtgacaaccggtggtcggacttggccggcaagacaaggacgggccccacatgtcgtatcgctggcgagcgcatccttgcgggcgggtgcgtcaccatcggcagggcactcatgatggtcccacaatggtgaggtgagaactccggccatcttggtcgtgtctgtgaactcactcccgaattacaaccacaatgactcgattcccttttctatgtgaatgaatgtatcagatgatatctaatgtaaagttgggatcaaagtcatggggttttagcgcgtaaatccaggcctcttcacgtgtttttctttaaaaaaaaaaaaaaaa

SEQ ID NO: 6819 - DNA, 652 bp, Zea mays
  misc_feature (1)..(4): n is a, c, g, or t
  misc_feature (10)..(12): n is a, c, g, or t
  misc_feature (108)..(108): n is a, c, g, or t
  misc_feature (464)..(464): n is a, c, g, or t
  misc_feature (477)..(477): n is a, c, g, or t
  Probeset Number=SeqID_21222
nnnnaagagnnngacgtcgcatgcacgcgtacgtaagctcggaattcggctcgagcttctcggatcgagactagggttagggtttcgtcactcccgccccgattcgancaggtcgagcttggccccagggtttccatgctccggccccgcatcgaaccaggacgcctcggcctcgggcgcgccattgccgccggcaacatcgtggcgcacttccctgacatgggcgccgccctctgcttcccagcctcgatcactcctccgcgcccccgcctcgggcttcctcgcaaccgtctccaacgcccagcccccggcgcagccgcctacaccaactttcaccgcgtcttctcgcgcgtcctcagcgcctacccggaccaccgctcggagctgtctgtttctctccggggtctcctccacgaccgtcccgacgactccgctccctggtccagttctctcggcttcaacgncttctcgcccggnaccgccaagccgcttgccctctcgcccctgtcgtttccgagctcttcacgccaacaagccgggaggaagaccgaaaccctcggtgagggcggcctcagctacataagaatttgaagaacgtctgcccctctcacgtgcgcacgcaacctgacctgtgcgcttggactccagggac

SEQ ID NO: 6820 - DNA, 652 bp, Zea mays
  misc_feature (176)..(176): n is a, c, g, or t
  misc_feature (189)..(189): n is a, c, g, or t
  misc_feature (545)..(545): n is a, c, g, or t
  misc_feature (641)..(643): n is a, c, g, or t
  misc_feature (649)..(652): n is a, c, g, or t
  Peptide Sequence Number=SeqID_10781
  Probeset Number=SeqID_21223
gtccctggagtccaagcgcacaggtcaggttgcgtgcgcacgtgagaggggcagacgttcttcaaattcttatgtagctgaggccgccctcaccgagggtttcggtcttcctcccggcttgttggcgtgaagagctcggaaacgacaggggcgagagggcaagcggcttggcggtnccgggcgagaagncgttgaagccgagagaactggaccagggagcggagtcgtcgggacggtcgtggaggagaccccggagagaaacagacagctccgagcggtggtccgggtaggcgctgaggacgcgcgagaagacgcggtgaaagttggtgtaggcggctgcgccgggggctgggcgttggagacggttgcgaggaagcccgaggcgggggcgcggaggagtgatcgaggctgggaagcagagggcggcgcccatgtcagggaagtgcgccacgatgttgccggcggcaatggcgcgcccgaggccgaggcgtcctggttcgatgcggggccggagcatggaaaccctggggccaagctcgacctgntcgaatcggggcgggagtgacgaaaccctaaccctagtctcgatccgagaagctcgagccgaattccgagcttacgtacgcgtgcatgcgacgtcnnnctcttnnnn

SEQ ID NO: 6821 - DNA, 974 bp, Zea mays
  misc_feature (713)..(713): n is a, c, g, or t
  misc_feature (720)..(720): n is a, c, g, or t
  misc_feature (747)..(748): n is a, c, g, or t
  misc_feature (932)..(937): n is a, c, g, or t
  misc_feature (939)..(941): n is a, c, g, or t
  misc_feature (943)..(943): n is a, c, g, or t
  misc_feature (945)..(948): n is a, c, g, or t
  misc_feature (951)..(956): n is a, c, g, or t
  misc_feature (958)..(961): n is a, c, g, or t
  misc_feature (974)..(974): n is a, c, g, or t
  Probeset Number=SeqID_21224
ccccagcagctagagcagagcccccttcacaccaaaaatttcctctttgcgtcgcgccccgccagctgggtccccgcggatgggctcggtctcgcggggctagggtttggtcggtcgtctcgtcggcgtcgagggcgccggcgctgctagctagtagctcgctcgcgctagggttctcaggagccatggtgatgcagcgcttctcgtggccgtacggaggccggagcgcctccttgtgcggcagcttcaccgggtggagggagtatcccatggggctggtcggggccgagttccaggtcgtcttcgatctgcctcccggggtttaccagtaccggtttttggttgatggtgtctggaggtgtgatgagacgaaaccctttgtatgtgatgaatatggactgatcagcaatgaagtgcttgtggaaaacaatgtgcaacctgttgtgcagccagagccttctatcagaggaactaatttggatgagggtaccgttttgacaacaatgcccccggagtcatcatctcagaacccaggcgtgcaaatagcagttttccgccatgtggtctctggaatattattacacaataccatatatgaagttgttcccctttctagcaagttagcagttttggacactcagctacctgttaaacaggcatttaaaataatgcatgacgagggtcttgctctggttcctttttgggatgaccancaggganccataacaggcatgctcactgcattannttttgtattaatcttgagaaagttgcagagaaacattcaagttattggcaacgaagagcccatttctgcttggaaagaagcaaagctacagttctatggtgggcctgatggtgctgtcatgcagagaacgccattaatccatacggtacacacaggcaacattgatctgagggccaagaaactnnnnnngnnncntnnnngannnnnngnnnncaaacttaccccn

SEQ ID NO: 6822 - DNA, 179 bp, Zea mays
  misc_feature (78)..(78): n is a, c, g, or t
  misc_feature (83)..(84): n is a, c, g, or t
  misc_feature (178)..(178): n is a, c, g, or t
  Peptide Sequence Number=SeqID_10782
  Probeset Number=SeqID_21225
aacggtcctgccaacgagcacctccatcaccaggcgatggagctgttccccgacgggccttcgtgcggctgcagagcngcgannaagaacgtacgtccacgccgacggggactgggcgggggtctccctgcgcccgaacggacccgtcccacccctgaacgcggtgtggcgggtgganc

SEQ ID NO: 6823 - DNA, 1305 bp, Zea mays
  misc_feature (977)..(977): n is a, c, g, or t
  misc_feature (1107)..(1109): n is a, c, g, or t
  misc_feature (1132)..(1305): n is a, c, g, or t
  Probeset Number=SeqID_21226
ccgatctctcacctcacttcagccacgcacactccctccttccctccccgatcactactctccctctccagttcacacccaccgccccacctctcccactcaaatccagggccatcgcagatccaccgcctccccgatccggtcgcctacccagccgcccgatcggatcctgcagggtttgtgcccgccgtgagttagatggtttacgatggtgccgtgaaggaccaggaccaggagagcgcagcggcgagcactgcgttggcggcatcggtggtggcggcgtctcccgagcaggtggtggtggggagcacgagggtctcggcgaggccgccgcaagacaagcgcctcggcgtgcgccaccccttgaagcaccgctggttccgtgcccggggtaaggtgatggtggagctcggaggggtgccgcccgctcacgccgtgccggaaggcgaggaggaggaagaggaggaggagggagtcagcgagagcgaggtggaagaggagttagtggaggtagaggtggagcaagcctcgtcagcggggacgggaatgcggggcgttgaagtggaggtgttatccgcgccagcaacaggggtgcaggagatggacgtggaggtcggtgaaatggaggtgtcgcctgagcccgcggtcgctgtggggggcaccgagctggagccccagccggacgacgaggacgaggtctcatccgtcaccttggcgcgaggggagaggaagcaggaggccgctcctgctcctgcttcctctgccgtgctagctgtggaggcgcccagggagaaggatcaggatggggagagggtggagaaggagaagagggacaaggagagggaaatgcagaaggagcgggagagggtggatgaggtcggctacatgagcggaggatggaagagtgtggatggaacgctgaattgtggatattcaagttttagaggaaaaagggcaagcaacggcgacgtctatgngataaaatcatctaaaattgatgataaacaaatacatctctttggaatttttgatggtcatggcggttcacgtgctgctgagtatttgaaggagcatttgtttgagaacctcatgaaacatccagagtgnnngacaaacacaaaattagcaatannnnnnnnnnnnnnnnnnnnnnnnnnnnnnnnnnnnnnnnnnnnnnnnnnnnnnnnnnnnnnnnnnnnnnnnnnnnnnnnnnnnnnnnnnnnnnnnnnnnnnnnnnnnnnnnnnnnnnnnnnnnnnnnnnnnnnnnnnnnnnnnnnnnnnnnnnnnnnnnnnnnnnnnnnnnnn

SEQ ID NO: 6824 - DNA, 520 bp, Zea mays
  misc_feature (231)..(231): n is a, c, g, or t
  misc_feature (312)..(312): n is a, c, g, or t
  misc_feature (332)..(332): n is a, c, g, or t
  misc_feature (365)..(365): n is a, c, g, or t
  misc_feature (376)..(376): n is a, c, g, or t
  misc_feature (385)..(385): n is a, c, g, or t
  misc_feature (390)..(390): n is a, c, g, or t
  misc_feature (429)..(429): n is a, c, g, or t
  misc_feature (486)..(486): n is a, c, g, or t
  misc_feature (517)..(517): n is a, c, g, or t
  Peptide Sequence Number=SeqID_10783
  Probeset Number=SeqID_21227
ttttttttttttttttgcacaagtccaataacaatatttatctattcaaatacattgcacgtcactattccatagttgacaactaatataaaaatacaatacacccttcggtgaagatcattcccatcccccatgcaatgtatttttacttctccaatgagagcaacagaataccttgctcatgcattaactgcgccttgtaatctgtctaagtctgtctggtccacacanaagtcatactccacgagtccaccaacttttggtagtactcaggctccttatctatcattgcttgaagcgggggtccaatanccttgttgtaggccttggtntcccatccccgtgaacgtgatcctatgctcctnaggtgcatcgngatcttggngttgngtacaatggcagaggacgaatttttttttggtatggctntacacaactttgattttgctttgcttactgttacagctcggaaggcacaggcgcgtnaacgcgtggcccgtggccggaaggctgggcncct

SEQ ID NO: 6825 - DNA, 1379 bp, Zea mays
  misc_feature (1)..(75): n is a, c, g, or t
  misc_feature (940)..(945): n is a, c, g, or t
  misc_feature (948)..(953): n is a, c, g, or t
  misc_feature (957)..(957): n is a, c, g, or t
  misc_feature (964)..(964): n is a, c, g, or t
  misc_feature (966)..(972): n is a, c, g, or t
  misc_feature (974)..(974): n is a, c, g, or t
  misc_feature (978)..(980): n is a, c, g, or t
  misc_feature (984)..(986): n is a, c, g, or t
  misc_feature (993)..(996): n is a, c, g, or t
  misc_feature (1028)..(1030): n is a, c, g, or t
  misc_feature (1038)..(1043): n is a, c, g, or t
  misc_feature (1045)..(1048): n is a, c, g, or t
  misc_feature (1077)..(1077): n is a, c, g, or t
  misc_feature (1079)..(1081): n is a, c, g, or t
  misc_feature (1083)..(1085): n is a, c, g, or t
  misc_feature (1126)..(1128): n is a, c, g, or t
  misc_feature (1130)..(1132): n is a, c, g, or t
  misc_feature (1334)..(1338): n is a, c, g, or t
  misc_feature (1350)..(1369): n is a, c, g, or t
  misc_feature (1372)..(1377): n is a, c, g, or t
  misc_feature (1379)..(1379): n is a, c, g, or t
  Probeset Number=SeqID_21228
nnnnnnnnnnnnnnnnnnnnnnnnnnnnnnnnnnnnnnnnnnnnnnnnnnnnnnnnnnnnnnnnnnnnnnnnnnnacatttacagctgttagtgtacctcattttaatttcattttaaaatacactgttagtgtatgtttcattttaatttcatcagtattctttagaatgtctcgttggcttattcagatttatagccaaaatgacattatcttggggatagttcatcagtattttttaatttcattatctcgttcggcggcggcatcccggacgggcacagcctgcacactggcgggcaggtcgtgaaggcacccaccatcgagcagaacctgtcgtgcaaccttgagtagctgtacaagggcatcaccaagaagttgaatatttctagggaaattgctgccgcaagtgggctaaccaggtgggcccaggtccctgtcagatttatgcttggttaatttctgctcgccggtgcaggcgacgcttctccttcagacgctcaaccagtcaagaaggagtccgagagccacgcatggctcggattaggaccgaatgccgccaagtccaacctgaacctgagctagcacacaaccacgcaagccaaataagacagcacagcaacctcacccaaagcctttgcgggacgatctgaaaatatgctttgccactagagtacccaaaccataaataatcctctcgttctcccgtgttttattgctcggcttggggcagtgggccgtccccctccctgttaatccccccggatggaaagaaaacacaccccccacgtcctgctaaataaaacttgtgtgggcgggcggggggaccaacaccccgtgtccttttttctcctcccccccctttacgaaccgccgccgccaaatattatcatccccaaccctccccaacccccttgcatataaagctgaaaatatgcttnnnnnntannnnnncgancccatgntnnnnnnntngagnnncgannncataaannnnctctcgttatcgtgttttagtgttctgtttannncatggtcnnnnnncnnnntgtcacatagttctggatgtaaagataantnnncnnncatgcccgagagaagttttttttggggggtgttaacacacnnncnnnctgaattggccatgctaaggaaaatgatagaagtgcaaagagaagtatatgtctttttctttttctgaaagcccagatcgtttggctctagccttgatgtatgcagaacaagtgattgtaatggattctgagtatcctcatcgtctaaaaaaaaaaaaaaaaaaaaaaaaaaaaaaaaaaaaaaaaaaaaaaaaaaaaaaannnnnaaaaaaaaaaannnnnnnnnnnnnnnnnnnnaannnnnnan

SEQ ID NO: 6826 - DNA, 1124 bp, Zea mays
  misc_feature (1)..(1): n is a, c, g, or t
  misc_feature (631)..(632): n is a, c, g, or t
  misc_feature (649)..(649): n is a, c, g, or t
  misc_feature (651)..(654): n is a, c, g, or t
  misc_feature (666)..(667): n is a, c, g, or t
  misc_feature (669)..(672): n is a, c, g, or t
  misc_feature (675)..(677): n is a, c, g, or t
  misc_feature (682)..(684): n is a, c, g, or t
  misc_feature (693)..(699): n is a, c, g, or t
  misc_feature (917)..(918): n is a, c, g, or t
  misc_feature (921)..(923): n is a, c, g, or t
  misc_feature (935)..(1124): n is a, c, g, or t
  Peptide Sequence Number=SeqID_10784
  Probeset Number=SeqID_21229
ntttttttttctttttttttttttttttttttgagcaataaatatctcaaatttgcaacttagttttgcctggttcagcttaagtacaagcttataagattacatgttccaactagattagaacaaaaagttcagcatcagctatgcaactatcacttcttgcaggcctctgctactggtcatgatctatatgactatctgtactgctcaggaagctgatagcctgtcatgactatcttatctgcaaacattttgccagtctttggcataatgtgccagtgcattgtcaagttgaattccttgccctttagattgcttccctgatgaataaatcatgtcacttatttgattcaatgccatctctgaaaaacgtggtcatgggacatactttgggggagttatcccaaagaaacctgtcacataatccaattgcacttacgaatcaatgaacagaatatggaccattataaacctatcctagcacaaataaaggatattgaagatcaaccaaagtaatgtgacaaacaccagtaagggtcaacctgtagccccaaaaggatgaaacagctgaccccgtgggttgccaaacaatactggtctacctgaatttacatagattctgaatttctanntgcagattatgggcatnannnntaatcccaaggnnannnnctnnnccccnnncagggaagnnnnnnnttggcccaagtggctggaagggtcgctgttgaagcgtgagcagtgtcatctttggtttcaatggtgtcatgtttgatggttgagaaggctgcgctctatttgctcttttgggttaggattttcgagttcagaggactttaaggtttattgcatctagctatggcgcccccctatgttccccgagtacctaatgtgatatcaagactcaattctcgaanntannntatatgtttgcnnnnnnnnnnnnnnnnnnnnnnnnnnnnnnnnnnnnnnnnnnnnnnnnnnnnnnnnnnnnnnnnnnnnnnnnnnnnnnnnnnnnnnnnnnnnnnnnnnnnnnnnnnnnnnnnnnnnnnnnnnnnnnnnnnnnnnnnnnnnnnnnnnnnnnnnnnnnnnnnnnnnnnnnnnnnnnnnnnnnnnnnnnnnnn

SEQ ID NO: 6827 - DNA, 644 bp, Zea mays
  misc_feature (644)..(644): n is a, c, g, or t
  Peptide Sequence Number=SeqID_10785
  Probeset Number=SeqID_21230
ccccttcagctccattggaggctacagctgccctctacactatacagtttacagtatatttcttcttctcggaggaggatgaacagatttccagcaccctgttttcaacaccgaggaggatgaacattctacgaaatcaaaaggaccccttaagttctacaactcggagatccacacgacatcattctgtttgtcctcttttgcaaagagggtaattgagtcaaaggcagtgtaccgaggcacctcccattggaatggcgagtgctgatctgaatgggagatatttctattactgagattcagactccaatacaatataggtgggtgtaccaatttacttagaaggaacaaaagctatggaagaggcaaaaatcaagaatattgaaagctgactgtaccagaaggttctttttgcaacctcaatttgagatttaaggtcggattaccaccagaggcagtatacaatatcataatcgaggcgggcaacaagggcttgtggatgctggacatcctcaagaagttgctgatggcccccaacatcgccaccaaggtcgtgcgcaccctcgtggcaagcgggcttctcaaagaggtcagcgacgtgcgccaccgcagcaggaagatcttcatggccaccgacttccagn

SEQ ID NO: 6828 - DNA, 644 bp, Zea mays
  misc_feature (1)..(1): n is a, c, g, or t
  Peptide Sequence Number=SeqID_10786
  Probeset Number=SeqID_21231
nctggaagtcggtggccatgaagatcttcctgctgcggtggcgcacgtcgctgacctctttgagaagcccgcttgccacgagggtgcgcacgaccttggtggcgatgttgggggccatcagcaacttcttgaggatgtccagcatccacaagcccttgttgcccgcctcgattatgatattgtatactgcctctggtggtaatccgaccttaaatctcaaattgaggttgcaaaaagaaccttctggtacagtcagctttcaatattcttgatttttgcctcttccatagcttttgttccttctaagtaaattggtacacccacctatattgtattggagtctgaatctcagtaatagaaatatctcccattcagatcagcactcgccattccaatgggaggtgcctcggtacactgcctttgactcaattaccctctttgcaaaagaggacaaacagaatgatgtcgtgtggatctccgagttgtagaacttaaggggtccttttgatttcgtagaatgttcatcctcctcggtgttgaaaacagggtgctggaaatctgttcatcctcctccgagaagaagaaatatactgtaaactgtatagtgtagagggcagctgtagcctccaatggagctgaagggg

SEQ ID NO: 6829 - DNA, 545 bp, Zea mays
  misc_feature (541)..(545): n is a, c, g, or t
  Peptide Sequence Number=SeqID_10787
  Probeset Number=SeqID_21232
tcagctacgtaggccccccccccgatgcacaagatcttcagaagctacactgcagcacacagcagatacctacgacgccagctcggagcagatagagcacctagctagcgctagctagttagtcgcaacgcaagagtgtgtgacttgtgagaaccgagtgaacgaccatggcggcgtctctgcaaggcccatacaccgggggcagcggcttgggcgggagggtcgtccacgccaggagcggtgatcgccggtcagctgcggcggtgaagcggctgctgtcgaggttgacgcgctcttggagaagacgcacggcgcggccgaggcgaaccgcggtgcggttcaggtatgacctgcatagctactaccagaacttcgacgacggcactgcctcctgcgcccaccaccgcttgtagctcattgactcattgtacaggaccgctcactcgtagagaatagctataaaactatggtggagttaaatttttacatgtggtttcagttatcaaacgacagtgttatttcaaaaaaaaaaaaaaaaaannnnn

SEQ ID NO: 6830 - DNA, 428 bp, Zea mays
  Probeset Number=SeqID_21233
aaaattcattcgcagccacaaacaaaccctaaacccctaaaccgccgccgccgccgccgccgccgccgccatggccaaaaagaaatctgccaccgtcaatggcaacggtaaccacgccgccgcagaggaagtgccgccggcgaaggccgcggaggaccggaaggcagagcagctgaaggcgctgaacaccatgctcctcaaggaggcgacggagcggcgcggtcaggtggcggcgctcacagcgcgccttgacgagctctccgccgacgacgtcgcgctgtccgccgccgagcgcgtggtggcgcaggccgccctcgccgcgccactccgcgcggccgccgacgaggtcgccgcgctccgtgcctgcctcgccgccgtccagggttcgctccgggacgcagaggcgcgggcggctctggaggagagcg

SEQ ID NO: 6831 - DNA, 983 bp, Zea mays
  misc_feature (1)..(2): n is a, c, g, or t
  misc_feature (33)..(34): n is a, c, g, or t
  misc_feature (37)..(38): n is a, c, g, or t
  misc_feature (40)..(44): n is a, c, g, or t
  misc_feature (47)..(47): n is a, c, g, or t
  misc_feature (49)..(52): n is a, c, g, or t
  misc_feature (67)..(69): n is a, c, g, or t
  misc_feature (74)..(76): n is a, c, g, or t
  misc_feature (80)..(80): n is a, c, g, or t
  misc_feature (88)..(91): n is a, c, g, or t
  misc_feature (94)..(96): n is a, c, g, or t
  misc_feature (100)..(101): n is a, c, g, or t
  misc_feature (107)..(108): n is a, c, g, or t
  misc_feature (111)..(117): n is a, c, g, or t
  misc_feature (120)..(122): n is a, c, g, or t
  misc_feature (124)..(125): n is a, c, g, or t
  misc_feature (127)..(129): n is a, c, g, or t
  misc_feature (136)..(153): n is a, c, g, or t
  misc_feature (156)..(157): n is a, c, g, or t
  misc_feature (160)..(166): n is a, c, g, or t
  misc_feature (168)..(173): n is a, c, g, or t
  misc_feature (175)..(177): n is a, c, g, or t
  misc_feature (179)..(179): n is a, c, g, or t
  misc_feature (181)..(182): n is a, c, g, or t
  misc_feature (185)..(185): n is a, c, g, or t
  misc_feature (187)..(187): n is a, c, g, or t
  misc_feature (189)..(193): n is a, c, g, or t
  misc_feature (195)..(197): n is a, c, g, or t
  misc_feature (200)..(200): n is a, c, g, or t
  misc_feature (202)..(202): n is a, c, g, or t
  misc_feature (204)..(204): n is a, c, g, or t
  misc_feature (210)..(212): n is a, c, g, or t
  misc_feature (214)..(216): n is a, c, g, or t
  misc_feature (218)..(218): n is a, c, g, or t
  misc_feature (220)..(235): n is a, c, g, or t
  misc_feature (241)..(243): n is a, c, g, or t
  misc_feature (249)..(250): n is a, c, g, or t
  misc_feature (253)..(259): n is a, c, g, or t
  misc_feature (262)..(267): n is a, c, g, or t
  misc_feature (277)..(281): n is a, c, g, or t
  misc_feature (293)..(293): n is a, c, g, or t
  misc_feature (295)..(297): n is a, c, g, or t
  misc_feature (299)..(299): n is a, c, g, or t
  misc_feature (301)..(301): n is a, c, g, or t
  misc_feature (304)..(304): n is a, c, g, or t
  misc_feature (914)..(922): n is a, c, g, or t
  misc_feature (929)..(933): n is a, c, g, or t
  misc_feature (939)..(943): n is a, c, g, or t
  misc_feature (948)..(967): n is a, c, g, or t
  misc_feature (969)..(969): n is a, c, g, or t
  misc_feature (973)..(976): n is a, c, g, or t
  misc_feature (978)..(983): n is a, c, g, or t
  Peptide Sequence Number=SeqID_10788
  Probeset Number=SeqID_21234
nngacgcgtgggcggacgcgtgggcggacgcgnnggnnannnnnttngnnnnggattcaacataatnnnagccnnnactnatagcccnnnnctnnngctnnaacccnngtnnnnnnntannnanncnnnccaccannnnnnnnnnnnnnnnnngtnnggnnnnnnncnnnnnnannnangnntcnanannnnncnnnctntngntgggannntnnncntnnnnnnnnnnnnnnnntccttnnngcatgnnctnnnnnnnctnnnnnngccattgatnnnnntaccgacactgncnnncnanctnagaccccaacccctctccctcgtcatctcttccgctcggccgactcctgttcgcccgtctccaccaccacccactggccagtccagcggccagccggtgccgccgtcacccgtctatggctctgctccgcctccacctcccgaggcctctgctttcctcccgccgcagccctgccctcccttcagctctctccgcctccgcaacgtcgtgcttgtggcgcggtcgtcttcccgcctcgcggcttctctgctccagtcaccccgccttggcccccgacgcttcctccgccgccccgccctccatcgtcgccggcctcctcgactacctcaacgaatcatggacgcagttccacgccacagctgaggccaagaggcagctgctcgacgcgggcttcaagctcctcagcgagagtgatgactgggacctgcagcccggcggccgctacttcttcacgcgcaacatgtcctgcttggtcgcctttgccatcggggaaaacacagtgaatactgatgggttcaagcctaacctagagactcatcttgttccacttcttgccacaaaacatgaagacacacctacaaattctgatgaaaaaagctctaactctacnnnnnnnnnccaccannnnntacttnnnnngattnnnnnnnnnnnnnnnnnnnntnaccnnnntnnnnnn

SEQ ID NO: 6832 - DNA, 714 bp, Zea mays
  misc_feature (18)..(18): n is a, c, g, or t
  misc_feature (65)..(65): n is a, c, g, or t
  misc_feature (139)..(139): n is a, c, g, or t
  misc_feature (496)..(496): n is a, c, g, or t
  misc_feature (536)..(536): n is a, c, g, or t
  misc_feature (538)..(539): n is a, c, g, or t
  misc_feature (541)..(541): n is a, c, g, or t
  misc_feature (544)..(544): n is a, c, g, or t
  misc_feature (549)..(549): n is a, c, g, or t
  misc_feature (567)..(567): n is a, c, g, or t
  misc_feature (576)..(576): n is a, c, g, or t
  misc_feature (581)..(581): n is a, c, g, or t
  misc_feature (586)..(586): n is a, c, g, or t
  misc_feature (595)..(595): n is a, c, g, or t
  misc_feature (598)..(598): n is a, c, g, or t
  misc_feature (604)..(604): n is a, c, g, or t
  misc_feature (620)..(620): n is a, c, g, or t
  misc_feature (627)..(627): n is a, c, g, or t
  misc_feature (635)..(635): n is a, c, g, or t
  misc_feature (645)..(645): n is a, c, g, or t
  misc_feature (660)..(660): n is a, c, g, or t
  misc_feature (663)..(663): n is a, c, g, or t
  misc_feature (684)..(684): n is a, c, g, or t
  misc_feature (686)..(686): n is a, c, g, or t
  misc_feature (694)..(694): n is a, c, g, or t
  misc_feature (702)..(714): n is a, c, g, or t
  Peptide Sequence Number=SeqID_10789
  Probeset Number=SeqID_21235
ttgaaacctttggaccgnccccccccttgagcgccgcggtctggtgaggattgcgccgggggcangaccgtcgcgcgcgcgacgtctcgatctccgccaagggcaggaaaactctgtcccgcgcgctgccgcgctgganagaggtacaggcgaagcttgccggacaggttggcgaggacagcttccggtcggcggtcgagctgatgaagggaatcgtgcgttcgggcgaggcgctgctcgatcattcgatttcgtaggaggacccgatgcccgtccgttggatcgatccgtcgccggtgctgcgtgtcgagcgcttcggcagctttgacgaatttcgtccaaacgatgttctcggcggaatgacaagcacgccgctgggttcctcggcgatcgcggtttcgcggagcatactggcgcttccggactgccttctcggctgcagcgatcattcgcccggcggatggagggagagctcggagccgatcgcggggacggnctcgtcgttccgctggtttcacgcaaccttaatgcaccgnanncngcnatctncaattgtggtattcgtgncggcgaccngcaanttcgncaactggantcnaccctntctcatctccgctccnctcgatntaccatcnaggatggccnttttgatcttgaatnaanatatcaacttgcccccaaaantnttggcgtncactgcgnnnnnnnnnnnnn

SEQ ID NO: 6833 - DNA, 627 bp, Zea mays
  misc_feature (1)..(1): n is a, c, g, or t
  misc_feature (524)..(524): n is a, c, g, or t
  misc_feature (569)..(570): n is a, c, g, or t
  misc_feature (574)..(574): n is a, c, g, or t
  misc_feature (576)..(576): n is a, c, g, or t
  misc_feature (583)..(583): n is a, c, g, or t
  misc_feature (588)..(588): n is a, c, g, or t
  misc_feature (592)..(592): n is a, c, g, or t
  misc_feature (594)..(594): n is a, c, g, or t
  misc_feature (596)..(596): n is a, c, g, or t
  misc_feature (599)..(600): n is a, c, g, or t
  misc_feature (616)..(616): n is a, c, g, or t
  misc_feature (621)..(621): n is a, c, g, or t
  Peptide Sequence Number=SeqID_10790
  Probeset Number=SeqID_21236
nattcaatcgctcgacatggtcgaatcctcgatcgatacattacgccgcgaaggtgtcagctcgatcaatctcgacctcgtctatggcttgccccgccagacagttcatggactgacgagaacgatcgaacagatcgtcgatctcgcacccgaccgcatagcgctttttggctacgctcatgttccgtggatgatgccgaggcagaatctcatcaaggatgaagaccttccggatgcgcggcagcgttaccggcaacagctcgtggccgccgacaagctggaggaagcaggttacgtccatattgggctcgatcatttcactctgcccaccgacgaccttgccattatggcggataacggcctgctcagacggaatttccaaggctatacgagcgatcaggcggcgaccgtgatcggtcttggcgcctcctcgatcggtagcttcgaccagggttttgtccagaatacgccgaataccggcaaatggcgcgacgccatcggcaaagggcagttcgcaacctgtngcggcgtggtgcttaccgacgaagaccggtttcgggcggacatcnntcanancctctangtacnatgncngnagnnggggcccggtccaatngacanatttat

SEQ ID NO: 6834 - DNA, 729 bp, Zea mays
  misc_feature (700)..(729): n is a, c, g, or t
  Peptide Sequence Number=SeqID_10791
  Probeset Number=SeqID_21237
attttagacctaccttcttcaagccgcggctggcaagaaatctaagttcctcttctccacacgacacttacgagtttgagccatggccgccgccgtagaaatcgacgctgagattcagcagcagcttaccaacgaggtcaagctcttcaaccgctggagcttcgatgacgtttcggtcacagacattagtcttgttgactacattggtgttcagcctgctaaacacgcgacctttgtcccccacactgctggaagatactctgtgaagaggttcaggaaggctcagtgcccaatcgttgagaggctcacaaactctctcatgatgcacggaaggaacaacggtaagaagctgatggctgtgaggatcatcaagcacgccatggagatcatccatctcttgactgacgccaaccctattcaggttatcattgatgccattgttaacagtggtccacgtgaagatgctaccaggattggatctgctggtgtggttaggaggcaggctgttgatatctctcctctaagacgtgtgaaccaagccatcttcttgctcaccactggtgcacgtgaagctgcgtttagaaacatcaagacaatcgctgagtgtcttgctgatgagctcatcatccctgctagggatctcccaacagctatgcctccaaaagaagtgggatttttggagaggagtgccaggctaatnnnnnnnnnnnnnnnnnnnnnnnnnnnnnn

SEQ ID NO: 6835 - DNA, 558 bp, Zea mays
  misc_feature (486)..(486): n is a, c, g, or t
  misc_feature (488)..(488): n is a, c, g, or t
  misc_feature (505)..(505): n is a, c, g, or t
  misc_feature (527)..(527): n is a, c, g, or t
  Peptide Sequence Number=SeqID_10792
  Probeset Number=SeqID_21238
agacggattagagatctcatggcgatggcggctgtaaccggagctgtgctcagtgggcttggttcttcgttcctctccggaggcaggaggagtatcaccgctttgggaaccggcgtaggcactggagctgcgagagttggccggaaaactctgattgtcgccgctgctgctgctcagccgaagaaatcgtggatccccgccgttaaaggtggcggcaacttcctcgaccctgaatggctcgatggctcgctacccggagatttcgggttcgacccgttgggtttgggaaaggacccggcttttcttaaatggtacagagaagcagagctgatccacggccgatgggcgatggcagcggttcttgggatctttcgttggccaggcctgggagcggcgtgccatggttcgaagcccgagctgatccacgtgccatcgcacccttctcttttcggatcgcttctccggacccagttgcttctcatgggntngggtggagagcaaacgntgggtcgacttctttcacccgnattctcagtctggtgagtgggcgaccccgtg

SEQ ID NO: 6836 - DNA, 661 bp, Zea mays
  misc_feature (3)..(3): n is a, c, g, or t
  misc_feature (291)..(294): n is a, c, g, or t
  misc_feature (296)..(298): n is a, c, g, or t
  misc_feature (300)..(302): n is a, c, g, or t
  misc_feature (304)..(313): n is a, c, g, or t
  misc_feature (315)..(317): n is a, c, g, or t
  misc_feature (319)..(326): n is a, c, g, or t
  misc_feature (328)..(331): n is a, c, g, or t
  misc_feature (333)..(349): n is a, c, g, or t
  misc_feature (351)..(356): n is a, c, g, or t
  misc_feature (359)..(384): n is a, c, g, or t
  misc_feature (386)..(417): n is a, c, g, or t
  misc_feature (419)..(419): n is a, c, g, or t
  misc_feature (421)..(423): n is a, c, g, or t
  misc_feature (426)..(431): n is a, c, g, or t
  misc_feature (433)..(437): n is a, c, g, or t
  misc_feature (439)..(441): n is a, c, g, or t
  misc_feature (443)..(447): n is a, c, g, or t
  misc_feature (449)..(452): n is a, c, g, or t
  misc_feature (455)..(469): n is a, c, g, or t
  misc_feature (471)..(475): n is a, c, g, or t
  misc_feature (477)..(508): n is a, c, g, or t
  misc_feature (510)..(661): n is a, c, g, or t
  Peptide Sequence Number=SeqID_10793
  Probeset Number=SeqID_21239
acnattgggtaccgggccccccctcgaggtggatctcggtcagggcaccacggcgacggcgacggtctttcacaacgggttcttcaatttgagcgacacgctgagcgtgacgccgcccaccgtggcgggatgcccgccggggacgttcccgagcgactcgctcggaggcgatcgcgagacgcagcccaactcgaatccacgctcgtgcaagccgccattcgatgccggcaagctcggcggcgacggaggcggagccaaccaaggccaacagcaggcgcaggcgttcgcgannnncnnnannngnnnnnnnnnngnnntnnnnnnnntnnnncnnnnnnnnnnnnnnnnntnnnnnnttnnnnnnnnnnnnnnnnnnnnnnnnnngnnnnnnnnnnnnnnnnnnnnnnnnnnnnnnnntngnnnatnnnnnntnnnnntnnntnnnnngnnnntgnnnnnnnnnnnnnnntnnnnntnnnnnnnnnnnnnnnnnnnnnnnnnnnnnnnngnnnnnnnnnnnnnnnnnnnnnnnnnnnnnnnnnnnnnnnnnnnnnnnnnnnnnnnnnnnnnnnnnnnnnnnnnnnnnnnnnnnnnnnnnnnnnnnnnnnnnnnnnnnnnnnnnnnnnnnnnnnnnnnnnnnnnnnnnnnnnnnnnnnnnnnn

SEQ ID NO: 6837 - DNA, 377 bp, Zea mays
  misc_feature (5)..(9): n is a, c, g, or t
  misc_feature (15)..(19): n is a, c, g, or t
  misc_feature (376)..(377): n is a, c, g, or t
  Probeset Number=SeqID_21240
gcatnnnnnagagcnnnnncaggtattccggtggtgaccctggtcaccgatctgccccacagcgagcgcatcggctacgtaggcatggataaccgcaccgccggacaaaccgccgcgtaccttctgtcccgctggctgtcaccccaaccccaggaagtggcggtggtgattggcagtgaattgttccggggcgaggaagaacgtgaaatgggttttcgcatgtggctgcgcggccgtgcgacgcacctgcgggtactggatatcagcggtgggtacggcgtgtatgaccgaacgtttgcccgggtcaccgatgcgttgaagcagcatcccgaactgaaggcggtgtacagcgtcggcggtggcaaccgcgcaattnn

SEQ ID NO: 6838 - DNA, 786 bp, Zea mays
  misc_feature (417)..(417): n is a, c, g, or t
  misc_feature (505)..(505): n is a, c, g, or t
  misc_feature (564)..(564): n is a, c, g, or t
  misc_feature (569)..(569): n is a, c, g, or t
  misc_feature (573)..(573): n is a, c, g, or t
  misc_feature (586)..(587): n is a, c, g, or t
  misc_feature (591)..(591): n is a, c, g, or t
  misc_feature (594)..(595): n is a, c, g, or t
  misc_feature (607)..(607): n is a, c, g, or t
  misc_feature (630)..(630): n is a, c, g, or t
  misc_feature (635)..(635): n is a, c, g, or t
  misc_feature (644)..(644): n is a, c, g, or t
  misc_feature (653)..(653): n is a, c, g, or t
  misc_feature (667)..(667): n is a, c, g, or t
  misc_feature (672)..(672): n is a, c, g, or t
  misc_feature (674)..(674): n is a, c, g, or t
  misc_feature (682)..(786): n is a, c, g, or t
  Peptide Sequence Number=SeqID_10794
  Probeset Number=SeqID_21241
ccaactcattcaccccaagacaagctggcgacggattcacaaacgctcctggtcctgtccacacaccatcaagactgcccttcagcggaggtcccttaccccagccaggcggtctcccaagatcacaaagcggaccgattaatgctccatcacgaaactactctactgcgcagtggaacagtccgagtaacagccagcgacagcctggctcaaactcatcgtttcaattacctccgctgcgaacttcaacgcctccacaaccatcagggcttggcttacgtcccgccatgtcgcgtcagggaagcttcacagctgaggttatgcagatacctgctgaaaggaagctgtccactctgatgaaggtgtgccgcaacttgccaagcagatccggtcgggggcaagtcattgccgtcgaangccccatcgatggacctgcgctgggacagatcaagtcacatcgttgagcaagccttgcaaacttgccgaacactgcgtacgaagctgnctggagataatcagcgttatgcgagaagcgataaaggcatcgattggagcatcaaagcnttcgncacnggtttattccganntatnaanntatgggtgcatnaaagcagcaaatgtccatgtacncgaancaaaatagncggaccttnacaaaggcgtattnctacngnttataggnnnnnnnnnnnnnnnnnnnnnnnnnnnnnnnnnnnnnnnnnnnnnnnnnnnnnnnnnnnnnnnnnnnnnnnnnnnnnnnnnnnnnnnnnnnnnnnnnnnnnnnnn

SEQ ID NO: 6839 - DNA, 427 bp, Zea mays
  misc_feature (2)..(2): n is a, c, g, or t
  misc_feature (75)..(75): n is a, c, g, or t
  misc_feature (262)..(262): n is a, c, g, or t
  misc_feature (360)..(360): n is a, c, g, or t
  misc_feature (413)..(413): n is a, c, g, or t
  Probeset Number=SeqID_21242
anatcaaatcctagtgctcccatctgttccacggtaagtgcagcaaagagggaaaaatagggcgaaacaaaaggnacaatcctcaccggctattgtggcgcagagagtcccatcgaaggtcaggtgtgagccacggcaagaaattggctccgaggaagaattatgcccgcatccctcacctgtttacttaggcgcggtaattgtacatcccagggaactccgtgaagctcacgagccctctcgtacgccgaacgacatcttnggcgagaatccacggcagtgttgatttctgaatcccttctctacttgagccgctactcctttcttctacttgcttgcccagatggcctctgctcaatngatccatgatgcggggtggtgtggttgttttataggaagcaagtccacggcgngggaggaagattcc

SEQ ID NO: 6840 - DNA, 386 bp, Zea mays
  misc_feature (154)..(154): n is a, c, g, or t
  misc_feature (217)..(217): n is a, c, g, or t
  Peptide Sequence Number=SeqID_10795
  Probeset Number=SeqID_21243
catcaggtgcagttttatataaattattatttatgtaggggctcccttggtttacatggttttccagtttagatagcaacgtccatagaaaagatgcttttgttttcagctggcattaatagtaaattgcagagctgagatccttcatgcggcnttgtaaaaagtaaaagagatgaaaatacatgtataattttgtcataactttgaggtggctacnatgtctgtttcatatagtttgctagtgtgtagtagtagcaattaagagcttcacaaaatcgatcgctgtaaagtttttcaaacaccatctccgttttgtgcaatacatgaaccaagatatgtcaaagcttctacatgatgaacatgtcgtttataaatcgattcctgtg

SEQ ID NO: 6841 - DNA, 640 bp, Zea mays
  misc_feature (1)..(1): n is a, c, g, or t
  misc_feature (5)..(5): n is a, c, g, or t
  misc_feature (11)..(14): n is a, c, g, or t
  misc_feature (34)..(34): n is a, c, g, or t
  misc_feature (36)..(36): n is a, c, g, or t
  misc_feature (40)..(40): n is a, c, g, or t
  misc_feature (46)..(47): n is a, c, g, or t
  misc_feature (51)..(51): n is a, c, g, or t
  misc_feature (56)..(56): n is a, c, g, or t
  misc_feature (58)..(59): n is a, c, g, or t
  misc_feature (63)..(63): n is a, c, g, or t
  misc_feature (66)..(66): n is a, c, g, or t
  misc_feature (68)..(68): n is a, c, g, or t
  misc_feature (72)..(72): n is a, c, g, or t
  misc_feature (74)..(75): n is a, c, g, or t
  misc_feature (78)..(78): n is a, c, g, or t
  misc_feature (87)..(87): n is a, c, g, or t
  misc_feature (92)..(92): n is a, c, g, or t
  misc_feature (94)..(94): n is a, c, g, or t
  misc_feature (99)..(99): n is a, c, g, or t
  misc_feature (108)..(108): n is a, c, g, or t
  misc_feature (128)..(128): n is a, c, g, or t
  misc_feature (139)..(140): n is a, c, g, or t
  misc_feature (148)..(148): n is a, c, g, or t
  misc_feature (183)..(183): n is a, c, g, or t
  misc_feature (216)..(216): n is a, c, g, or t
  misc_feature (226)..(226): n is a, c, g, or t
  misc_feature (236)..(236): n is a, c, g, or t
  misc_feature (261)..(261): n is a, c, g, or t
  misc_feature (364)..(364): n is a, c, g, or t
  misc_feature (416)..(416): n is a, c, g, or t
  misc_feature (578)..(578): n is a, c, g, or t
  misc_feature (580)..(583): n is a, c, g, or t
  misc_feature (585)..(585): n is a, c, g, or t
  misc_feature (589)..(592): n is a, c, g, or t
  misc_feature (601)..(640): n is a, c, g, or t
  Probeset Number=SeqID_21244
ngggngggggnnnnggggggggggggttttgggngngggngggggnnggtnggggngnntggnaangntggngnntgncgccggccntaggngnttggngagggttcnggggggggggggcactttcncccgggaggcnntgcgcccntgcgcgtgagagggccagatcttggcagtcttctnccccctataatgttaggagtgggcccccactancccagatcanccccaaaaanccagtggcccgttaactcccaaccnctgcccatggagtaactttggcggcttgggcttggccccaatataggagcaccaatccaaacccccaccccctgctcccatcacatctcacaaccgtttgatncctagggaacacaaaaacagtttcaatataatcagattatttataacaaganctctgtgcagaaaaaaatgtcaaactagacatccattggatcctcttttagaagtgttttttatgctaagaaaaacactaaaattagtccagtgaagcttaaaaaatataatgaattaagtaaggggggggggggggggggggagtgaggggaaaaattttntnnnngnaagnnnngggggggannnnnnnnnnnnnnnnnnnnnnnnnnnnnnnnnnnnnnnn

SEQ ID NO: 6842 - DNA, 697 bp, Zea mays
  misc_feature (1)..(35): n is a, c, g, or t
  misc_feature (41)..(41): n is a, c, g, or t
  misc_feature (46)..(46): n is a, c, g, or t
  misc_feature (51)..(52): n is a, c, g, or t
  misc_feature (55)..(55): n is a, c, g, or t
  misc_feature (58)..(58): n is a, c, g, or t
  misc_feature (60)..(60): n is a, c, g, or t
  misc_feature (62)..(62): n is a, c, g, or t
  misc_feature (66)..(66): n is a, c, g, or t
  misc_feature (86)..(86): n is a, c, g, or t
  misc_feature (176)..(176): n is a, c, g, or t
  misc_feature (609)..(610): n is a, c, g, or t
  misc_feature (636)..(697): n is a, c, g, or t
  Peptide Sequence Number=SeqID_10796
  Probeset Number=SeqID_21245
nnnnnnnnnnnnnnnnnnnnnnnnnnnnnnnnnnncggccnccctntgtgnnaancangncnaagnttaggggttcccccaatgcncaacttggcccgcccggtagaaatttccagggggggggggggctgggaacaaaatccaccccccccgagggaccttggggccaaggaatntccttagcccagccggggccattttccgggaccggtccaggtgattagggccatccccaaaagctaaaggggaccaaagaaggaaatatgaaccttgttcggaattcccttatcgttttatggtttgagaaaccagtttcaaggacccttcccaagaaatggctggaaaatgattgaaacctatgtgtaatgaaattttggggaactatacctaaaaaagaagaccaattaatgacagcagcctttaggcacccggccaaaatgaaggttaaaccaggtaatggacgctttaaaatttgaataccctgattatgagtggctcaacaagggtgttgaaggggcaaaaagaaaaaggattgttagcgttttaagcagacaagctgccaggatggtgaaggaggatgagaaggggggggggggggggggatttaannaactactctccctctctctctctccnnnnnnnnnnnnnnnnnnnnnnnnnnnnnnnnnnnnnnnnnnnnnnnnnnnnnnnnnnnnnn

SEQ ID NO: 6843 - DNA, 564 bp, Zea mays
  misc_feature (3)..(3): n is a, c, g, or t
  misc_feature (21)..(21): n is a, c, g, or t
  misc_feature (30)..(30): n is a, c, g, or t
  misc_feature (57)..(57): n is a, c, g, or t
  misc_feature (64)..(64): n is a, c, g, or t
  misc_feature (77)..(77): n is a, c, g, or t
  misc_feature (79)..(79): n is a, c, g, or t
  misc_feature (88)..(88): n is a, c, g, or t
  misc_feature (90)..(90): n is a, c, g, or t
  misc_feature (93)..(93): n is a, c, g, or t
  misc_feature (100)..(101): n is a, c, g, or t
  misc_feature (104)..(104): n is a, c, g, or t
  misc_feature (113)..(113): n is a, c, g, or t
  misc_feature (124)..(124): n is a, c, g, or t
  misc_feature (129)..(129): n is a, c, g, or t
  misc_feature (152)..(152): n is a, c, g, or t
  misc_feature (158)..(158): n is a, c, g, or t
  misc_feature (166)..(168): n is a, c, g, or t
  misc_feature (188)..(188): n is a, c, g, or t
  misc_feature (194)..(194): n is a, c, g, or t
  misc_feature (199)..(200): n is a, c, g, or t
  misc_feature (209)..(209): n is a, c, g, or t
  misc_feature (220)..(221): n is a, c, g, or t
  misc_feature (223)..(223): n is a, c, g, or t
  misc_feature (227)..(227): n is a, c, g, or t
  misc_feature (235)..(235): n is a, c, g, or t
  misc_feature (237)..(237): n is a, c, g, or t
  misc_feature (240)..(240): n is a, c, g, or t
  misc_feature (248)..(248): n is a, c, g, or t
  misc_feature (251)..(251): n is a, c, g, or t
  misc_feature (261)..(261): n is a, c, g, or t
  misc_feature (263)..(264): n is a, c, g, or t
  misc_feature (271)..(271): n is a, c, g, or t
  misc_feature (280)..(280): n is a, c, g, or t
  misc_feature (309)..(309): n is a, c, g, or t
  misc_feature (312)..(312): n is a, c, g, or t
  misc_feature (322)..(322): n is a, c, g, or t
  misc_feature (327)..(328): n is a, c, g, or t
  misc_feature (331)..(331): n is a, c, g, or t
  misc_feature (335)..(335): n is a, c, g, or t
  misc_feature (342)..(342): n is a, c, g, or t
  misc_feature (419)..(419): n is a, c, g, or t
  misc_feature (455)..(455): n is a, c, g, or t
  misc_feature (481)..(481): n is a, c, g, or t
  misc_feature (490)..(491): n is a, c, g, or t
  Peptide Sequence Number=SeqID_10797
  Probeset Number=SeqID_21246
ccncactacccccctcctccncggacggangatgccaggacgcctgcgaatgaccgngatccgngcgccctgctccngnatgatgatncnganaaccaannccnccactgggnctgctgaagancgctncctcctcaaggcaccactctcancgcctngcttgtgnnnagtgatgattcataccaacncagggnggcanngccctgctnccttgctgcanncnccangatatctntnccnaaaatggncgncaagcatggncnnatcttgnagataaaanaaacaacataaaacttgatttgactgacnttnttatgcccgnggaanntgnaatntctctgntgaggataatcatgagccacaatattctcattgaacattccaaatgattatcatgatcttcagagacgatagctacngagtacatgccttttatatgtgcagccattaagggngcgtgtgtgacctcttttagtgcaancactatgcnncaagcacatgaacttggggaaccctcttggatattatgtactggactacaactcttgtgcacagcctggacag

SEQ ID NO: 6844 - DNA, 633 bp, Zea mays
  misc_feature (607)..(633): n is a, c, g, or t
  Probeset Number=SeqID_21247
aacagaaacccttagaagctccagagaggcgagttccgtgtttgttttctctttgttggctcctcctcctcgtgatctcaggcgaaaatggcgtcgtttgatgaagcaccaccaggaaactcaaaggccggagagaagatcttcaggaccaagtgtgctcagtgtcacaccgttgacaaaggcgcaggtcacaaacaaggtccgaacctaaacgggctgtttggaaggcagtctggaacaacagctggttactcttactctgctgctaacaagaacaaagctgtggaatgggaagagaagaccttgtacgattacttgctcaaccccaagaagtacattcctggaacgaagatggtcttccctgggctcaagaagcctcaagaccgtgctgatctcatcgcctacttgaaggaatctactgcttagttaatcaatcagtggtcatgacttttgagtctctcagatcagatattcttttgacaaataaaatctccaaacttttggtttttgccttttttcctttttaaaggccctcatcttcaaataacggttttgggggagattcgggcttttgagttccaatggtcccccggagccccttttccgnnnnnnnnnnnnnnnnnnnnnnnnnnn

SEQ ID NO: 6845 - DNA, 509 bp, Zea mays
  misc_feature (10)..(10): n is a, c, g, or t
  misc_feature (13)..(13): n is a, c, g, or t
  misc_feature (20)..(20): n is a, c, g, or t
  misc_feature (23)..(23): n is a, c, g, or t
  misc_feature (32)..(32): n is a, c, g, or t
  misc_feature (47)..(47): n is a, c, g, or t
  misc_feature (62)..(62): n is a, c, g, or t
  misc_feature (105)..(105): n is a, c, g, or t
  misc_feature (110)..(110): n is a, c, g, or t
  misc_feature (144)..(144): n is a, c, g, or t
  misc_feature (168)..(168): n is a, c, g, or t
  misc_feature (185)..(185): n is a, c, g, or t
  misc_feature (188)..(188): n is a, c, g, or t
  misc_feature (200)..(200): n is a, c, g, or t
  misc_feature (203)..(203): n is a, c, g, or t
  misc_feature (211)..(211): n is a, c, g, or t
  misc_feature (237)..(237): n is a, c, g, or t
  misc_feature (239)..(239): n is a, c, g, or t
  misc_feature (259)..(259): n is a, c, g, or t
  misc_feature (267)..(267): n is a, c, g, or t
  misc_feature (284)..(284): n is a, c, g, or t
  misc_feature (288)..(288): n is a, c, g, or t
  misc_feature (325)..(325): n is a, c, g, or t
  misc_feature (332)..(332): n is a, c, g, or t
  misc_feature (339)..(339): n is a, c, g, or t
  misc_feature (343)..(343): n is a, c, g, or t
  misc_feature (346)..(346): n is a, c, g, or t
  misc_feature (350)..(350): n is a, c, g, or t
  misc_feature (352)..(352): n is a, c, g, or t
  misc_feature (359)..(359): n is a, c, g, or t
  misc_feature (393)..(393): n is a, c, g, or t
  misc_feature (395)..(395): n is a, c, g, or t
  misc_feature (406)..(406): n is a, c, g, or t
  misc_feature (414)..(414): n is a, c, g, or t
  misc_feature (427)..(427): n is a, c, g, or t
  misc_feature (451)..(451): n is a, c, g, or t
  misc_feature (458)..(458): n is a, c, g, or t
  Peptide Sequence Number=SeqID_10798
  Probeset Number=SeqID_21248
aaaagccagnggngcatgtnagnttgttgtgnaagacctcaaagaanaatttgttagggaanatatataccccctggcctgcgcgcagggggaagtttatgaaanaaagnatctgctttggggacttctatgggctaggcctgntattgctaaagcaatggttgatgnttcccaaggaaattggnggnggatgcagttgnccntggttgcnctggaaaagggaaaagatcagggtcncntttgagcttacattctatgntttaaaanccggaacttaaaggggngggncccttggaggggaggggggatatttcaggacgggganatgcttnttgaatntgcnaanaaananaaagggncctgttccaggtttcaaaaaaatcaatatacagncnaaaaccgaaanttggggcnccttaaccatganggggaaatcctggagggccccccnaatgagnccaagggaaaaatggaaatggtggccattggtcccaaaaaaggccccccca

SEQ ID NO: 6846 - DNA, 489 bp, Zea mays
  misc_feature (71)..(71): n is a, c, g, or t
  misc_feature (77)..(77): n is a, c, g, or t
  misc_feature (89)..(89): n is a, c, g, or t
  misc_feature (133)..(133): n is a, c, g, or t
  misc_feature (136)..(136): n is a, c, g, or t
  misc_feature (154)..(154): n is a, c, g, or t
  misc_feature (168)..(168): n is a, c, g, or t
  misc_feature (178)..(178): n is a, c, g, or t
  misc_feature (182)..(182): n is a, c, g, or t
  misc_feature (192)..(192): n is a, c, g, or t
  misc_feature (200)..(201): n is a, c, g, or t
  misc_feature (205)..(205): n is a, c, g, or t
  misc_feature (211)..(211): n is a, c, g, or t
  misc_feature (213)..(213): n is a, c, g, or t
  misc_feature (220)..(220): n is a, c, g, or t
  misc_feature (230)..(230): n is a, c, g, or t
  misc_feature (232)..(234): n is a, c, g, or t
  misc_feature (237)..(239): n is a, c, g, or t
  misc_feature (241)..(241): n is a, c, g, or t
  misc_feature (244)..(244): n is a, c, g, or t
  misc_feature (246)..(246): n is a, c, g, or t
  misc_feature (253)..(256): n is a, c, g, or t
  misc_feature (259)..(259): n is a, c, g, or t
  misc_feature (262)..(262): n is a, c, g, or t
  misc_feature (265)..(265): n is a, c, g, or t
  misc_feature (272)..(274): n is a, c, g, or t
  misc_feature (276)..(277): n is a, c, g, or t
  misc_feature (288)..(288): n is a, c, g, or t
  misc_feature (293)..(294): n is a, c, g, or t
  misc_feature (296)..(296): n is a, c, g, or t
  misc_feature (299)..(299): n is a, c, g, or t
  misc_feature (303)..(303): n is a, c, g, or t
  misc_feature (306)..(308): n is a, c, g, or t
  misc_feature (318)..(318): n is a, c, g, or t
  misc_feature (323)..(324): n is a, c, g, or t
  misc_feature (326)..(326): n is a, c, g, or t
  misc_feature (328)..(328): n is a, c, g, or t
  misc_feature (330)..(330): n is a, c, g, or t
  misc_feature (344)..(344): n is a, c, g, or t
  misc_feature (352)..(353): n is a, c, g, or t
  misc_feature (357)..(357): n is a, c, g, or t
  misc_feature (359)..(359): n is a, c, g, or t
  misc_feature (370)..(371): n is a, c, g, or t
  misc_feature (375)..(377): n is a, c, g, or t
  misc_feature (383)..(383): n is a, c, g, or t
  misc_feature (385)..(385): n is a, c, g, or t
  misc_feature (387)..(387): n is a, c, g, or t
  misc_feature (401)..(401): n is a, c, g, or t
  misc_feature (403)..(403): n is a, c, g, or t
  misc_feature (419)..(420): n is a, c, g, or t
  misc_feature (422)..(422): n is a, c, g, or t
  misc_feature (427)..(427): n is a, c, g, or t
  misc_feature (430)..(434): n is a, c, g, or t
  misc_feature (436)..(436): n is a, c, g, or t
  misc_feature (439)..(440): n is a, c, g, or t
  misc_feature (445)..(453): n is a, c, g, or t
  misc_feature (455)..(455): n is a, c, g, or t
  misc_feature (458)..(458): n is a, c, g, or t
  misc_feature (460)..(462): n is a, c, g, or t
  misc_feature (465)..(474): n is a, c, g, or t
  misc_feature (476)..(476): n is a, c, g, or t
  misc_feature (478)..(479): n is a, c, g, or t
  misc_feature (482)..(489): n is a, c, g, or t
  Peptide Sequence Number=SeqID_10799
  Probeset Number=SeqID_21249
attttcgactgtcccagacaacactcaccgatagcgaagtaagcgccgccgacgtttcatagagcacgagngatccnagctagtactancgtcgcacctcggctgtcctatctattttcaggcgacgatatgncgncaggtcaggaaagcaggnaggagctggaccgnctgggccgcnaggnttgagaccgncgtccccnncggnaccggngngaagagngttgagggcnannngcnnntngcngnagggggnnnncgngcnggncagactnnngnngagcagctggntgagnncnggnacantgnnntggggaatancggcnnantnantaactagcacgagnccgacggnnagancnccggcaagttnnttannnacctcncntngaccaaggtccccngntggtcctgtcgggggnntntgccnggnnnnncngtnnggggnnnnnnnnngnccntnnnccnnnnnnnnnncncnntgnnnnnnnn

SEQ ID NO: 6847 - DNA, 508 bp, Zea mays
  misc_feature (21)..(21): n is a, c, g, or t
  misc_feature (32)..(32): n is a, c, g, or t
  misc_feature (34)..(34): n is a, c, g, or t
  misc_feature (41)..(41): n is a, c, g, or t
  misc_feature (46)..(46): n is a, c, g, or t
  misc_feature (52)..(52): n is a, c, g, or t
  misc_feature (63)..(63): n is a, c, g, or t
  misc_feature (88)..(88): n is a, c, g, or t
  misc_feature (94)..(94): n is a, c, g, or t
  misc_feature (99)..(99): n is a, c, g, or t
  misc_feature (101)..(101): n is a, c, g, or t
  misc_feature (103)..(103): n is a, c, g, or t
  misc_feature (105)..(105): n is a, c, g, or t
  misc_feature (114)..(114): n is a, c, g, or t
  misc_feature (135)..(135): n is a, c, g, or t
  misc_feature (144)..(146): n is a, c, g, or t
  misc_feature (151)..(151): n is a, c, g, or t
  misc_feature (163)..(164): n is a, c, g, or t
  misc_feature (170)..(170): n is a, c, g, or t
  misc_feature (172)..(172): n is a, c, g, or t
  misc_feature (179)..(179): n is a, c, g, or t
  misc_feature (182)..(182): n is a, c, g, or t
  misc_feature (187)..(187): n is a, c, g, or t
  misc_feature (189)..(189): n is a, c, g, or t
  misc_feature (191)..(191): n is a, c, g, or t
  misc_feature (196)..(197): n is a, c, g, or t
  misc_feature (206)..(206): n is a, c, g, or t
  misc_feature (210)..(210): n is a, c, g, or t
  misc_feature (216)..(216): n is a, c, g, or t
  misc_feature (223)..(223): n is a, c, g, or t
  misc_feature (255)..(255): n is a, c, g, or t
  misc_feature (258)..(258): n is a, c, g, or t
  misc_feature (265)..(265): n is a, c, g, or t
  misc_feature (270)..(273): n is a, c, g, or t
  misc_feature (283)..(283): n is a, c, g, or t
  misc_feature (286)..(286): n is a, c, g, or t
  misc_feature (288)..(288): n is a, c, g, or t
  misc_feature (296)..(296): n is a, c, g, or t
  misc_feature (298)..(299): n is a, c, g, or t
  misc_feature (303)..(304): n is a, c, g, or t
  misc_feature (309)..(309): n is a, c, g, or t
  misc_feature (316)..(316): n is a, c, g, or t
  misc_feature (365)..(365): n is a, c, g, or t
  misc_feature (396)..(396): n is a, c, g, or t
  misc_feature (413)..(413): n is a, c, g, or t
  misc_feature (441)..(441): n is a, c, g, or t
  misc_feature (453)..(453): n is a, c, g, or t
  misc_feature (457)..(457): n is a, c, g, or t
  misc_feature (478)..(478): n is a, c, g, or t
  misc_feature (482)..(482): n is a, c, g, or t
  misc_feature (493)..(493): n is a, c, g, or t
  misc_feature (498)..(498): n is a, c, g, or t
  misc_feature (500)..(501): n is a, c, g, or t
  misc_feature (505)..(505): n is a, c, g, or t
  Probeset Number=SeqID_21250
aggcccatagtatagaatccntggttcccccntngccgagncgcanccccgngcccggagtanttctgttcttttatcgatctgcctngggagnataangncnanatgttgganctgtctgtagcagcgcctaangggtatgannngatgnttgagaatatgnncaaggngnataagantgnacatnancnagagnncactggtgnggancgaaanctcttgncggtcgcatacagagaatgagattgatgctcnccnagattcntggannnntggctcttcnatngnacaaaacnannagtnncgtangaactancagcatgtgaaccttatcctggaataccgtgatgaatatcgaggctgtnactgatgaatatctgtgatgtcatcctgaanctgcttgactcccaccnagtgccttcttctactggtggtgaatcnaaggtcttctanctcnagatgtatggtgactataacnggtntcctgcggaanttaanannggcnctg

SEQ ID NO: 6848 - DNA, 668 bp, Zea mays
  misc_feature (8)..(8): n is a, c, g, or t
  misc_feature (23)..(23): n is a, c, g, or t
  misc_feature (56)..(56): n is a, c, g, or t
  misc_feature (104)..(104): n is a, c, g, or t
  misc_feature (107)..(107): n is a, c, g, or t
  misc_feature (122)..(122): n is a, c, g, or t
  misc_feature (191)..(191): n is a, c, g, or t
  misc_feature (219)..(219): n is a, c, g, or t
  misc_feature (325)..(325): n is a, c, g, or t
  misc_feature (351)..(351): n is a, c, g, or t
  misc_feature (367)..(367): n is a, c, g, or t
  misc_feature (390)..(390): n is a, c, g, or t
  misc_feature (396)..(396): n is a, c, g, or t
  misc_feature (400)..(400): n is a, c, g, or t
  misc_feature (416)..(416): n is a, c, g, or t
  misc_feature (421)..(421): n is a, c, g, or t
  misc_feature (442)..(442): n is a, c, g, or t
  misc_feature (489)..(489): n is a, c, g, or t
  misc_feature (497)..(497): n is a, c, g, or t
  misc_feature (532)..(532): n is a, c, g, or t
  misc_feature (538)..(538): n is a, c, g, or t
  misc_feature (579)..(579): n is a, c, g, or t
  misc_feature (597)..(597): n is a, c, g, or t
  misc_feature (619)..(619): n is a, c, g, or t
  misc_feature (649)..(650): n is a, c, g, or t
  misc_feature (653)..(653): n is a, c, g, or t
  misc_feature (658)..(658): n is a, c, g, or t
  misc_feature (668)..(668): n is a, c, g, or t
  Peptide Sequence Number=SeqID_10800
  Probeset Number=SeqID_21251
gctgggangctccaccggcgggngggcgggcccggcttcctagaaactaagtgggnatcccccccccgggggcctggcagggaaatttccgggccacccagggnagnaggctccacctaagnttcccccccccccccccccctcctttcccttttcacccttcccaaaaatttccggcccggaatggaagncttggaatttggcttaaacggcttggcntttaacattccggggaaacaacccctggggaaaaaaagggtaattcccttttggccggggccaggaatggaaatccaaacctgggggtaaccttaatttggggggnaaaaacggttccttccggcctaaagncaattccaaaaccggntttggaagaaaaacgggtttggnaaattncccnaaacaaggaaacgggngggcntccctttccggtgggaaggcnttttcttccctttcccacctaaacttccccctgggggaaggcttccntttccccnttggggccctcccaagggggggggggggtttaatncccccnccctttttgggaaaaaaaaaaacttcctttttttaaacccnaaaaaaaaaaaagcctcntttgggaaaggggggaaacccnccccccttttttttggggttggaaaaaaannggntttgnaaaaaaaaan

SEQ ID NO: 6849 - DNA, 549 bp, Zea mays
  misc_feature (141)..(141): n is a, c, g, or t
  misc_feature (166)..(166): n is a, c, g, or t
  misc_feature (336)..(336): n is a, c, g, or t
  misc_feature (364)..(364): n is a, c, g, or t
  misc_feature (387)..(387): n is a, c, g, or t
  misc_feature (391)..(391): n is a, c, g, or t
  misc_feature (396)..(396): n is a, c, g, or t
  misc_feature (528)..(528): n is a, c, g, or t
  misc_feature (544)..(544): n is a, c, g, or t
  Probeset Number=SeqID_21252
ccccccccccccccccccccgttagcgctctgttacattgtttgtgtaagtgcgatatcgattagtgattctcgtatgtcacattagttttaaattaattatttgtatgttacgaattctgtgcaacacattatgcattanaaatatagttttgtgtgttaatggngcaaatcttccgaagctcataattttccatttgtatctccgttttccacggttctttttctcacatgaccatagaagcaagctttatgtcacgttgcatgttttaatggcttactcttttggatggtctatttatggaggatacatatcccctaggtcctcataaacacnaaaatgtgtcatggtccgcctgacaggncttctactgggtcgtcctatggnatangccancaaggtgtaccctggctgagcgacgacgaacaccgacgcccggtttaagcgccatgggagcacgaatatatcaggtggagtagttgggcacacccgacaggttaaaccctcagcggtaactcggacggatgnatgaagaggactccgnatatg

SEQ ID NO: 6850 - DNA, 515 bp, Zea mays
  misc_feature (322)..(322): n is a, c, g, or t
  misc_feature (327)..(327): n is a, c, g, or t
  misc_feature (329)..(329): n is a, c, g, or t
  misc_feature (335)..(335): n is a, c, g, or t
  misc_feature (338)..(340): n is a, c, g, or t
  misc_feature (343)..(343): n is a, c, g, or t
  misc_feature (345)..(345): n is a, c, g, or t
  misc_feature (349)..(349): n is a, c, g, or t
  misc_feature (351)..(352): n is a, c, g, or t
  misc_feature (357)..(359): n is a, c, g, or t
  misc_feature (364)..(365): n is a, c, g, or t
  misc_feature (369)..(370): n is a, c, g, or t
  misc_feature (373)..(377): n is a, c, g, or t
  misc_feature (379)..(394): n is a, c, g, or t
  misc_feature (396)..(397): n is a, c, g, or t
  misc_feature (399)..(400): n is a, c, g, or t
  misc_feature (403)..(403): n is a, c, g, or t
  misc_feature (405)..(407): n is a, c, g, or t
  misc_feature (409)..(417): n is a, c, g, or t
  misc_feature (420)..(420): n is a, c, g, or t
  misc_feature (422)..(423): n is a, c, g, or t
  misc_feature (425)..(429): n is a, c, g, or t
  misc_feature (431)..(434): n is a, c, g, or t
  misc_feature (436)..(439): n is a, c, g, or t
  misc_feature (441)..(442): n is a, c, g, or t
  misc_feature (445)..(446): n is a, c, g, or t
  misc_feature (448)..(450): n is a, c, g, or t
  misc_feature (452)..(453): n is a, c, g, or t
  misc_feature (455)..(457): n is a, c, g, or t
  misc_feature (463)..(463): n is a, c, g, or t
  misc_feature (465)..(467): n is a, c, g, or t
  misc_feature (470)..(474): n is a, c, g, or t
  misc_feature (476)..(476): n is a, c, g, or t
  misc_feature (478)..(479): n is a, c, g, or t
  misc_feature (485)..(485): n is a, c, g, or t
  misc_feature (487)..(487): n is a, c, g, or t
  misc_feature (490)..(492): n is a, c, g, or t
  misc_feature (494)..(494): n is a, c, g, or t
  misc_feature (496)..(497): n is a, c, g, or t
  misc_feature (502)..(502): n is a, c, g, or t
  misc_feature (504)..(504): n is a, c, g, or t
  misc_feature (506)..(509): n is a, c, g, or t
  misc_feature (511)..(514): n is a, c, g, or t
  Peptide Sequence Number=SeqID_10801
  Probeset Number=SeqID_21253
gcaccccacttcccacttcccaagcgcgcccacgcgcacgaaaatactcctagtactaattcgagagccagtgagtctagggtcgagtcccggctggggatgacgagccctcgccggcgatggacttgccgctagccctcgcagctctactcctcctcctcctagtgctcctcgctgccccgccggcggcgctcctcattgccctccacctgaaccgccgccgccgcctaacgccgcccgagccggcggccgcggcgctcgagccgagcgcgccggccgaggagaacgagggcgggaaggagaagaggcggcggcgcagggngaggngnaagcancannnaancngggngnngacgnnncctcnncccnncgnnnnncnnnnnnnnnnnnnnnncnncnnccncnnntnnnnnnnnnccncnncnnnnncnnnncnnnncnnccnncnnntnncnnncccccntnnnccnnnnncncnntccccncnttnnncntnnccccncncnnnntnnnnc

SEQ ID NO: 6851 - DNA, 636 bp, Zea mays
  misc_feature (29)..(29): n is a, c, g, or t
  misc_feature (157)..(157): n is a, c, g, or t
  misc_feature (174)..(174): n is a, c, g, or t
  misc_feature (213)..(213): n is a, c, g, or t
  misc_feature (243)..(243): n is a, c, g, or t
  misc_feature (254)..(254): n is a, c, g, or t
  misc_feature (262)..(263): n is a, c, g, or t
  misc_feature (274)..(274): n is a, c, g, or t
  misc_feature (281)..(281): n is a, c, g, or t
  misc_feature (284)..(284): n is a, c, g, or t
  misc_feature (289)..(289): n is a, c, g, or t
  misc_feature (306)..(306): n is a, c, g, or t
  misc_feature (314)..(314): n is a, c, g, or t
  misc_feature (318)..(318): n is a, c, g, or t
  misc_feature (327)..(327): n is a, c, g, or t
  misc_feature (347)..(347): n is a, c, g, or t
  misc_feature (352)..(352): n is a, c, g, or t
  misc_feature (376)..(377): n is a, c, g, or t
  misc_feature (380)..(380): n is a, c, g, or t
  misc_feature (384)..(384): n is a, c, g, or t
  misc_feature (389)..(389): n is a, c, g, or t
  misc_feature (391)..(391): n is a, c, g, or t
  misc_feature (396)..(396): n is a, c, g, or t
  misc_feature (399)..(399): n is a, c, g, or t
  misc_feature (402)..(402): n is a, c, g, or t
  misc_feature (407)..(407): n is a, c, g, or t
  misc_feature (409)..(409): n is a, c, g, or t
  misc_feature (413)..(413): n is a, c, g, or t
  misc_feature (419)..(419): n is a, c, g, or t
  misc_feature (422)..(422): n is a, c, g, or t
  misc_feature (428)..(428): n is a, c, g, or t
  misc_feature (440)..(440): n is a, c, g, or t
  misc_feature (445)..(445): n is a, c, g, or t
  misc_feature (448)..(449): n is a, c, g, or t
  misc_feature (451)..(451): n is a, c, g, or t
  misc_feature (453)..(453): n is a, c, g, or t
  misc_feature (463)..(463): n is a, c, g, or t
  misc_feature (468)..(468): n is a, c, g, or t
  misc_feature (472)..(473): n is a, c, g, or t
  misc_feature (478)..(478): n is a, c, g, or t
  misc_feature (481)..(481): n is a, c, g, or t
  misc_feature (484)..(485): n is a, c, g, or t
  misc_feature (489)..(490): n is a, c, g, or t
  misc_feature (498)..(499): n is a, c, g, or t
  misc_feature (503)..(503): n is a, c, g, or t
  misc_feature (506)..(506): n is a, c, g, or t
  misc_feature (509)..(510): n is a, c, g, or t
  misc_feature (512)..(512): n is a, c, g, or t
  misc_feature (516)..(516): n is a, c, g, or t
  misc_feature (523)..(523): n is a, c, g, or t
  misc_feature (525)..(525): n is a, c, g, or t
  misc_feature (532)..(532): n is a, c, g, or t
  misc_feature (535)..(535): n is a, c, g, or t
  misc_feature (539)..(540): n is a, c, g, or t
  misc_feature (543)..(543): n is a, c, g, or t
  misc_feature (547)..(550): n is a, c, g, or t
  misc_feature (552)..(552): n is a, c, g, or t
  misc_feature (569)..(569): n is a, c, g, or t
  misc_feature (571)..(571): n is a, c, g, or t
  misc_feature (573)..(573): n is a, c, g, or t
  misc_feature (576)..(576): n is a, c, g, or t
  misc_feature (578)..(578): n is a, c, g, or t
  misc_feature (581)..(581): n is a, c, g, or t
  misc_feature (585)..(586): n is a, c, g, or t
  misc_feature (588)..(588): n is a, c, g, or t
  misc_feature (591)..(594): n is a, c, g, or t
  misc_feature (597)..(598): n is a, c, g, or t
  misc_feature (600)..(636): n is a, c, g, or t
  Probeset Number=SeqID_21254
gcattcacctgatctagctcgacgccggncagtaaacccaagcagccactcactctcaggttatcactgacacagcaaccaagctcgggacaagggggaaatggaagcccgctccggtctcggcgaagcccaccctccgcgtggtcgctctcagcgnctccctccgcagcaaantcgtggtaaccacggcctcatccgcgccgccgaggagcntgtgcaaggagtgcatcccccggggcttgngcattcgatcncggggaanntctccgggccntgcccantgnccaancccggaaccttggaaanaaccgtancggnggttgaacnggctttccccgccgggatcnggggnatggtctttccgccggaaaagggnncangccncccgncnaaacntgnttntcttntnccgntctccnacntcgaangaaaacaatatnattcnccnntncntcgggctttnctttnaaannaactnctntcnngaanncttgggcnnttcnccnaanntntttntgccctncncaaccgnctntttnnatncaannnngntccccgctttcttcacngnanttncntcncccnnantcnnnnctnncnnnnnnnnnnnnnnnnnnnnnnnnnnnnnnnnnnnnn

SEQ ID NO: 6852 - DNA, 488 bp, Zea mays
  Peptide Sequence Number=SeqID_10802
  Probeset Number=SeqID_21255
aaacatatcacgccgtcaagcgcacgtacgtgaagcaggcgtgaaggcaagtgaaggcggtggcggcgacgcgagatttcccctccggcatcgatctcttccggcggccaccttctccccggtattcttattcctcctgtctcttctatcgcaactaggatctcctccggcatcgatctcctcaagcatttagggttcttgtttcttgcgtcgatgtcgtcgcggagttctatcaccaccgggagcaactccatgacttcaatcggtcgtgacctgaccctcaactaactcctccggctatctcggtccgactacggctcggtggcctccctcagccgggacttccgctccatggtccgcaacggggagatctactgcctgcgacccatatcgggagcgctagatccaagtgcccaagatgccgcctgatgaatgcttcaagtgctctcacaaggaattcgcttgcggtgggcactgagctgcttgtg

SEQ ID NO: 6853 - DNA, 518 bp, Zea mays
  misc_feature (3)..(4): n is a, c, g, or t
  misc_feature (16)..(16): n is a, c, g, or t
  misc_feature (29)..(31): n is a, c, g, or t
  misc_feature (34)..(35): n is a, c, g, or t
  misc_feature (37)..(37): n is a, c, g, or t
  misc_feature (40)..(40): n is a, c, g, or t
  misc_feature (50)..(51): n is a, c, g, or t
  misc_feature (53)..(53): n is a, c, g, or t
  misc_feature (56)..(56): n is a, c, g, or t
  misc_feature (58)..(58): n is a, c, g, or t
  misc_feature (61)..(62): n is a, c, g, or t
  misc_feature (68)..(68): n is a, c, g, or t
  misc_feature (73)..(73): n is a, c, g, or t
  misc_feature (84)..(85): n is a, c, g, or t
  misc_feature (88)..(89): n is a, c, g, or t
  misc_feature (95)..(95): n is a, c, g, or t
  misc_feature (102)..(102): n is a, c, g, or t
  misc_feature (132)..(132): n is a, c, g, or t
  misc_feature (135)..(135): n is a, c, g, or t
  misc_feature (148)..(148): n is a, c, g, or t
  misc_feature (159)..(159): n is a, c, g, or t
  misc_feature (167)..(167): n is a, c, g, or t
  misc_feature (198)..(198): n is a, c, g, or t
  misc_feature (200)..(200): n is a, c, g, or t
  misc_feature (217)..(217): n is a, c, g, or t
  misc_feature (228)..(228): n is a, c, g, or t
  misc_feature (231)..(231): n is a, c, g, or t
  misc_feature (239)..(240): n is a, c, g, or t
  misc_feature (245)..(245): n is a, c, g, or t
  misc_feature (255)..(255): n is a, c, g, or t
  misc_feature (265)..(265): n is a, c, g, or t
  misc_feature (274)..(275): n is a, c, g, or t
  misc_feature (299)..(299): n is a, c, g, or t
  misc_feature (357)..(357): n is a, c, g, or t
  misc_feature (367)..(367): n is a, c, g, or t
  misc_feature (369)..(369): n is a, c, g, or t
  misc_feature (379)..(380): n is a, c, g, or t
  misc_feature (383)..(383): n is a, c, g, or t
  misc_feature (385)..(385): n is a, c, g, or t
  misc_feature (390)..(392): n is a, c, g, or t
  misc_feature (394)..(394): n is a, c, g, or t
  misc_feature (404)..(404): n is a, c, g, or t
  misc_feature (461)..(462): n is a, c, g, or t
  misc_feature (475)..(475): n is a, c, g, or t
  misc_feature (478)..(478): n is a, c, g, or t
  misc_feature (484)..(484): n is a, c, g, or t
  misc_feature (493)..(493): n is a, c, g, or t
  misc_feature (497)..(498): n is a, c, g, or t
  misc_feature (501)..(501): n is a, c, g, or t
  misc_feature (504)..(504): n is a, c, g, or t
  Peptide Sequence Number=SeqID_10803
  Probeset Number=SeqID_21256
gtnnccctttccgccncgcctatccactnnnccnnanatntctctctctnnantgncnacnncttcgnctctnatcaagagcgnngcnnacggcntggacgncatcctgatccgccctctcccgttcgcaantgntcggcgcacgtcntgagaggcggnggccgtgnagaacgaagctgctgcagatcacggccgaangnggagtgctatcgcgccnacaaccttccnggngatgtggnngccgntgatcatcgngatggaccgngagcagcanntcaactacctctagctgcagcagnagacgctttctggtcggggagaactccgccgccgccgtttgaccatgtagatagatcngtgcatcgancntttcgacccnnctntncatcnnnanaggtatctgntactgtcaagttcatgattcgagttactatgatgttcatcattcgagtggagctgannctgagttatcgangcnacctgntgacatgcngccnngantcnaagaaggtcgaaat

SEQ ID NO: 6854 - DNA, 500 bp, Zea mays
  misc_feature (158)..(159): n is a, c, g, or t
  misc_feature (161)..(161): n is a, c, g, or t
  misc_feature (451)..(451): n is a, c, g, or t
  misc_feature (457)..(458): n is a, c, g, or t
  Probeset Number=SeqID_21257
tccgcgtaatttcccaggaaaaatcaaattttcgtggaatcagcttcatcctttcttttatacttattatcctctcgctgctgtgtgcatttgcttcatctcaatcgttgaaaatgtcgaaagaaggagaaccggtgatcggagtaccgtattacgcnngncagaacccgtaccaggcggggatcgtgccgccgaacgctatctatggagatccgatgggagctccgatccagcaaacgttttatcgggatactcctgctcctttcaattgcctctattgcggcaatactggtctcacccatatcagatcaaaaccgggtgtagctgctgttgtggcttgcatgactccgtttatgcttggattctgttttctctgcccttcgatggattgcctttggaacaaacagcatcattgccctcagtgtgggaataaggttgctgattttgaganatcagnnccctgcctggtgatggatcctccgcagtggacgcatcgagct

SEQ ID NO: 6855 - DNA, 623 bp, Zea mays
  misc_feature (498)..(506): n is a, c, g, or t
  misc_feature (510)..(623): n is a, c, g, or t
  Peptide Sequence Number=SeqID_10804
  Probeset Number=SeqID_21258
atactgattactaaaagcagaacaaccacaaaggtgtttcaaaaaaaagaacaaccacaaagacagagaatcaaagaagaagtaacatggtaaaggtgatgtggggttccagtttagctctcgccgtagcgcttctcctggtgacggtggcaaacattccggtggcggagggagtgacatgctcgccgacggaactgacttcatgttcgccggcgtttatgtcagcttcgccgccgtcagcaacgtgctgcgccaagctgagagagcagaagccatgcctttgtggatatctgaggaaccctaccctcagccagtacgttaactctccaaacgccaagaaagttgccagcagttgcaatgttgcaaccccgaaatgttaatcatgattaattagtgacaagtttcgctgatcatgagtgcttaattactagttaaaatgggtctggtcttcgacactactgtttagaataatagtgtggtggtgattatgatgcatcnnnnnnnnntgannnnnnnnnnnnnnnnnnnnnnnnnnnnnnnnnnnnnnnnnnnnnnnnnnnnnnnnnnnnnnnnnnnnnnnnnnnnnnnnnnnnnnnnnnnnnnnnnnnnnnnnnnnnnnnnnn

SEQ ID NO: 6856 - DNA, 716 bp, Zea mays
  misc_feature (601)..(716): n is a, c, g, or t
  Peptide Sequence Number=SeqID_10805
  Probeset Number=SeqID_21259
acaaatcgataaacaaatttctcaactcttatctctctcgcgaactacggttcaagatgcagatcttcgtgaagactctcaccggaaagaccatcacccttgaggtggaaagctcggacaccatcgacaacgtcaaggccaagatccaggacaaggagggaatcccaccggatcagcaaaggcttatcttcgccgggaagcaactcgaggatggacggactctcgctgattacaacatccagaagggagtcgacccttcatctcgtcctcacggctcccgcggtggatttgccagtccttccgttatgaactcttcaccggaaaaactaatttcacttctaggttggaaaagcatctcctcaccactcgaaacaagtggcacccccacctcaccccacggacctggggggtgtaattcccttccccgaactaacggatcggcgttggattactccgatcgcctcaacaaactactcgaggatacggttcctctactcttgtggctgtgacatacaaatcttttcgatacaactgaaaaagcacccgcatcaaaattatgcgctcgagtaccacgtaacccgttgcgctctcatcctctcannnnnnnnnnnnnnnnnnnnnnnnnnnnnnnnnnnnnnnnnnnnnnnnnnnnnnnnnnnnnnnnnnnnnnnnnnnnnnnnnnnnnnnnnnnnnnnnnnnnnnnnnnnnnnnnnnnn

SEQ ID NO: 6857 - DNA, 574 bp, Zea mays
  misc_feature (278)..(278): n is a, c, g, or t
  misc_feature (543)..(543): n is a, c, g, or t
  Peptide Sequence Number=SeqID_10806
  Probeset Number=SeqID_21260
agataagtgtttcccagagagaagagagagagagagagacaagtctcaatggcgtctgtagcttcttcaaccactctcatctcctcctccgctagtgttctcccagccaccaagtcttcgcttcttccatctccctccctctctttccttccaaccctctcctctccttccccatccgcttctctccggctcgctcgtccctctcccctcacctcaatccgctcctcttctcgccggagcttcgctgtcaaggcccaaaccgatgatcttccattggnttggaaacagggcgcctgattttgaggcagaggctgtggtcgatcaggggtgtcatcagggtcaagctctctgagtacattgggaagaagtatgtgattctcttttttctacccctgggactccactttcgtctgcccaacagagattaactgccttcagggggccgggatgtgcagaatttgggaagctgaacaccccaagaggtgttagggggctccttgtgatgataggggggtctcccaccttgcttgggttcaaacgacngaaatctggaggacttggtgatctcaactat

SEQ ID NO: 6858 - DNA, 585 bp, Zea mays
  Peptide Sequence Number=SeqID_10807
  Probeset Number=SeqID_21261
ggaacgtggagctcacatactaaacaagatccgatctaaccccggttctcgtcggaatctcttcacggttaaccggcgttcctcatccaccttttcgttatggaagacggcaagggaaaggagcttgttggtgatactcctccttcagttgaacaaaatgataacaagaaggtttcaggtgaaacggagattcataaggagccatcacgtgagagtgaggaaaatgcgatcaagaagaagtatggaggattgttgccaaagaagattcctttgatatccaaggaccatgagcgcgcgttttttgactcagctgattgggcattaggcaagcaaaaaggacagaagccaaaagggcctttggaagctctccgaccaaaactgcagccaaccccgcaccagcaaccaagagcgagacggatggctttatcttcaggcgacaacactgaagacgctgaggctgacaccaacgaacctatcgatgaccaacaagctagcgcatcagctgttgacaatgccaaggatgatggaggcatcgatgatgctgacgccaaagacaacatcaagtcatgaacaaacatatataaa

SEQ ID NO: 6859 - DNA, 665 bp, Zea mays
  misc_feature (665)..(665): n is a, c, g, or t
  Peptide Sequence Number=SeqID_10808
  Probeset Number=SeqID_21262
ataactctccgccgctgagaaatgaactagggtttcagctgcttcacctctccagatcttgcgtcggaaaggatcgttcagagcaatgtctccggctaaagttgataccacgaagaaggccgacccaaaggccaaggccctgaaggctgcaaaggcagtgaagtctggtcaagccttcaagaagaaggacaaaaagatcaggactaaggtcaccttccacaggccaaagaccttgaccaaggctagagatcccaagtaccccaggatcagtgcaactcccaggaacaagttggaccattacggtatcctcaagtacccactcaccaccgagtctgccatgaagaaaattgaggacaacaacactcttgtcttcattgttgacattcgtgccgacaagaagaagatcaaagatgctgttaagaagatgtacgacatccagaccaagaaggttaacaccctcatcaggcctgatggaacgaagaaggcttacgttaggctcacaccggactatgatgcgttagatgttgctaacaagattggcatcatctaagtttatctacctcctgctattatatgaaaggggcttgggggtttggcccctcgagtagccaaaacggggttttaacacacattcgggggggctatagggggaaccggctctagtn

SEQ ID NO: 6860 - DNA, 648 bp, Zea mays
  misc_feature (600)..(603): n is a, c, g, or t
  misc_feature (628)..(648): n is a, c, g, or t
  Peptide Sequence Number=SeqID_10809
  Probeset Number=SeqID_21263
atcaatcacatcctctcactaagcaaaaaagagcaaaccttttcgaatctcaaatggctcgtaccaagcaaaccgcgagaaaatccaccggaggcaaagccccgaggaagcagctcgcaaccaaggcggcgaggaagtcggctccggccaccggaggagtgaagaagccgcacaggttccgtcccggaaccgtggcgctgagggagatcaggaagtaccagaagagcaccgagcttctgatccgcaagctccccttccagcgtcttgtccgcgagatcgctcaggacttcaaaaccgatctgaggttccagagcagcgccgtcgcggctctgcaagaggcggcggaggcgtaccttgtgggtttgttcgaggatacgaatctttgcgcgattcacgctaagagggtaacgatcatgcccaaggatattcagctcgcgaggaggatccgcggtgaaagagcttgaagactcttcgttgatgggcaaatctgtttctggggaattttagtttgtcttttagtttatgtgttcctttgttgaaagcttgggcctccgggttttgttttttttattgggggtaagagagctcccccgcggtaannnngggaaagtggttcgtccgaatgtcnnnnnnnnnnnnnnnnnnnnn

SEQ ID NO: 6861 - DNA, 651 bp, Zea mays
  misc_feature (12)..(12): n is a, c, g, or t
  misc_feature (44)..(44): n is a, c, g, or t
  misc_feature (97)..(97): n is a, c, g, or t
  misc_feature (105)..(105): n is a, c, g, or t
  misc_feature (132)..(132): n is a, c, g, or t
  misc_feature (135)..(135): n is a, c, g, or t
  misc_feature (143)..(143): n is a, c, g, or t
  misc_feature (145)..(147): n is a, c, g, or t
  misc_feature (149)..(150): n is a, c, g, or t
  misc_feature (153)..(153): n is a, c, g, or t
  misc_feature (156)..(156): n is a, c, g, or t
  misc_feature (159)..(160): n is a, c, g, or t
  misc_feature (163)..(163): n is a, c, g, or t
  misc_feature (167)..(167): n is a, c, g, or t
  misc_feature (175)..(176): n is a, c, g, or t
  misc_feature (178)..(179): n is a, c, g, or t
  misc_feature (181)..(183): n is a, c, g, or t
  misc_feature (185)..(185): n is a, c, g, or t
  misc_feature (187)..(187): n is a, c, g, or t
  misc_feature (189)..(190): n is a, c, g, or t
  misc_feature (192)..(192): n is a, c, g, or t
  misc_feature (194)..(194): n is a, c, g, or t
  misc_feature (201)..(201): n is a, c, g, or t
  misc_feature (211)..(211): n is a, c, g, or t
  misc_feature (217)..(217): n is a, c, g, or t
  misc_feature (226)..(226): n is a, c, g, or t
  misc_feature (231)..(231): n is a, c, g, or t
  misc_feature (233)..(233): n is a, c, g, or t
  misc_feature (268)..(270): n is a, c, g, or t
  misc_feature (294)..(294): n is a, c, g, or t
  misc_feature (297)..(297): n is a, c, g, or t
  misc_feature (309)..(309): n is a, c, g, or t
  misc_feature (311)..(312): n is a, c, g, or t
  misc_feature (317)..(317): n is a, c, g, or t
  misc_feature (319)..(319): n is a, c, g, or t
  misc_feature (322)..(323): n is a, c, g, or t
  misc_feature (335)..(335): n is a, c, g, or t
  misc_feature (337)..(337): n is a, c, g, or t
  misc_feature (350)..(351): n is a, c, g, or t
  misc_feature (389)..(389): n is a, c, g, or t
  misc_feature (401)..(401): n is a, c, g, or t
  misc_feature (419)..(420): n is a, c, g, or t
  misc_feature (425)..(426): n is a, c, g, or t
  misc_feature (428)..(428): n is a, c, g, or t
  misc_feature (439)..(439): n is a, c, g, or t
  misc_feature (443)..(443): n is a, c, g, or t
  misc_feature (454)..(454): n is a, c, g, or t
  misc_feature (456)..(456): n is a, c, g, or t
  misc_feature (460)..(460): n is a, c, g, or t
  misc_feature (462)..(462): n is a, c, g, or t
  misc_feature (464)..(464): n is a, c, g, or t
  misc_feature (480)..(480): n is a, c, g, or t
  misc_feature (490)..(491): n is a, c, g, or t
  misc_feature (499)..(499): n is a, c, g, or t
  misc_feature (504)..(505): n is a, c, g, or t
  misc_feature (522)..(522): n is a, c, g, or t
  misc_feature (526)..(526): n is a, c, g, or t
  misc_feature (568)..(570): n is a, c, g, or t
  misc_feature (572)..(572): n is a, c, g, or t
  misc_feature (574)..(574): n is a, c, g, or t
  misc_feature (576)..(576): n is a, c, g, or t
  misc_feature (581)..(581): n is a, c, g, or t
  misc_feature (583)..(585): n is a, c, g, or t
  misc_feature (589)..(592): n is a, c, g, or t
  misc_feature (594)..(594): n is a, c, g, or t
  misc_feature (596)..(598): n is a, c, g, or t
  misc_feature (600)..(600): n is a, c, g, or t
  misc_feature (609)..(614): n is a, c, g, or t
  misc_feature (619)..(621): n is a, c, g, or t
  misc_feature (623)..(636): n is a, c, g, or t
  misc_feature (640)..(647): n is a, c, g, or t
  Peptide Sequence Number=SeqID_10810
  Probeset Number=SeqID_21264
gtcttcatcggnccctcgtcagttcttctccggcccttcgccgncgacaagctccgccaggttgctgtgttaagtccaagcttatcacatggattcnacactatnttttttttccaggacattttctataanggngcgggcancnnntnnttncanccnngcncctncttgttgnnannannncnananncncngcccccntgaatttttnccggtncgacccccncgtcncnccacgcgtccgggctgatccggatttccgccagcnnncgcctgcggatgggagttctgccntcnccccctatttancnnaacgncnccnncggatgttgttncntctgaaaaaaggnnttagcccttcggcccccctgcccttacctgtccctgtntccccttttgtncgtgctgatacttgttcnnatttnncnagggccgcgcnccgnctgatcggatncntccngncngacgccctgctgaccntccttagcanncggcgccnttatnntccaacaatttgctggntgcnccggcgctatgatattgtcgttcctaccctggctctcccctnnncncncntcatntnnnatcnnnncncnnncnttgatatcnnnnnntttgnnncnnnnnnnnnnnnnnatgnnnnnnnngatg

SEQ ID NO: 6862 - DNA, 562 bp, Zea mays
  misc_feature (501)..(501): n is a, c, g, or t
  Probeset Number=SeqID_21265
aactttaggtcccaaaacggtgtcgtttcttcgtaaagttactctccagatctttctcccggatcctcttgagaccctcttctccggagaaaaagaactcttgtcttttcaatccaatgaaaccgttcttctacttctgtcacctgtttgaatccgttataacaagggtatcttgaacttgtaagtaatggacaacttaagtagattgcctgatgaactgttggtgaggatactatcgttagttccaacaaaggttgttgtatccactagcatcctctctaagcgatggaagtttctttggatgtctttgcctaaacttgagttcgttgatagagacgagtctctccttgtacttaagaactttgtcaacaagaatctgccattacacagagctccggtcattcaaagcttccttctttccttgtacgagtcaagagagaaaaacattaaacctgaggacatcagacaatgggttgagattgctgtatcccgccatctacngtgagctggacgtttcttattcttctgataataaagaaaacatggttcccaacagcttgtt

SEQ ID NO: 6863 - DNA, 562 bp, Zea mays
  misc_feature (62)..(62): n is a, c, g, or t
  Peptide Sequence Number=SeqID_10811
  Probeset Number=SeqID_21266
aacaagctgttgggaaccatgttttctttattatcagaagaataagaaacgtccagctcacngtagatggcgggatacagcaatctcaacccattgtctgatgtcctcaggtttaatgtttttctctcttgactcgtacaaggaaagaaggaagctttgaatgaccggagctctgtgtaatggcagattcttgttgacaaagttcttaagtacaaggagagactcgtctctatcaacgaactcaagtttaggcaaagacatccaaagaaacttccatcgcttagagaggatgctagtggatacaacaacctttgttggaactaacgatagtatcctcaccaacagttcatcaggcaatctacttaagttgtccattacttacaagttcaagatacccttgttataacggattcaaacaggtgacagaagtagaagaacggtttcattggattgaaaagacaagagttctttttctccggagaagagggtctcaagaggatccgggagaaagatctggagagtaactttacgaagaaacgacaccgttttgggacctaaagtt

SEQ ID NO: 6864 - DNA, 790 bp, Zea mays
  misc_feature (787)..(787): n is a, c, g, or t
  misc_feature (790)..(790): n is a, c, g, or t
  Peptide Sequence Number=SeqID_10812
  Probeset Number=SeqID_21267
aaaacttttctccaccatctctctaacctagtttcagcttcagccagcctcctcctccctgctccggcggcggtggtccttctaggtcgtcgtcggaggctcgtgtcttctctttctgttttgcttcatcagcttttcccttctcccttcggtcttgccaaagccctggatctgtcccctccgcctcagacttctcatctatccgtgatagatccggtggtttggttctcgcggtagtcgatctggtgtgacggcgacgattggtgcaagggactgtcggtggagtcggctacgtgggtggttggtgccgtatgtatctttgctggagctcctgcagtagatctgttggtaccgaggcggtgttctagaggttagcgctaggaccagcgtcgatcctctctcccgctttcaggtcgcaggattttctctcagctttttcctggatctagggttccgaccatgagagcgacggcgcgtggagtttagatgagatttctaccctgcggttcttcattgtcacgcttccttggtggctcgagtgaggtttgtgtctcatggctgggtttttatgtctgggttttttggatccgtccagagcctctctacttttgggagatcctgttactggttctcagttatggggggtgggtgtgaggtgttctttcctttcgggggttgtcgtccaaagcttggaggttcctgtgacagtacgtaacgagtcacgagacagcatccgcggcctcaatggggggtctctgtcttccagagtcgagctcttaactgtggncan

SEQ ID NO: 6865 - DNA, 580 bp, Zea mays
  Probeset Number=SeqID_21268
aaaagtgtcttctacctcctgagatcacgaaagagcaacaccgccggagatggccgctactcccaccgccgccgctgcttcgtccatcatgggtactcgggtggttcccgatatccgctccggttcgggtagaatcacagctcgttttgggttcgggaagaagaaggcagctcccaaaaagaccaagactaccgtgactacggacaggcctctgtggtacccaggcgccaaatctcctgagtggcttgacggttctttggtcggagattacggctttgatcctttcggtttaggtaaaccggccgaatatctccagttcgatatagattcgctagaccagaatctggctaagaacttagccggagacgtgatcggaacccgcacggaagaggccgcccccaaatcgactccgtttcagccgtacagtgaggtgttcggaatccagaggttcagagaatgcgagctgattcacggtcggtgggccatgctcgccactctcggcgctctctccgtcgaatggctcaccggcgtcacttggcaagacgccggaaaggtaatgctttttctcgaaaattacgat

SEQ ID NO: 6866 - DNA, 698 bp, Zea mays
  misc_feature (1)..(1): n is a, c, g, or t
  misc_feature (698)..(698): n is a, c, g, or t
  Peptide Sequence Number=SeqID_10813
  Probeset Number=SeqID_21269
natgtattctatcttctctcctcttcttccttctaactctcctcctcaagaaatattcttgaaaccaaaccgcctcccaaaaaacaatgggcgtagctgttctaaatccacaggactgtctcaaacaacctttctcccacatgaagtatcctcgtaaccacaccgcatgccccaacaggcatcagaagaagccggttccaaaccgcacgcgccggagccctccgcgcaatcagacaaccagatctcctcctaaagcgccgcctccgcctcctcaacgcgccgccgtctcttcttacgtcccgaagggaacggttgagaagagtcccaccaaaaacgtcgtcgttggtcaggttaggatcctgaagcgcggcgaggagatccctaagaagacattagaattggtcgtggaaaagacaaatctggtcgtggagaagacagatctggtcgtggagaagccagatctggtttctactcagcggatcggaccagatccgtgtctgattccgagccagatccgtctctccgaccgtaaatcgaagaagaccaccgtagttccgttttacgccggtcctgtgaccatgacctcgccgcctccgagcgacgtccctcttccagccttcttcaccacggaagaaggacgctacaaaccatatcatcaagctgctccgcctagacgtcgcatggatggctctccatgn

SEQ ID NO: 6867 - DNA, 655 bp, Zea mays
  misc_feature (530)..(530): n is a, c, g, or t
  misc_feature (548)..(548): n is a, c, g, or t
  misc_feature (617)..(617): n is a, c, g, or t
  misc_feature (653)..(655): n is a, c, g, or t
  Peptide Sequence Number=SeqID_10814
  Probeset Number=SeqID_21270
atctcgatctttctcttccaacctagccgctattacctctcagatttttacttagccatgggtaaagagaagtttcacatcaacattgtggtcatcggccacgtcgactccgggaagtcaaccaccacggggcacttgatctacaagctcggcggtatcgacaagcgtgtgatcgagaggttcgagaaggaggctgctgagatgaacaagaggtctttcaagtacgcgtgggtgttggacaagcttaaggctgagcgtgagcgtggtatcaccattgatattgctctttggaagtttgagaccaccaagtactactgcacggttattgacgctcctgggcatcgtgatttcattaagaacatgatcactggtacctcccaggctgattgtgctgttttgattattgatcccactactggtgggttcgaggctggtatctctaaggatgggcagactcgtgagcatgctcttcttgctttcacacttggtgtcaagcagatgatttgctgctgtaaccagatggatgctanctacccccaagtactccnagggcgaggtacgatgagataattcaggggagtgtcttcctactttgaagaaaggttgggtacaacccntgacaaaatccccttcgtccccctcctcctgcgtgnnn

SEQ ID NO: 6868 - DNA, 652 bp, Zea mays
  misc_feature (625)..(625): n is a, c, g, or t
  misc_feature (629)..(652): n is a, c, g, or t
  Peptide Sequence Number=SeqID_10815
  Probeset Number=SeqID_21271
aaccacaaagacaattctctcgtcgctcattgagtttcgctttgccatcgcttcctctcgaggtcaaaatggttgaacaaactcagaacaagctcatgcgtaccggtgttgtttctcatgacattcacggttacacttcctctttccagaggcgtgcaacgtacggaaactacaccaatgctgcgttccagtaccctctcgccgccacttcgcggattgtggctactactaccactacctctcccgtgtttgttcaagctccaagtgagaaaggattctctagctttgctattgatttcctcatgggtggtgtttccgctgctgtgtctaagaccgctgctgctcctattgagcgtgtcaagcttttgattcagaaccaggatgagatgcttaaggctggcaggctctctgagccttacaagggtattggtgactgtttcggcaggaccattaaggatgaggggtttggttctttgtggaggggaaacactgctaatgttatccgttacttccccactcaggcgttgaactttgcgttcaaagattacttcaagaggcttttcaacttcaagaaggacagggatggccactgggaggtggttgccgggtacctgggacctctgcnaggnnnnnnnnnnnnnnnnnnnnnnnn

SEQ ID NO: 6869 - DNA, 642 bp, Zea mays
  misc_feature (642)..(642): n is a, c, g, or t
  Peptide Sequence Number=SeqID_10816
  Probeset Number=SeqID_21272
cacaaatcgaaaagcaatcttctcagttttcatcgctagcgaatttactttacgatcaagatgcagatcttcgttaagactctcaccggaaagaccatcaccctcgaggtggagagctcggacaccatcgacaacgtcaaagccaagatccaggataaggaaggcatcccccccgatcagcagaggttgatcttcgccggaaagcagttggaggatggacgtactctcgctgactacaacatccagaaggagtctactctccacttggtgttgcgtctacgtggaggcatgcagatctttgtcaagacactgacgggaaagacgatcactctagaggtcgagagttccgacactattgacaatgtgaaaaccaagatccaagacaaggaagggatccctccggaccagcagcgtctcatctttgccggcaagcagcttgaggatggtcgcacccttgccgactacaacatccagaaggagtctactctccacttagtgttgcgtctgcgtggaggtatgcagatctttgtcaagaccttaaccggaaagacatcacactggaggtggagagttcggacaccattgataacgtcaaggccaagatccaagaccagggaaggatccctccggaccagcagcgcn

SEQ ID NO: 6870 - DNA, 785 bp, Zea mays
  misc_feature (785)..(785): n is a, c, g, or t
  Peptide Sequence Number=SeqID_10817
  Probeset Number=SeqID_21273
atataatataagctctcgttacagtcacccttcaattctcgagagcttagttcccgttagaaagcatctgaaaatggagatcacaaacgtaaccgagtatgaagcgattgcaaaggagaaattgcctaagatggtatacgactactatgcctctggtgcagaagaccaatggactcttcaagagaacagaaacgctttcgcaagaatcctcttccggcctcggattctgattgatgtgagcaagattgatatgacaacaaccgtcttgggtttcaagatctccatgcccatcatggttgctcctactgccatgcagaagatggctcaccctgaaggggaatatgctacggctagagctgcctctgctgctggaaccatcatgacactatcgtcatgggctacttccagtgttgaggaagttgcttccacagggccagggatccgttttttccagctctatgtatacaagaacaggaatgtcgttgagcagctggtgagaagagccgagagggctgggttcaaagccattgctctcactgtagacaccccaaggctaggtcgcagagagtctgatatcaagaacagattcactttgcctccaaccttgacattgaagaactttgaaggtcttgaccttggaaagatggacgaggccaatgactctggcttggcttcatatgttgctggtcagattgaccgtaccttaagctgggagggatgtccaggggctccagacaatcactaaaatgccaatgcttggctcggggggtcttacaggagaggan

SEQ ID NO: 6871 - DNA, 621 bp, Zea mays
  misc_feature (601)..(621): n is a, c, g, or t
  Peptide Sequence Number=SeqID_10818
  Probeset Number=SeqID_21274
atcgcaaaaacctaaatctctttctttcccccaaaaaaaaccagatcaatcaagatggcaccaaaggcaggaaagaagccagcagagaagaaacccgccgccgccgccgagaagccagcggaggaggtagccgagaaagccccggcggagaagaaacccaaggccgggaagaagctgccgaaggaggccggggccatcgacaagaagaagaagcggaacaagaagagcatcgagacgtacaagatctacatcttcaaggtgctgaagcaggtccaccctgacatcgggatctcgagcaaggccatggggatcatgaacagcttcatcaacgacatcttcgagaagctcgcccaggaggcctcgaagctcgctaggtacaacaagaagcccacgattacttcgagggagatccagactgctgttaggcttgttctccccggtgagctcgcgaagcacgctgtgtctgaagggaaccaaggccgggactaagtttactacctcttggaatggcggtttcccggtttaagggatctagatctggtcgcttttggttttatctacttaaataaatcggatggggtatgcttatctagatttagtnnnnnnnnnnnnnnnnnnnnn

SEQ ID NO: 6872 - DNA, 461 bp, Zea mays
  Peptide Sequence Number=SeqID_10819
  Probeset Number=SeqID_21275
atcgcaaaaacctaaatctcaattcaattcaattcaatggcaccaaaggcaggaaagaaacccgcagagaagaagcccgccgccgccgccgcggcagagaagccggcggaggaggtagcggagaaggccccgttggagaagaaacccaaggcggggaagaagctgccgaaggaagccatcggcgcgacggacaagaagaagaagcggagcaagaagagcatcgagacgtacaagatctacatcttcaaggtcctgaagcaggtccaccctgacatcgggatctcgagcaaggccatggggatcatgaacagcttcatcaacgacatcttcgagaagctcgcccaggaggcctccaagctcgcgaggtacaacaagaagcccacgatcacctcccgcgagattcagaccgctgtgaggcttgttctccccggtgagctcgctaagcacgccgtctctgaagg

SEQ ID NO: 6873 - DNA, 698 bp, Zea mays
  misc_feature (1)..(1): n is a, c, g, or t
  misc_feature (651)..(698): n is a, c, g, or t
  Peptide Sequence Number=SeqID_10820
  Probeset Number=SeqID_21276
nataagcgcggcttctgtaaagctcagtcgcatccgaagctcaaaaagcttcatcaatggcgtctcttctcctaccttcatctcaacttctcctccgtagtcgaaaccaacacaatgtccagccatttctcctccctcgctcctcccccaaaacaccattcttcgtctcctcctcaccgtctctccgtcaacactctacttcagcctcagcttccaagaacccatcggaagctttcacggctgcgacgacgacggagaacaagaaacagccggagaagaagcatttgagcgaggaggaagaagcagaagaggaagtagaggaggatatgctgtggattcaagagaaggcgttaaacttagtcgagttcaccggaacggtggctcaggcgattccaggcccccgagttggagataccaagctgccgtggatgctcgctgttccgttaacttacgccgtcaccactttggtcaccaccgccgttaaaaccgttaataacttctcttctcctaaagctcaacgcaagaaactggtgaatcagaatgcaatgatttgtaaatctatcgacgagctgttacagagagaaggcactgtgagtagctttgagctcaaggcacttgaagaaaagacagagtttaacatgggaggggttnnnnnnnnnnnnnnnnnnnnnnnnnnnnnnnnnnnnnnnnnnnnnnnn

SEQ ID NO: 6874 - DNA, 610 bp, Zea mays
  misc_feature (601)..(610): n is a, c, g, or t
  Peptide Sequence Number=SeqID_10821
  Probeset Number=SeqID_21277
atccctaaaattcactttgaaaaaatggcagaaaccgccgaaacaatcaacacgaccgtctcgcatccgcagcctgaatcagaagactccaccacattgtccgccacggcggatcagacatcggatgaaacctcaaaagccgcagatctgaagaaggaagaatcagtcgcagagacgaagccaggatccatctcgctccgcatttggccgccgacgcagaatactcgcgacgccgtcttgaaccgcctgatcgagacgctatccaccgagtccatcctctccaagagatacggaacgctcaactccgacgaagcttccgccgtcgcgaaatccatcgaggaggaagcgtacggcgtcgcatccgagcgctgtgtccgacgatgacgatgggatcaagatccttgaggtttattcccaggagattagtaaaaggatgcttgagacggtgaaagatcgatctgcagccaccgccggaaacggaaacaacgaaaccggggaaggatgcaaccgacgctacgaaagagtgaggcttgagtcctggcccactcttggtctgattccgttacaattaggtttgctttgatttcgccaatccaaaggnnnnnnnnnn

SEQ ID NO: 6875 - DNA, 629 bp, Zea mays
  Peptide Sequence Number=SeqID_10822
  Probeset Number=SeqID_21278
aaaaaatctctctgagaatccctaaatccacttgaaaaaaatggcagaaaccgccgaaacaatcaacaccaccgtctcaccgccgcattccgaatccgagggctccaccacattgcccgcgacgacgccagatcagacatcggatgaaacctcaaaagccgcagatctgaagaaggaagagtccgtcgcagagacgaagccaggaggaggcaactcgctccgcatttggcctccgactcagaaaactcgcgacgccgtcttgaagcgcctgatcgagacgctatccacggaatccatcctctccaagagatacggcacgcttcaactccgacgaggcttccgccgtcgccaaatccatcgaggaggaagcctacggcgtcgcgtcgaacgctgtgtctgacgacgacgatgggatcaagatccttgaggtttactccaaggaaattagcaagaggatgcttgagacggtgaaggatcgatctgcagccgccgcgaacaaggaagcggttgaggatgtgaagacggaagctacgaaagacgatgaagctcctgagtcggagaagagtgaggcgtaactcggtcttgatccttaccttatctattatctacctattagggcttcactagat

SEQ ID NO: 6876 - DNA, 618 bp, Zea mays
  misc_feature (595)..(595): n is a, c, g, or t
  Peptide Sequence Number=SeqID_10823
  Probeset Number=SeqID_21279
atcatcgactgtctcgccaagtgcttcaccagaccatccatcttctctccttgcaaaatgtacagatccatgcttgtccgatcctccgcctcggcgaagcagtcccttctccgccgcagcttctcttccggatccgttcccgagcgtaaagtcgcaatcttgggcgccgccggtggaatcggtcagcctctcgctctcctcatgaaactaaaccccctcgtctcaagcctctccctctacgatatcgctaacacaccaggagtcgccgctgacgtcggtcacatcaacaccagatctcaggttgttggatacatgggagatgatgagttggcgaaagctcttgaaggagctgacctcgttatcattcctgctggtgtccccaggaagcctggtatgacccgtgatgatcttttcaacatcaatgctggcattgtcaagaacctttgctctgccatcgccaagtactgccctcatgcgcttgttaatatgatcagcaaccctgtgaactccactgttccaattgcagctgagatcttcaagaaggctggtatgtacgatgaaaagaagttgtttggtgtacccactcttgatgttngtagggccaagactttctatgct

SEQ ID NO: 6877 - DNA, 630 bp, Zea mays
  misc_feature (603)..(603): n is a, c, g, or t
  Peptide Sequence Number=SeqID_10824
  Probeset Number=SeqID_21280
aaacctagaacatcctaatcgaaaaaccacataaaactaaaagagcatctcctcttagctcttgcttccttctcgagcgtaaaccctagatcccatctccaaaatgttcagatccgtgctcgtccgttcctcttcatcggcgaagcaatcgcttctccaccgcagcttctcctcctccgtccccgagcgcaaagtcgccatcctcggggccgccggtggaatcgggcagcctctcgctctcctcatgaagctcaaccccctcgtctcaagcctctccctcttcgatatcgcaaacacccctggagtcgccgctgatgtcggtcacatcaacaccagatctgaggtggttggatacatgggagatgatgaattggcgaaagctcttgcaggagctgacctcgttatcatccctgctggtgtccccaggaagcctggcatgactcgtgatgatcttttcaacatcaacgctggtattgtcaagaacctttgctctgccatcgccaagtactgccctcatgcacttgttaacatgatcagcaacccagtgaactccactgttccaattgcagctgagatattcaagaaggctggtatgtacgatgnagaagaagttgtttggtgcaccactct

SEQ ID NO: 6878 - DNA, 571 bp, Zea mays
  Peptide Sequence Number=SeqID_10825
  Probeset Number=SeqID_21281
accacataaactctaaaagacatatcctctagatcttctttctctcatctcaaaatgttcagatccatgcttgtccgatcctcctcgtcggcgaagcagtcgcttatccgccgtaacttgtcttccggatcggtcccggagcgtaaagtcgccatcttgggagccgccggtggaatcggtcagcctctggctctcctcatgaaactcaaccccctcgtctctagcctctcactctacgatatcgcaaacacacctggagttgccgctgatgttggtcacatcaacaccagatctgaggtagttggatacatgggagatgataacttggcgaaagctcttgaaggagctgacctcgttatcatccctgctggtgttcccaggaagcctggtatgacccgtgatgatcttttcaacatcaatgctggcattgtcaagaacctttgctctgccatcgccgagtactgccctcatgcacttgttaatatgatcagcaacccagtgaactctactgttccaattgcagcagagatcttcaagaaggctggtatgtacgatgaagagaagctgtttg

SEQ ID NO: 6879 - DNA, 699 bp, Zea mays
  misc_feature (636)..(699): n is a, c, g, or t
  Peptide Sequence Number=SeqID_10826
  Probeset Number=SeqID_21282
agaaaatgttgagatcctcgtttcggcttctctatatgacaagaaccaatcttctggttcgagcttcaccatcatcgctctctcgactcccatctaagttcacttctgcgaaaccacttgtcagttctcatcatcagattccgttatcaacaacgggagctaaactttctaggtcggaacattccatggctgcttcctccgaacccaaatccatctatgatttcaccgtcaaggatgcgaagggaaacgatgttgatctaagcacttacaaggggaaggttctgttgattgtcaacgttgcttctcagtgtggcttgaccaattcgaactatactgagcttgcacagctgtaccagaagtacaaagaccatgggtttgagatccttgcattcccctgtaaccagtttggtaatcaagaacctggttctaatgaagagattgttcagtttgcttgtacccgtttcaaggccgagtaccccatcttcgacaaggttgatgtgaacggtgactcggctgctccaatctataagttcctgaaatcaagcaaaggagggctttttggagacggaatcaagtggaacttcgccaagttcttggttgacaaagatgggaatgttgggggaccgttacgccccnnnnnnnnnnnnnnnnnnnnnnnnnnnnnnnnnnnnnnnnnnnnnnnnnnnnnnnnnnnnnnnn

SEQ ID NO: 6880 - DNA, 616 bp, Zea mays
  misc_feature (610)..(610): n is a, c, g, or t
  misc_feature (616)..(616): n is a, c, g, or t
  Peptide Sequence Number=SeqID_10827
  Probeset Number=SeqID_21283
acatttcattttcattcatcctctcgcttctgacctgacctgacctaaatcatcatcatcgaaaatggtttccgcgcgtgaggagttcgtgtacatggccaagctcgccgagcaagccgagcgctacgaggagatggtggagttcatggagaaagtgtccgcctccgtcgacggcgacgagctcaccgtcgaggagcgtaacctcctctccgtcgcctacaagaacgtgatcggcgcgcggcgcgcctcgtggcgcatcatatcgtcgatcgagcagaaggaggagagccgcggcaacgacgaccacgtggcggcgatccgcgattacagggggaagatcgagacggagctcacggggatctgcgaggggatactgaagctgctggactcgaggctggtccccgccgcagcgtcgggggactcgaaggtgttttatctgaagatgaagggggattaccataggtacttggctgagtttaagaccggtcaagagaggaaagacgccgctgagaatactctctccgcttacaaatctgctcaggatattgcgaatgcagagccccctccaactcacccaatccgtctaggtctggcattgaacttctctgtngtctan

SEQ ID NO: 6881 - DNA, 665 bp, Zea mays
  misc_feature (1)..(35): n is a, c, g, or t
  misc_feature (665)..(665): n is a, c, g, or t
  Peptide Sequence Number=SeqID_10828
  Probeset Number=SeqID_21284
nnnnnnnnnnnnnnnnnnnnnnnnnnnnnnnnnnnaataatcaatcaatcacatcagatctcagatctctgatctctcaaggaggaagaagatggcggtttctgcgcgtgaggagttcgtgtacatggccaagctcgccgagcaagcggagaggtacgaggaaatggtagagttcatggagaaagtctccgccgccgtcgacggcgatgaactcaccgtcgaggagcgtaacctcctctccgtcgcttacaaaaacgtgatcggcgcccgccgtgcctcgtggcgcatcatttcgtcgatcgagcagaaggaagagagccgcggcaacgacgaccacgtcacggcgatccgcgattacagatctaagatcgagacggagctctctggaatctgcgacgggatccttaagctcctcgattcgaggctcgtccccgccgctgcttccggcgattccaaggtgttttacctcaagatgaaaggtgattaccacaggtacttggctgagtttaagactggccaggagaggaaagacgccgccgagaacactctctccgcttacaaagccgctcaggatattgcgaatgcagagctagcaccactcacccaatccgtctaggtctggcattgaacttctctgtgttctactacgagatccttaactctcn

SEQ ID NO: 6882 - DNA, 648 bp, Zea mays
  misc_feature (610)..(648): n is a, c, g, or t
  Peptide Sequence Number=SeqID_10829
  Probeset Number=SeqID_21285
aaacacacacagactcattcattgatcctctcggcgataaacatcagatctcagatctccgaaagagaaaagaaatggcggtttccgcgcgtgaggagtacgtgtacatggccaagctcgcggagcaagccgagcgctacgaggagatggtggagttcatggagaaagtctccgcggccgtcgacggcgacgagctcaccgtcgaggagcgaaacctcctctccgtggcgtacaagaacgtgatcggcgcccggcgcgcctcgtggcgaatcatctcctcgatcgagcagaaggaggagagccgcggcaacgacgaccacgtcaaggcgatccgagactacagggggaagatcgagacggagctctcggggatctgcgacgggatcctcaagctgcttgacgataggctcgtccccgccgctggttccggtgattcgaaggtgttttacctgaagatgaagggggattaccataggtacttggcggagtttaagactggtcaggagaggaaagacgccgctgagaatactctctctgcttacaaggctgctcaggatattgcaaatgcagagcttgctcccattcccccaatcccggttgggtggggggnnnnnnnnnnnnnnnnnnnnnnnnnnnnnnnnnnnnnnn

SEQ ID NO: 6883 - DNA, 658 bp, Zea mays
  misc_feature (657)..(658): n is a, c, g, or t
  Peptide Sequence Number=SeqID_10830
  Probeset Number=SeqID_21286
attctgttctttaaagttcaccaaagatctctcctaaaactttgctctcatctctctcctaaagctagggtttcgcacagcctccttgtttccggcggtcgccaccgtcatctcaggtgaccgccgggccttctctcttttttttctttttttcgtagtctctgtgtcctcgtcgtcgtctcctcctctgtctctctgtggctgcttgatgcgacgacggttgtccggttcagatccggagctttgcttgtttcagggtcagatctcggaggttgcagcacttgaggacggtgctccgctcctccttacctctgtttcttcgtggccagttgaggctctgtccggatggttttgtatgccgtcgttgtgtttaggcttgagtggtggcgcgtggtggttgtgggtgctcggatctgctgtaggtgtgctcttccggctttgtttgcagcggtggagtccctggaggctgagccgtgtaagctctgtgatttcgcgggatctagggtttcttcccctactccttgctggtggtctccggcaaacgtgcgtgagctcttccgggaggggggctgtccctcttccggcgtgcccagtggaaacttggcgtaagacttgcccgccccggggtggccgccccccggttgccggggggcttann

SEQ ID NO: 6884 - DNA, 658 bp, Zea mays
  misc_feature (1)..(2): n is a, c, g, or t
  Probeset Number=SeqID_21287
nntaagccccccggcaaccggggggcggccaccccggggcgggcaagtcttacgccaagtttccactgggcacgccggaagagggacagcccccctcccggaagagctcacgcacgtttgccggagaccaccagcaaggagtaggggaagaaaccctagatcccgcgaaatcacagagcttacacggctcagcctccagggactccaccgctgcaaacaaagccggaagagcacacctacagcagatccgagcacccacaaccaccacgcgccaccactcaagcctaaacacaacgacggcatacaaaaccatccggacagagcctcaactggccacgaagaaacagaggtaaggaggagcggagcaccgtcctcaagtgctgcaacctccgagatctgaccctgaaacaagcaaagctccggatctgaaccggacaaccgtcgtcgcatcaagcagccacagagagacagaggaggagacgacgacgaggacacagagactacgaaaaaaagaaaaaaaagagagaaggcccggcggtcacctgagatgacggtggcgaccgccggaaacaaggaggctgtgcgaaaccctagctttaggagagagatgagagcaaagttttaggagagatctttggtgaactttaaagaacagaat

SEQ ID NO: 6885 - DNA, 583 bp, Zea mays
  Peptide Sequence Number=SeqID_10831
  Probeset Number=SeqID_21288
acctaaacgccggttacaaggaaggtcccataaatctcaccacgtggacggagacacgatgtcgttttcatgagattcaacgtctcccccttgagtcacttggccttcatctcctttgctcctcaaatctcgatttcaaaaaccctaacagggatttcgaatgcacatcggtggaggtgagtgatctcgagttactatggcgcggagatcgccgccgcagcttcacacgtcacgtcgcggcgtcgtgtcgtttcgatggaatctaatcactgctctctccgcctctctatgcgtactagctctcttcagtatctaccaccgtcagtctcgtcccgttccgtcgctatcagcggcgagatccagaatcccgctccagaaatactccggcgaccgtccgaagatcgcgttccttttcctcgctcgacatgacctgcctctcgatttcctatgggacagattcttcaagggtggagatgagaggaacttttcaatctatgttcattcaacacctggtttcgtattcgatgaaggcaccactcgatcacacttcttccacaatcgccagttgaagaataccatccag

SEQ ID NO: 6886 - DNA, 633 bp, Zea mays
  misc_feature (596)..(596): n is a, c, g, or t
  Peptide Sequence Number=SeqID_10832
  Probeset Number=SeqID_21289
gattaattgattttgattgtctctctctccgctgtcggaacaagccaaaagcaaaaggataagaaaaaacaatggagtccagcagaggtcaaggtgggatccagcagttgcttgctgctgaacaggaagctcaacacattgtcaatgctgccaggaccgcaaagatggcaaggctgaagcaagcaaaggaagaggctgagaaggagattgctgaatacaaagctaaaattgagcaagacttccagaggaaacttgaggagacaagtggagactcgggtgcgaatgtgaagaggctggagcaggagactgatgccaaaatcgaacagctgaagaacgaagcatccaggatctccgaagatgttgtggcgatgctcctcaaacatgtcaccactgtcaagaactgagagagattcctctgtaataatcaaaaagccatttatgagtttatgctcctctgttactgcattgaatctcagagactcagtctcatatgaaatgtgtttattgtaatttattctctaccatctttcttcttgttggtgtattcatcatttcccttttggagatgtaaataaattgagagcagatctgctggnatatcctttttttctctcttttttaattaataataaa

SEQ ID NO: 6887 - DNA, 898 bp, Zea mays
  misc_feature (1)..(162): n is a, c, g, or t
  misc_feature (293)..(293): n is a, c, g, or t
  misc_feature (319)..(319): n is a, c, g, or t
  misc_feature (329)..(329): n is a, c, g, or t
  misc_feature (372)..(372): n is a, c, g, or t
  misc_feature (633)..(633): n is a, c, g, or t
  misc_feature (651)..(651): n is a, c, g, or t
  misc_feature (669)..(669): n is a, c, g, or t
  misc_feature (718)..(718): n is a, c, g, or t
  misc_feature (760)..(760): n is a, c, g, or t
  misc_feature (763)..(898): n is a, c, g, or t
  Peptide Sequence Number=SeqID_10833
  Probeset Number=SeqID_21290
nnnnnnnnnnnnnnnnnnnnnnnnnnnnnnnnnnnnnnnnnnnnnnnnnnnnnnnnnnnnnnnnnnnnnnnnnnnnnnnnnnnnnnnnnnnnnnnnnnnnnnnnnnnnnnnnnnnnnnnnnnnnnnnnnnnnnnnnnnnnnnnnnnnnnnnnnnnnnnnnnnaaaaattttttttttttttttttttttggaaaaaaaaaaaaaaaaaaaaacccccccccggaaaccccaaaaaacccccccggggtgtttccaaatttccccggcaaaaaaagggggcgttggaaacccangttaccccccccccccgggcaaaaanttttcctctntcccccggccccgcgccgggccgtctccatacatacacacacncgcccgccgacacctctcacagagacacgcacgacacacacgagcttggactcacgcgcgccagaccagtctgattcatattttggagcaggagccacgtatccagcgcggatctagcagaagaggtagccggaggcggcggcgcagagggaggccgcggcgaggggtacggcggccgccaccgcggggagctccagctttcgtcggacgcgggagccggggcgggggcctcggcggctgcggcggacgccacgagcgcgncggccatggcggcgacgncgacgaacttcatcctgngcccgcccatctgcgagtctgtagtaagccgggtgtttattgggccgcnccggatctctcttcgagggtacgaagctctagagagatggcnccnnnnnnnnnnnnnnnnnnnnnnnnnnnnnnnnnnnnnnnnnnnnnnnnnnnnnnnnnnnnnnnnnnnnnnnnnnnnnnnnnnnnnnnnnnnnnnnnnnnnnnnnnnnnnnnnnnnnnnnnnnnnnnnnnnnnnnnn

SEQ ID NO: 6888 - DNA, 898 bp, Zea mays
  misc_feature (3)..(3): n is a, c, g, or t
  misc_feature (12)..(12): n is a, c, g, or t
  misc_feature (15)..(15): n is a, c, g, or t
  misc_feature (22)..(22): n is a, c, g, or t
  misc_feature (24)..(24): n is a, c, g, or t
  misc_feature (26)..(26): n is a, c, g, or t
  misc_feature (31)..(31): n is a, c, g, or t
  misc_feature (40)..(40): n is a, c, g, or t
  misc_feature (66)..(66): n is a, c, g, or t
  misc_feature (68)..(68): n is a, c, g, or t
  misc_feature (73)..(73): n is a, c, g, or t
  misc_feature (79)..(80): n is a, c, g, or t
  misc_feature (114)..(115): n is a, c, g, or t
  misc_feature (118)..(118): n is a, c, g, or t
  misc_feature (121)..(121): n is a, c, g, or t
  misc_feature (124)..(124): n is a, c, g, or t
  misc_feature (130)..(131): n is a, c, g, or t
  misc_feature (134)..(135): n is a, c, g, or t
  misc_feature (139)..(139): n is a, c, g, or t
  misc_feature (181)..(181): n is a, c, g, or t
  misc_feature (230)..(230): n is a, c, g, or t
  misc_feature (248)..(248): n is a, c, g, or t
  misc_feature (266)..(266): n is a, c, g, or t
  misc_feature (527)..(527): n is a, c, g, or t
  misc_feature (570)..(570): n is a, c, g, or t
  misc_feature (580)..(580): n is a, c, g, or t
  misc_feature (601)..(898): n is a, c, g, or t
  Probeset Number=SeqID_21291
aantggaactcnggngcggtgncngngggtnttctctatngcaagggggggctgcaggttttcccncncccanaagagnnagaacatcctaatcgaaaacccactcgagccagnntgncanccngcaagnnggnngggngccatctctctagagcttcgtaccctcgaagagagatccggngcggcccaataaacacccggcttactacagactcgcagatgggcgggcncaggatgaagttcgtcgncgtcgccgccatggccgncgcgctcgtggcgtccgccgcagccgccgaggcccccgccccggctcccgcgtccgacgaaagctggagctccccgcggtggcggccgccgtacccctcgccgcggcctccctctgcgccgccgcctccggctacctcttctgctagatccgcgctggatacgtggctcctgctccaaaatatgaatcagactggtctggcgcgcgtgagtccaagctcgtgtgtgtcgtgcgtgtctctgtgagaggtgtcggcgggcgngtgtgtgtatgtatggagacggcccggcgcggggccggggganagaggaaaantttttgcccgggggggggggnnnnnnnnnnnnnnnnnnnnnnnnnnnnnnnnnnnnnnnnnnnnnnnnnnnnnnnnnnnnnnnnnnnnnnnnnnnnnnnnnnnnnnnnnnnnnnnnnnnnnnnnnnnnnnnnnnnnnnnnnnnnnnnnnnnnnnnnnnnnnnnnnnnnnnnnnnnnnnnnnnnnnnnnnnnnnnnnnnnnnnnnnnnnnnnnnnnnnnnnnnnnnnnnnnnnnnnnnnnnnnnnnnnnnnnnnnnnnnnnnnnnnnnnnnnnnnnnnnnnnnnnnnnnnnnnnnnnnnnnnnnnnnnnnnnnnnnnnn

SEQ ID NO: 6889 - DNA, 474 bp, Zea mays
  Peptide Sequence Number=SeqID_10834
  Probeset Number=SeqID_21292
gttgatttttttcctcagagtctataccgcgcccagcctccattcttctccctcaccgtcgcgggctccagctcggccgcccatctcccaatgctcgacttccctctgttccttccctgctttcgctcggtttccagctcgtcgccattgccgtcgcgccccttctgctccagctcgcttctgcctggcgggttggccgtggaggcacagtcggccgtggcagccaacgcgtgcaggccacggaggagcgcgcgacgggactggccgtcccagctccatggtcgagctccctgcgtgcagccgcgcgctcctctactcggtgagaaatttgctattatggatgtcctcagatgcggcttcgacgatttggaggcgtaggcgagggattagctgatatggaaaagcagggaataggccactcgccaaaacgaacaaagaacacttcattacttgcgcaaccctagccgcacctga

SEQ ID NO: 6890 - DNA, 548 bp, Zea mays
  misc_feature (129)..(129): n is a, c, g, or t
  Peptide Sequence Number=SeqID_10835
  Probeset Number=SeqID_21293
attggcacaggtaactttggccactatccaaacacactaatcataccaaaaacgtcgcttggagggcaggcaggcaaggcaagggtggacgtggacaagacaagaggacgggaggaagagcggcgcgcngagggactcgggagcagcggtgtggacgcaacacaatcgtgggagctccgaggaccgaggcttcgagcggagcaccggttggagcgacgcaaaatcaatcctacgaaaccgtgatccaaggcaagtttgttcttgttccgttggggttagggatggcttcgatgctttttgttgtccagattcttgccatcgacgagatactcttgctccaaagtgcatgatggggttgcgaccggctgtggctccgcctgctgtcgccgcatgaccgcgcggccatggcaaaggccacgctcgtcggtgccctggtcggggccgcgcaaccaagcgctcgagccgcgacatggccgctgcgcgccggtgcgctcgccgagtccgcgcgtccgcggccgcctcgacagggctagactgggccaccgctg

SEQ ID NO: 6891 - DNA, 614 bp, Zea mays
  misc_feature (614)..(614): n is a, c, g, or t
  Probeset Number=SeqID_21294
aaaagaacaaaaccaaaaaaaaggtctaattgcaggtaaaatatagatagctcgccaccctcgaaacttctcttattctctctgtatgctttattctcatctctttttgccgacaaaagtttagtctctcaactctcgaaaataagacatggacgccgccgcgaccgcgagtttgatccgatcttccgtcttaccacttaaaacttccgacaacggtgctggatctatgttcctcaccgccagtggccctgggttcacgcgttttggtccgggacgtcaacttcgtttcaggcaaaatgcgtttgctagattctcgagaccgttgcaaagctcaacaactcggagaagctttgtggtaaaagcttcagcatctaatgatgatgcttcctcctctgctgctaaaccgatcgcgccgcttcagcttgagtctcctgctggtcagtttctgtctcagattctggtgactcatcctcatctcgtccctgccgctgttgaacagcagcttgagcagctccagactgatcgtgactccgagggtcagaacaaagatgcatcgtccgcgcctggaaccgacatcgttctctacaggagaaatcgctgaggtgagggagacn

SEQ ID NO: 6892 - DNA, 627 bp, Zea mays
  misc_feature (601)..(627): n is a, c, g, or t
  Peptide Sequence Number=SeqID_10836
  Probeset Number=SeqID_21295
ataataaaaactctctctctctctctctctctatcactcactctatcttgattctgttcactcatttcaaaaaaacacttaccaatctcggagccctagatctctcctctccgtttccaccgaagatgcgtgagatccttcacatccagggaggccagtgcggtaaccagatcggtgccaagttctgggaagtcgtctgcgccgagcacggcatcgatcccaccggtcgatacaccggagactcagatctgcagctcgagcgcatcaacgtctactacaatgaagcaagctgcgggagattcgtccctcgcgccgtcctcatggatctggagcctggaaccatggacagtctcagatctggaccttacggtcaaaccttccgccccgataacttcgtcttcggccaatcaggagccggtaacaactgggccaaggggcattacactgaaggagctgagctaatcgattcagggctcgatgttgttcgtaaggaggctgagaactgtgactgtcttcaagggtttcaggtttgccattccctgcgaggaggaactgatctggatggaacccttctatccctaaaatcggaaaaacaccagannnnnnnnnnnnnnnnnnnnnnnnnnn

SEQ ID NO: 6893 - DNA, 578 bp, Zea mays
  Peptide Sequence Number=SeqID_10837
  Probeset Number=SeqID_21296
aaattagagtctccctttgaccctcttcgccgtcagtctgtagcaatggcacccaaaaagggagtgaaggtggttaccaagaagaagacggagaaggtaaccaacccgttgtttgagagaaggccaaagcaattcggtatcggtggagctctgcctcctaagaaggatctgactcgttacatcaaatggcccaagtccatccgtctccaaaggcagaagcgtatcctcaagcagaggctcaaggtccctcctgctttgaaccagttcaccaagactcttgacaagaaccttgcgacccagcttttcaaggttcttatgaagtacaggcctgaggacaaggccgcaaagaaggatcgtcttttgaaaaaggcccaagccgaggctgagggaaagccttctgaatccaagaagcctatcgttgtcaagtacgggctcaaccacgtgacttacctcatcgagcagaacaaggcgcagcttgtggtcattgctcacgatgttgaccccatcgagcttgtcgtctggttacctgctctttgcagaaagatggaagtgccttactgcatttgttaaggccaatc

SEQ ID NO: 6894 - DNA, 624 bp, Zea mays
  misc_feature (624)..(624): n is a, c, g, or t
  Peptide Sequence Number=SeqID_10838
  Probeset Number=SeqID_21297
ctcttgtcttctcgacactctcatctcacacccaaagcttccgcttcgctccccctcagcttcaaacaatggtgtttgtgaagccctccaagtcgaacgcttacttcaagaggtaccaagtcaagttcaggagaaggagagatgggaagactgattacagagcaaggatccgtctcatcaaccaagacaagaacaagtacaacacaccaaagtaccgttttgttgtccgcttcaccaacaaagacatagtcgcacagatcgtgtctgcaagcatagccggtgacattgtcaaggcttctgcctacgctcatgagttgcctcagtatggtctcaccgttggtcttaccaactacgctgctgcttactgcaccgggcttcttttggctcgccgtgttctgaagatgctggaaatggatgaggagtacgagggcaaccttgaggctaccggagaggacttttccgtcgagccaaccgagtccaggagaccattccgtgctcttcttgatgttggtcttatcaggaccaccacaggaaaccgtgtctttggtgcactcaagggtgccttggacggaggacttgatatcccccacagtgacaagagatttgccggtttcaacaaggagn

SEQ ID NO: 6895 - DNA, 843 bp, Zea mays
  misc_feature (843)..(843): n is a, c, g, or t
  Peptide Sequence Number=SeqID_10839
  Probeset Number=SeqID_21298
acattacccactcacatagaaagaaacactcttaagagagagagaaaggacttggagatggaaggcaaggaagaagatgttagggtcggagctaacaagtttccggagagacaacccatcggaacatcggctcagagcgacaaggactacaaggagccacctcctgctcccctgttcgagccaggcgagcttgcttcctggtccttctggagagccggtatcgctgagttcatcgccacgtttctcttcctttacattactgtgttgaccgtcatgggcgtgaagagggcaccgaacatgtgtgcttctgtcggaatccaaggtatcgcttgggccttcggtggtatgatcttcgctcttgtctactgcaccgctggtatctccggtggacacatcaacccagctgtcacgtttggtcttttcttggccaggaagctttcgcttacaagagctgtgtactacatagtgatgcagtgcttaggagccatctgtggagctggtgtggtgaagggtttccaacctaagcaataccaagctctaggaggtggagccaacactgtagctcctggttacaccaaagggagtggtcttggagctgagattattggaaccttttgtcctcgtttacaccgtcttttccgccactgacgccaagagaaacgctcgggactcccatgttcccattcttgcacctctcccaattggattcgctgtgttcttggtccacttagccaccatccccatcactggaactggaatcaacccagcaaggagtcttggagctgccatcatcttcaacaaggacaacgcttgggacgaccattgggtcttttgggttggacn

SEQ ID NO: 6896 - DNA, 612 bp, Zea mays
  misc_feature (606)..(612): n is a, c, g, or t
  Peptide Sequence Number=SeqID_10840
  Probeset Number=SeqID_21299
cactgttttaatctctctctctctgctaatctcatcttcgatacactcaccatgtctaacggtaagatcaagatcggaatcaacggattcggaagaatcggtcgtttggttgctagagtcgttctccagagggacgatgttgagctcgtcgccgtcaacgatcccttcatcaccactgagtacatgacgtacatgttcaagtacgacagtgttcacggtcaatggaaacaccatgagcttaaggttaaggacgagaagactcttctcttcggtgagaagccagtcaccgtcttcggcatcaggaaccctgaggatatcccatggggtgaggctggagctgacttcgttgttgagtccaccggtgtgttcactgacaaggacaaagctgctgctcacttgaagggtggtgccaagaaggttgtcatctcagccccgagcaaggatgctcccatgtttgttgttggtgtcaacgagcacgagtacaagtccgaccttgacatcgtctccaacgctagttgcaccaccaactgcctttgctccccttgccaaggtatcaacgacaggttcggaaattgtgagggtcctttgaccaccgttcacttcatnnnnnnn

SEQ ID NO: 6897 - DNA, 634 bp, Zea mays
  misc_feature (629)..(634): n is a, c, g, or t
  Peptide Sequence Number=SeqID_10841
  Probeset Number=SeqID_21300
atattcttctccttccgagtggtcgttagatcagatctcttcgtgttttacatttccaatggcgtcctcctgtgttgctaatctttctctgtcaggtgtgtctcaatctcattatgtcaaggcaaatggaatgtctaccgcaaagctcaactcgatttgtaaaacctctgcattgagtatccagaagagatcaaaccggagtcgcaagttttcagtttctgcagagtatgggagtaggagaggaagtggtggtggtgatttcgtagctggttttcttcttggtggtgctttgtttggtgctgcagcctatatctttgctccacaaatacgaagatcgataatgagtgaagaagatgagtatggtttcaagaagccagatcaaccaagttactacgatgaaggtttagagaaaacaagggagaccttgaacgagaaaatcggacagcttaactcagctattgacaatgtctcttcgcgtttaagaggtcgagcaaagaagacttcttccccggtcgaaactgatccagaagttgaagctactacttgagaaagaacacaaaatactttgcttcttctctgtttttttttttttccattcgaaattgatctgttgggcttcttccctctannnnnn

SEQ ID NO: 6898 - DNA, 633 bp, Zea mays
  misc_feature (633)..(633): n is a, c, g, or t
  Peptide Sequence Number=SeqID_10842
  Probeset Number=SeqID_21301
atcaacaacgcaattacgacaatggtggcggcggctatggcttctcacgtctcttccacccgatcaccggctctttccctctcctcttcatcgtccttcttccctggcaccactctcaggcgattctccgccgtctcactcgctcctccggcgagcttctcacccctcagcctccgcgtctcctgccaagcctcctccgtcacgtccccttctacttccgatgtgaaagggaaatctgacctgaaagactttctggccatagatgattttgacacagagaccatcaagaagattctagacaaggcttcagaggtgaaagccctgttgaagtcaggggagaggaactatctgccttttaaagggaagtctatgtctatgatctttgcaaagccctccatgaggactcgtgtttcctttgagactggctttttcttgcttggtggacatgcactgtatcttggacccaatgacatccagatgggcaagcgagaggagactcgcgacgttgctcgtgtcctgtcgcgctataatgacatcattatggcccgtgtttttgctcatcaggacattcttgatttgctaactactcgagtggaccggttggtaacggtctgacagatcataacacccttn

SEQ ID NO: 6899 - DNA, 634 bp, Zea mays
  misc_feature (634)..(634): n is a, c, g, or t
  Peptide Sequence Number=SeqID_10843
  Probeset Number=SeqID_21302
atcactcatcactacacacttctcattttgcaaacagtcaaaagcccctaaaactaagaaaaaatggctggtctagtgaagttggcatgcttggtcttggcctgcatgattgtggccggtccaatcgcaacgaacgcggctctaagctgtggaaccgttagcggtaacttggcagcatgcattggctacttaacccaaaatgggccccttcccagagggtgctgcaccggcgttactaatctaaacaacatggcccgtacaaccccggaccgtcagcaagcttgccgttgccttgtaggagccgctaactccttccctactctcaacgctgcccgtgctgctggacttcctaaggcatgtggagtcaatattccttacaaaatcagcaaaagcaccaactgcaacagcgttagatgagcagcggtcggatgaagaaactcaagcggacgtacgaatctaatataatgtatgagagagtactaaataagatgttgttttttctagggttttaaaatttcatgtttcccctctgtggtggcgttcctttactttggccgtatgtactatggtcgtaatcaacgtccgctatatgaagttcatatccaaggttacgctataaaaaaaaaaaaaaagn

SEQ ID NO: 6900 - DNA, 615 bp, Zea mays
  misc_feature (190)..(190): n is a, c, g, or t
  misc_feature (230)..(230): n is a, c, g, or t
  Peptide Sequence Number=SeqID_10844
  Probeset Number=SeqID_21303
atcactcatcattccacacacatctcattttgcaaacaaaaaaaatctaagagagaaatatggctggtctaatgaagttggcatgcttggtcttggcctgcatgatcgtggccggtccaatcacatcgaacgcggctctgagctgtggcaccgttagcggctacgtggcaccgtgcattggctacctggnccccaggtgcgccggccctccccagagcgtgctgcagcgncgttactagtctaaacaaccttggcccgtacaaccccagaccgtcagcaagcttgccgttgcctggtaggagcccgctaacgcctttccctactctcaacgcttgcccgtgcagctggacctccctaaggcatgtggagtccacctttccttacaagatccgcaaaaccccccacctgcaaccggggggaaatgggccgccgggccgaatgaacctatatgccaaccttccaagaattttgggttgggggggggccaaaaccaaaaaaaagaagggtccccggggtgggtggtttttaaaaggtttctcccagtccccggcccttttaggggggggcgccccctttaaattttggggcccggggacaatttccacaacacccggt

SEQ ID NO: 6901 - DNA, 615 bp, Zea mays
  misc_feature (386)..(386): n is a, c, g, or t
  misc_feature (426)..(426): n is a, c, g, or t
  Peptide Sequence Number=SeqID_10845
  Probeset Number=SeqID_21304
accgggtgttgtggaaattgtccccgggccccaaaatttaaagggggcgcccccccctaaaagggccggggactgggagaaaccttttaaaaaccacccaccccggggacccttcttttttttggttttggcccccccccaacccaaaattcttggaaggttggcatataggttcattcggcccggcggcccatttccccccggttgcaggtggggggttttgcggatcttgtaaggaaaggtggactccacatgccttagggaggtccagctgcacgggcaagcgttgagagtagggaaaggcgttagcgggctcctaccaggcaacggcaagcttgctgacggtctggggttgtacgggccaaggttgtttagactagtaacgncgctgcagcacgctctggggagggccggcgcacctggggnccaggtagccaatgcacggtgccacgtagccgctaacggtgccacagctcagagccgcgttcgatgtgattggaccggccacgatcatgcaggccaagaccaagcatgccaacttcattagaccagccatatttctctcttagattttttttgtttgcaaaatgagatgtgtgtggaatgatgagtgat

SEQ ID NO: 6902 - DNA, 559 bp, Zea mays
  Peptide Sequence Number=SeqID_10846
  Probeset Number=SeqID_21305
ctcttgagtctctgatcctcatctccttgagtctttctttctttctttctccatagatccgtgcgaaaatggcgccgaagttcgacacggagaagatgcaggaacgccagaacttccgtaacgtctggcacactgatctcactcacaccatccagggcgatactccctattgctgttttgcattgtggtgtgccccttgtgcatcatacttgcttcgcaagcgtgcgctttacaatgacatgtctaggtacatatgctgcgctggttacatgccttgtagcggcaggtgtggagaagccaaatggcctcaactttgtcttgccactgaggtcttttgctgctttggaacctctgtggcatcgactcgtttccttctgcaagatgagttccaaattcagaccacacaatgtgacaactgcatcattggttttatggtttgccttagccaagtggcttgcatattctccatagttgcgtgtatcgtcggcattgatgagctttcagaagcttcccagctgctctcttgtttatctgacctggtgtactgcacggtttgcga

SEQ ID NO: 6903 - DNA, 617 bp, Zea mays
  Peptide Sequence Number=SeqID_10847
  Probeset Number=SeqID_21306
aaaaacaaacaaacaaaaccctaaatcgacgacgatgatgctcaggcaagctgcgaagaaggctctaggccttacgtcacgccaatcgacgccgtgctccgtcggtatctcccgatcctaccacgagaacgtcatcgaccactacgacaacccccgcaacgtcggctctttcgataagaacgatcccaccgtcggcacgggcctcgtcggggctcccgcctgcggtgatgtgatgaagctgcagatcaaggtcgatgagaagaccggtcagatcgtcgatgctcgcttcaagacctttggttgtggctccgccatcgcctcttcatctgtcgccactgaatgggtgaaaggcaaagctatggaggaagtcctgaccatcaagaacaccgagatcgccaagcatctttctctcccacctgtgaagctccattgcagtatgttggcggaggacgccatcaaggcagctgtcaaagactacaaggagtagcgtgtgaagacaaacggtgctggagaaccatcgcaggcgtgattccttctgctcatggttataccattatgtgtatatgatggtgaaaacagggggagtgtagaagagacctatatggttatgttctctt

SEQ ID NO: 6904 - DNA, 671 bp, Zea mays
  misc_feature (51)..(53): n is a, c, g, or t
  misc_feature (55)..(55): n is a, c, g, or t
  misc_feature (59)..(59): n is a, c, g, or t
  misc_feature (601)..(671): n is a, c, g, or t
  Peptide Sequence Number=SeqID_10848
  Probeset Number=SeqID_21307
atattgttctcgagctctcctctgttctaactaatcttcgtgtctagatannnanaggnaatggagtttatgttcagagatctctctacattctgttcctctttggagtagagcatgttctgtttataatggggacgatcaagactcttttctactctaccctgagcttctttcctctccattgaacaagtctcttgtgatcaaaacctttgattcgtctggcgttgtctctgtcggagaatacaaagtcaaagctagtctttcctcccactcttcagagtatttttcgacaagtatggtgacattgcatcagattccaagatccagtctctctccacacggacgtaccatctcgagacttctagccgaggttggtcctgaactccagtcaacgcctctgcatcggctggctgaatcccgagctagggagattcttccgattgtttaggacatagaaaccgcgaagatcccagtaaagttggtcccgcttctgttctttgagggaggttgttgaggcaaccgggtttaataaaaagcctggtccgcgtcctaaaaaaaaaaagggggcgcgaaaaagttttgtttttttcccaaaaaaaannnnnnnnnnnnnnnnnnnnnnnnnnnnnnnnnnnnnnnnnnnnnnnnnnnnnnnnnnnnnnnnnnnnnnn

SEQ ID NO: 6905 - DNA, 671 bp, Zea mays
  misc_feature (1)..(71): n is a, c, g, or t
  misc_feature (613)..(613): n is a, c, g, or t
  misc_feature (617)..(617): n is a, c, g, or t
  misc_feature (619)..(621): n is a, c, g, or t
  Peptide Sequence Number=SeqID_10849
  Probeset Number=SeqID_21308
nnnnnnnnnnnnnnnnnnnnnnnnnnnnnnnnnnnnnnnnnnnnnnnnnnnnnnnnnnnnnnnnnnnnnnnttttttttgggaaaaaaacaaaactttttcgcgccccctttttttttttaggacgcggaccaggctttttattaaacccggttgcctcaacaacctccctcaaagaacagaagcgggaccaactttactgggatcttcgcggtttctatgtcctaaacaatcggaagaatctccctagctcgggattcagccagccgatgcagaggcgttgactggagttcaggaccaacctcggctagaagtctcgagatggtacgtccgtgtggagagagactggatcttggaatctgatgcaatgtcaccatacttgtcgaaaaatactctgaagagtgggaggaaagactagctttgactttgtattctccgacagagacaacgccagacgaatcaaaggttttgatcacaagagacttgttcaatggagaggaaagaagctcagggtagagtagaaaagagtcttgatcgtccccattataaacagaacatgctctactccaaagaggaacagaatgtagagagatctctgaacataaactccattncctntnnntatctagacacgaagattagttagaacagaggagagctcgagaacaatat

SEQ ID NO: 6906 - DNA, 574 bp, Zea mays
  Peptide Sequence Number=SeqID_10876
  Probeset Number=SeqID_21309
gttgcgcttttgttaagctttccatggatgggaccttgagctctgcttcccttctctctcctaaattcgtgaactttctctctcttcgttagtttgatcttctactgtgttcgtcttctctctccagataaagatctcatgacttatcaattgcaaagtgtggacaaggagggtttgggtacagcaacttgtctgaaggaacgcaactacttgggtttgtctgattgctcctcctctgttgacagctcaaccgttcccaatcttgttctagatactgacaagaagagcagtctcaacttcaaagctacagagctaaggctaggtcttccagaatcgtctcagtctccccagagagaaactgacttcggtttgctgagtccaagaacgcctgacgagaaacttctcttcccgctgcttccttgtaaagaccatgcttcaggcaacaaaagaggatatcttgctaagagtggctccaacaatgcacctgcttccaaggcgcaggttgttggttggcctccaatcagatcttacgggaagaacacaatggcttcttctacttccaagacccgaaggg

SEQ ID NO: 6907 - DNA, 574 bp, Zea mays
  Peptide Sequence Number=SeqID_10877
  Probeset Number=SeqID_21310
cccttcgggtcttggaagtagaagaagccattgtgttcttcccgtaagatctgattggaggccaaccaacaacctgcgccttggaagcaggtgcattgttggagccactcttagcaagatatcctcttttgttgcctgaagcatggtctttacaaggaagcagcgggaagagaagtttctcgtcaggcgttcttggactcagcaaaccgaagtcagtttctctctggggagactgagacgattctggaagacctagccttagctctgtagctttgaagttgagactgctcttcttgtcagtatctagaacaagattgggaacggttgagctgtcaacagaggaggagcaatcagacaaacccaagtagttgcgttccttcagacaagttgctgtacccaaaccctccttgtccacactttgcaattgataagtcatgagatctttatctggagagagaagacgaacacagtagaagatcaaactaacgaagagagagaaagttcacgaatttaggagagagaagggaagcagagctcaaggtcccatccatggaaagcttaacaaaagcgcaac

SEQ ID NO: 6908 - DNA, 636 bp, Zea mays
  misc_feature (636)..(636): n is a, c, g, or t
  Peptide Sequence Number=SeqID_10878
  Probeset Number=SeqID_21311
atttattttcattggaactactatatgttgtctctctctctcgataactcctcccagccccaggaaacctataaaattccttagatccaaactcagagaatggccggtggatttaccatcaacataaacattccggctggtgaaggacttaacattagcattaacccaaactctgctgcagctggtaatctatgtacgaatccgtcctctcaaaagcccctagaatgctctccaggaaaggctaacccaaaggttttctttgatatggcggtgcgcggcaaagctgttggtcggatcgtgatggagctctttgccgacacgaccccacggacggcagagaatttccgcgccctctgtacaggcgagaaaggcatggggaagaagggtaagccacttcattacaaaggatcaatcatccaccatatgtgccccgattatatcattggcggaggagatttcacttacgaaaggaaaggatacggaggcgaatcaatctacgccggaggttttttcgaggatgagaacttcatcaaaaagcacacccggtccgggtatcctctccatgaacaacaatggtcctgacacaaaccaatctcagtttttgatctccttgaccgagaactgggaactcgacgn

SEQ ID NO: 6909 - DNA, 621 bp, Zea mays
  misc_feature (614)..(621): n is a, c, g, or t
  Peptide Sequence Number=SeqID_10879
  Probeset Number=SeqID_21312
accaaacaaaaacattcaaatctcatatactaaataacatcctcttgagagacaataaagagaatggcacttcttcacttgtctctctccctcttctcatgtctcttccttgtcctagctccgacttacgttgcttcctctcatgtctccgaccctgaactcgttgttcaagaagttaaccaacatataaatgcttctaggaggaatcttggtgtcctctcatgtgggaccggaaatccaatagacgactgctggagatgcgaccccaagtgggagaaaaaccgacaacgactagctgattgcgccatcgggtttggcaaacgcgcaataggcggccgtgaaggcaaaatatacgtggtgaccgacccgagcgacaaagacgcggttaaccctaaacccggaacgctaagacacgctgtgatccaggaagaaccgctatggatcatcttcgcacgtgacatggtcataaagctgaaagaagagctgatcatgaactcccttcaagaccatagatggacgtggagcgaacgtccacatcgctggcggcgcgtgcatcactgtccagtacgtgactaacatcctccccccgcggcgtggccccccgcgactggcannnnnnnn

SEQ ID NO: 6910 - DNA, 640 bp, Zea mays
  misc_feature (640)..(640): n is a, c, g, or t
  Peptide Sequence Number=SeqID_10880
  Probeset Number=SeqID_21313
ctgaccgcctccctcgcctggtattcctggaggccgccgcctccaagcttctccctcccacgtgtgcttctctccctcccttcccttctctctgctgcgcacgtcggcctctagctcgtggagctccctcctctccctccacctctcctcccatggcgcgtcctctagctctggtgccgcgcgcactccttccctattgccgcgcgtgccccatctccctccacgcgcccctggctcggaccccggctcggccttctccccagtgcccggccggagctccctggctcgcccctgcgctcgcccagcccctgctcctcgctcctcccggcgcccagccgagctcgcccccggccccttgctcctccatggccggcgtttccccggcttgggtctcaccaaggtcgcccgccgtttccctgtgccgaggtctcgcccagccacaaccccgctcgacttggccgcgacctcgccgtggatgccgtcctcgcctcgccctacggccaacttcgccggtcgagttcctctgccctctcccacgaccgccgtcgattctctctagccggggcgcggaccgggcccctgctcctgctcgccatggctgccatgccctcccaacagcaaagctcgcggggattggaan

SEQ ID NO: 6911 - DNA, 640 bp, Zea mays
  misc_feature (1)..(1): n is a, c, g, or t
  Probeset Number=SeqID_21314
nttccaatccccgcgagctttgctgttgggagggcatggcagccatggcgagcaggagcaggggcccggtccgcgccccggctagagagaatcgacggcggtcgtgggagagggcagaggaactcgaccggcgaagttggccgtagggcgaggcgaggacggcatccacggcgaggtcgcggccaagtcgagcggggttgtggctgggcgagacctcggcacagggaaacggcgggcgaccttggtgagacccaagccggggaaacgccggccatggaggagcaaggggccgggggcgagctcggctgggcgccgggaggagcgaggagcaggggctgggcgagcgcaggggcgagccagggagctccggccgggcactggggagaaggccgagccggggtccgagccaggggcgcgtggagggagatggggcacgcgcggcaatagggaaggagtgcgcgcggcaccagagctagaggacgcgccatgggaggagaggtggagggagaggagggagctccacgagctagaggccgacgtgcgcagcagagagaagggaagggagggagagaagcacacgtgggagggagaagcttggaggcggcggcctccaggaataccaggcgagggaggcggtcag

SEQ ID NO: 6912 - DNA, 631 bp, Zea mays
  misc_feature (601)..(631): n is a, c, g, or t
  Peptide Sequence Number=SeqID_10881
  Probeset Number=SeqID_21315
ataacaaaaaaaaaatggcgaccgcgtctctcgtcccgacatcaaacatcttccatgtctctccgtcagttagaacaagagctagcgtcattgttgcatcatctcatcaacaacaaccaagaaggagagacttactgctgaaaacagcggtggctattcctgcgattttgaacttgaaggaagctcctatctctgaggcgcgtgaggtggaagtgggatcgttcttaccaccttctgagtctgacccttccttcgtcctcttcaaagccaaaccttctgatactcctgctctccgcgcagggaacgtgcagccgtatcagtttgttctaccaccgaactggaaacagcttcgaatagccaacatcttgtcaggcaactactgccaaccgaaatgcgcagagccatgggatagaagtgaagttcgagaacgagaagcaaggggaagttcaagtagttgcttctcctttgattcgtttaaccaacaaagccaaacgcaactattgaagatctcggtgagcctgagagagtgattgcttctctcggtccctttgtcactggaaactcttatgattctgatgagcttgtggatactcaatcgaannnnnnnnnnnnnnnnnnnnnnnnnnnnnnn

SEQ ID NO: 6913 - DNA, 634 bp, Zea mays
  misc_feature (607)..(634): n is a, c, g, or t
  Peptide Sequence Number=SeqID_10882
  Probeset Number=SeqID_21316
acacacagagcgagtcgaactccgagtcacccgccgagtttctctcactctcccctcctcgataaaatctctcgttttcagatctcgaatctcacctctatacttccgtcgccagcttttcagagatggaaacgtttctattcacatccgagtccgtcaacgagggacaccccgacaagctctgcgaccaagtctccgacgcgatcctcgacgcctgcttagagcaagaccccgagagcaaagtcgcttgcgagacgtgcaccaagaccaacatggtcatggtcttcggcgagatcacgacctctgctaaagtagattacgagaagatcgtcagatccacttgtcgcgagatcggtttcatctccgccgatgtcggtctcgacgccgacaaatgcaacgtcttggtcaacatcgagcagcagagtcccgacattgctcagggagttcacggtcatttgaccaagaagcctgaagacatcggagcgggtgatcagggacatatgttcggttacgctaccgacgagactcccgagctgatgcctttgactcatggtcttgcgaccaagcttggcgcgaggcttaccgaagtgaggaagaccagacttgnnnnnnnnnnnnnnnnnnnnnnnnnnnn

SEQ ID NO: 6914 - DNA, 560 bp, Zea mays
  Peptide Sequence Number=SeqID_10883
  Probeset Number=SeqID_21317
aatcgcaacagccgcctccatccttgcgcttctctaaactttttgtcatcgatacctttagatctcgcttctggcgacgaatcttttatttattgcttctgtttgtgatagcgagtcctccgatctacacaacggtgttgattttccagcaatttaaccgttttaagtcctttcatcggtagatctgacgcagatctcatgaaacctatacttcctctacggatctgccggtgggatcatcgcgtgaggggtgtctatgatgcgagtcggttgcgttgaagcgctttgaggttgaatcgaattcgttatggacgtgaagcggtgttcttgtgtgggttaagttaaaattaggatgtagaagatgttgaattgcatcttttgtcatccgacctttgccatgtcaggtgcgcttgcatggcaggtcaaaaacagatccttaataaaaatatatattttgtgggggggggagggagttcgcaccgggttattttttttttatcccgggttctcctctccttgggggggcgtgtcttgctctcggctttcacacactctattta

SEQ ID NO: 6915 - DNA, 560 bp, Zea mays
  Probeset Number=SeqID_21318
taaatagagtgtgtgaaagccgagagcaagacacgcccccccaaggagaggagaacccgggataaaaaaaaaataacccggtgcgaactccctcccccccccacaaaatatatatttttattaaggatctgtttttgacctgccatgcaagcgcacctgacatggcaaaggtcggatgacaaaagatgcaattcaacatcttctacatcctaattttaacttaacccacacaagaacaccgcttcacgtccataacgaattcgattcaacctcaaagcgcttcaacgcaaccgactcgcatcatagacacccctcacgcgatgatcccaccggcagatccgtagaggaagtataggtttcatgagatctgcgtcagatctaccgatgaaaggacttaaaacggttaaattgctggaaaatcaacaccgttgtgtagatcggaggactcgctatcacaaacagaagcaataaataaaagattcgtcgccagaagcgagatctaaaggtatcgatgacaaaaagtttagagaagcgcaaggatggaggcggctgttgcgatt

SEQ ID NO: 6916 - DNA, 634 bp, Zea mays
  misc_feature (623)..(634): n is a, c, g, or t
  Peptide Sequence Number=SeqID_10884
  Probeset Number=SeqID_21319
attttgcgttgggattcgtgagaaaacagaggaggataagctaatcaatgggttcgatctctctgtcaaattctctgcccataccgcgacttccactacatacatcatcactcaatccatgccttccttcctccttccctcttcctcctcgtcgctccactttttcaccgcgaatctccgcctctgccgtcttcgcagctccttccggcgttaataactctgtcccgggtaaaaacgggggttacacagttggtgatttcatgacagggaaacagcatcttcatgttgttaagccctctacgtcggttgatgatgcattggaacttctggttgagaagaaggtcacgggcttgcctgtaattgatgatgattggagtctggttggcgttgtttctgattacgacttacttgcactcgactctatttctggccggagcagccaaaatgatacaaacatgttccctaacgtggacagttcatggaaaacatttaacgaacttcagaagctgataagcaagacacatgggaaagtgggttggagatttgatgacgccttcccctctggttgtccgtggctctaccaatttagaagatgctgccaggttgctactggaaacaaagtnnnnnnnnnnnn

SEQ ID NO: 6917 - DNA, 603 bp, Zea mays
  Peptide Sequence Number=SeqID_10885
  Probeset Number=SeqID_21320
attacctttgtttctctcatattccttccacaaaaaaaaaaaaaaaaaagacttgtttttgcgttggaatccgtgaggaacagaggaggataagccatcatgggttcggtctctttctcaaattctatgcccataacgcgacttccactacttacatatcaatcccttcttcccacttcttcatcacttcctcctctctccaaccgtcgtcgctccaatgtttcacagacaatcaccgcctctgccgtcttctcagctcctgccggcgttaatgactctcttccggcaagaaacgagggttacacagttggggatttcatgacagggagacagcatctgcatgttgttaagccctcaacatcggtcgatgatgcattggaacttctggttgagaagaaagtcactggattgcctggaattgatgatgattggaaactggttggtgttgtttctgattacgacttgcttgcactggattccttttctggccgctccccaaatgaaaacaaacttggtccctaaacgtcgacaggcaccctggaaaaacgttttaaggaaactcccagaaactggtaaactaaggcaccccgtggaacaaggttg

SEQ ID NO: 6918 - DNA, 627 bp, Zea mays
  misc_feature (546)..(546): n is a, c, g, or t
  misc_feature (604)..(627): n is a, c, g, or t
  Peptide Sequence Number=SeqID_10886
  Probeset Number=SeqID_21321
actggtctatagattcccggaaaataaatagcaccaacaagaagtctctctccactctaaagaaaaaggcgatttccggtgaaaacgttcgcctctccggtggtgggcttcggccgtcactgccgtgagagggctccctctctgtgtctcctctcctccacccttcgctgtgtctcctttccggatctcgaaatctaagctagcgttgtgagagtggagctttcaaggcggttgtgtgtttgctcggcggtggggaggtttggccggggctctagcttcatgtggtagatctgaggggtcggattaagcgcgtggaccccaagctctccctggttctctcatcctctcccacggcagtggagtgctctccggtgaagaggcgtggcgggtagggcttcgtttcggggtggcttgacgcgtaagggctggtctctctggatctggaactccggttgactaactatcagtttgtttgcctgctatgaggaccgcaggctctgctgagaaggagaaagctcgaggcgtggaggcgagtggttttccggngtgcggcctagaccaattcaggcggctgctccggactggcgatacctcccagctttgnnnnnnnnnnnnnnnnnnnnnnnn

SEQ ID NO: 6919 - DNA, 627 bp, Zea mays
  misc_feature (1)..(24): n is a, c, g, or t
  misc_feature (82)..(82): n is a, c, g, or t
  Probeset Number=SeqID_21322
nnnnnnnnnnnnnnnnnnnnnnnncaaagctgggaggtatcgccagtccggagcagccgcctgaattggtctaggccgcacnccggaaaaccactcgcctccacgcctcgagctttctccttctcagcagagcctgcggtcctcatagcaggcaaacaaactgatagttagtcaaccggagttccagatccagagagaccagcccttacgcgtcaagccaccccgaaacgaagccctacccgccacgcctcttcaccggagagcactccactgccgtgggagaggatgagagaaccagggagagcttggggtccacgcgcttaatccgacccctcagatctaccacatgaagctagagccccggccaaacctccccaccgccgagcaaacacacaaccgccttgaaagctccactctcacaacgctagcttagatttcgagatccggaaaggagacacagcgaagggtggaggagaggagacacagagagggagccctctcacggcagtgacggccgaagcccaccaccggagaggcgaacgttttcaccggaaatcgcctttttctttagagtggagagagacttcttgttggtgctatttattttccgggaatctatagaccagt

SEQ ID NO: 6920 - DNA, 631 bp, Zea mays
  Peptide Sequence Number=SeqID_10887
  Probeset Number=SeqID_21323
aacctagccgctacactatctcccctctgcaacaatcacttagataattcagccatgggtaaagagaagttccacatcaacatcgtggtcatcggccacgtggattccggaaaatcgacaaccaccggtcacctgatctacaagctcggcggtatcgacaagcgtgtcatcgagaggttcgagaaggaagccgccgagatgaacaagaggtctttcaagtacgcgtgggtcctggacaagctcaaggccgagcgtgagcgtggtatcaccatcgacattgctctctggaaggtcgaaaccaccaagtactactgcaccgtcatcgacgctcctggccatcgcgatttcatcaagaatatgatcaccggtacctcccaggctggattgtgctgttctaattatcgatcccaccacccggtggggtttgaggctggattctctaaggatggtcagacccgggagcatgctcttctcgctttcaacggcttggtggtaagcaaatgattttgctgctggaacaagatggatgcaccgactccctagtactctagggctaggtacgtggagtttttccgggggggggcctcttacctggtggaaaagggtggtaaacctggaaaaaaaaaccccg

SEQ ID NO: 6921 - DNA, 672 bp, Zea mays
  misc_feature (636)..(672): n is a, c, g, or t
  Peptide Sequence Number=SeqID_10888
  Probeset Number=SeqID_21324
acaaaaaaaaaaactcgctctctctacgaaaaaaaagaagaaggtttctttaacctagatctcgttcgccggcagcagaatctgctgttttcgtcgctgctgccggcccccacccctttgtttgatttgttctttccttttgttgctccacttgtatcttcttcctgtccgatatgcttgagccctgttctcagtttggaatggtgtttcggtgaggctgggttagaggaagtggtggctgtggcacggaatcgggagatctatctttagctgctcagttccggtggtatttggttagatctggttcacttttggtggttcaaggcgtttggggactgcgtctctgttctctggtggctttcagacgaaatcggttccttttggacagttttgcgagcgataaagtagatctcggatggggtgggaatgggtctgtcgatggtttcagttcagggtcggagtttcagggaaagtggctagtttctgctgtagattccgattcagatctgggcctctggctcagggtggtggagaaagctggcaggggggggctggtgtctttctatttcccctgatggctgccggggttggagttctctatctggggggggggagagcccctgaaatttccctctnnnnnnnnnnnnnnnnnnnnnnnnnnnnnnnnnnnnn

SEQ ID NO: 6922 - DNA, 672 bp, Zea mays
  misc_feature (1)..(37): n is a, c, g, or t
  Peptide Sequence Number=SeqID_10889
  Probeset Number=SeqID_21325
nnnnnnnnnnnnnnnnnnnnnnnnnnnnnnnnnnnnnagagggaaatttcaggggctctccccccccccagatagagaactccaaccccggcagccatcaggggaaatagaaagacaccagcccccccctgccagctttctccaccaccctgagccagaggcccagatctgaatcggaatctacagcagaaactagccactttccctgaaactccgaccctgaactgaaaccatcgacagacccattcccaccccatccgagatctactttatcgctcgcaaaactgtccaaaaggaaccgatttcgtctgaaagccaccagagaacagagacgcagtccccaaacgccttgaaccaccaaaagtgaaccagatctaaccaaataccaccggaactgagcagctaaagatagatctcccgattccgtgccacagccaccacttcctctaacccagcctcaccgaaacaccattccaaactgagaacagggctcaagcatatcggacaggaagaagatacaagtggagcaacaaaaggaaagaacaaatcaaacaaaggggtgggggccggcagcagcgacgaaaacagcagattctgctgccggcgaacgagatctaggttaaagaaaccttcttcttttttttcgtagagagagcgagtttttttttttgt

SEQ ID NO: 6923 - DNA, 616 bp, Zea mays
  misc_feature (614)..(616): n is a, c, g, or t
  Probeset Number=SeqID_21326
aaaccacagagagatagagagagaaagcaaaaatggcgatggcgatgttaccggcgctcttctcttctccctcgattctcaccagaagagtcagatgcggagccaccgcgaaaagcggcggcgcactctcgtctgcatctcccgactccgaccctaggagaggcgtctccgtttataaacccaaatcgtacgaagttctagtctctgacgccgcgaactctctcgccttcgctctccaggaatccaaatctcgtttggaaatcgatttcccacctttgcccagtagcatttcttcatacaagggctcttcagacgatttcattgatgccaacatacaactggctttgtctgttgtccggaagcttcaggagaaagtagagactagagcgtgcattgtctttcctgataagcctgagaaacgcagagcttcgcaactcttcaaagcagcgtttgattcgattgatggcataagtatccgttctctagatgatatacctggcacttctgtcaccaatttcttcaggtctataaggagtaccttgggactttgattttgaagatgaaaacgaaggtagttgggagcccaaggagccccccaccccttttattggttnnn

SEQ ID NO: 6924 - DNA, 635 bp, Zea mays
  misc_feature (623)..(635): n is a, c, g, or t
  Peptide Sequence Number=SeqID_10890
  Probeset Number=SeqID_21327
ataaggtctttttaccactccttcccttcaccttctctgatttggattttgtcaatctcatcgattcgattcttctcccaatcaaatctctctccaattctctcatcaggaaagttcaaatttttctccatcattctctctctttggtgctttcccctcgttaaaaaaaaaacgaaaatttgagataaagagaaaccttccatggcagcagctatgagcgagaaggaagctatggttgatcctttcctggtcgaagctcttcagaaccctcgtcatcgtctcacaattctgcgtatggagctggacatacaaaagttctttcaaagcccagagcagcagcaatacgagttccctccttacccaacctcctacctccgcctcgctgctcaccgcgtggcccaccactacggcctcttcaccactgccttagacggtgctgctctagacggctccgggaacaggatcctcgtcaccaagaccggtgagagcagctacccttacgtctgtttgtctgagattcccgtgaagcagcctgaggctaacgggaggaggcctcagggcttcaagctcgccatcaaggcgaggcctaacggagggtctggtgggccgggtggtggggccgnnnnnnnnnnnnn

SEQ ID NO: 6925 - DNA, 706 bp, Zea mays
  misc_feature (641)..(706): n is a, c, g, or t
  Peptide Sequence Number=SeqID_10891
  Probeset Number=SeqID_21328
ttccttgacggtggtcgtactattggtcgtccagacggtattgtcatcaacggaaagtccggaaaaggtgatggatcagacgcaccgctcttcaccttgaagcctggaaagacttacagggttaggatctgtaacgtgggtctcaagacatctatcaactttaggattcagaatcacaagatgaagctcgttgaaatggaaggatcgcacgttcttcaaaacgattacgactctcttgacgttcacgttggccagtgctttggcaccatagttaccgcgaatcaagaacctaaagattactacatggtagcatcctctaggttcttgaagacggttattacgacgaccggacttctccgctacgaaggaggcaaaggaccggcctcttcacagctcccggctggtccggtcggatgggcctggtcgttgaaccagttccgatccttcaggtggaacttgaccgctagtgcagctaggcctaaccctcagggatcttaccattatggaaagatcaacatcacacgcacaatcaagctcgtgaacactcagggcaaggtcgatggtaagcttaggttcgcattgaatggagtctcccacacagaccctgaaactcccttgaagcttgccgagtactttggtannnnnnnnnnnnnnnnnnnnnnnnnnnnnnnnnnnnnnnnnnnnnnnnnnnnnnnnnnnnnnnnnn

SEQ ID NO: 6926 - DNA, 641 bp, Zea mays
  misc_feature (616)..(616): n is a, c, g, or t
  misc_feature (622)..(622): n is a, c, g, or t
  Peptide Sequence Number=SeqID_10892
  Probeset Number=SeqID_21329
atcacgcaatacaaagcatcttgctaacctaatctcgaatctcgaatctcaaatttgtgcttttcacctctagaaagaatcaatggcgcccaaggcagagaagaagcccgcggagaagaaaccagcctccgagaagccggcggaggagaaatccaaagccgagaaagctccggcggagaagaaaccaaaggccgggaagaagctccccaaggaagccggcgcgggcggtgacaagaagaagaagatgaagaagaagagcgtcgagacgtacaagatctacatcttcaaggtcctgaagcaggttcaccccgacatcggaatctcgagcaaagcgatggggatcatgaacagcttcatcaacgacatcttcgagaagctcgctggcgagtcctccaagcttgcgaggtacaacaagaagcctaccatcacttctagggagattcagaccgcggtgaggcttgtgctgcctggagagttggcgaagcacgctgtctcggagggaaccaaggcgggtacgaagttcacgagctcttgagctatgaggtagggtttttctccttggttcgaatgtctgaattagataatggcccatgtttgatttttccagttttcacgnttttgnaaagtatcgtaatgatatg

SEQ ID NO: 6927 - DNA, 624 bp, Zea mays
  misc_feature (624)..(624): n is a, c, g, or t
  Peptide Sequence Number=SeqID_10893
  Probeset Number=SeqID_21330
aaaaaaaaagggatatcttgtgatatattcttcatcttcttcgcattggtgtcccctttagctcagaatcagatccgcttccttcgtcgaggtctctttcggatcagcagagaaagaaagctctctttcattcttactattcagcttccggctttcaagaaatcaccaaatggacggaggtggtgacgtggcaacgcctgtacaaaagcgagcacacgaggcgtggaggctttacaaatactatctcgacaagacgacacctcactcgacctacaggtggatcggcacgctcgtcgtcttcctcatctactgcttgagggttttctcaattcacggattctacatcatctcatacggcctcggcatctacctcctcaacctcctcatcggcttcttgtcccctctcgttgaccctgagctcgatgcctctgatggtggtgcttctctccccactcgtggctctgatgagttcaagccctttatccgccgactccctgagttcaaattctggtactccatgactaaggccttcggcattgcctttccgataacgttcttcccgggctttgggggtcccggcttccgggcgaaacggtttttgaacggggccggcccctttggccn

SEQ ID NO: 6928 - DNA, 576 bp, Zea mays
  misc_feature (549)..(549): n is a, c, g, or t
  misc_feature (576)..(576): n is a, c, g, or t
  Peptide Sequence Number=SeqID_10894
  Probeset Number=SeqID_21331
aatcaacgatctcctccttcctctgctcgattccttaccaggcaaagagagatctgagatttgggtttctatggcggtttcaaatgccttggtgggttgcccaaagcttgagactttattgaatctatcgtctacgtctactttgcaaacaccattgggtctcattggtgttccgaggaacaacagaaccagacgtggtctcatccatagagcacgttgcgagctttctccgtctgattctgcaaccatctctgctctcgaacaactcaagaactctgcgcccgacagatatacaaaggagagaagtagcattgtggtgattggtctcagcattcacacagctcccgttgagatgcgtgagaagcttgctatccctgaagctgaatggccccgagctattggtgaattgtgcggtttgaatcacatcgaagaggctgctgtcctcagtacttgcaaccgtatggagatttatgttttggctctttctcagcaccgtggagtcaaagaagtcactgaatggatgtctaagacaagtggaatcccagtttncgagatatgtcagcaccgttttctgcn

SEQ ID NO: 6929 - DNA, 597 bp, Zea mays
  Peptide Sequence Number=SeqID_10895
  Probeset Number=SeqID_21332
aagtcttgttcactcgatgtattgatctcaaacccagattcggtacaactccggcgagtttccccacctcttccgttctcaatccagcgacgcttctatttcttgatgaccacagtagcctccggcttcgtatctttctcgctggcgctgaatctggagagacaaatcgaccaagattcatcaaatctccttcttacactacctgttttctctaaccacctctccaattcaatagattttcaggccaaatctcgacggtcatgtcccaacatccgaactcagtctgcatgtcttcccgtggtttcagcatcgttaacccaaatcgaagtagacacaacaacaacaacaacaagcctctgttcaagtattgtctcgtcaaaaccaatctcggaggccttgcttaacatatctctagcagatctggatccaggaactgcaaagcttgcgattaggatcttgggtactgccttatcagctttcgggtttctctttattttgaggattgttatcagttactccaagagagctgatgcaactgcagatttgagtggtgctattgaggcaggaaacaatgagacattgagaagtgcagcaaaa

SEQ ID NO: 6930 - DNA, 597 bp, Zea mays
  Peptide Sequence Number=SeqID_10896
  Probeset Number=SeqID_21333
ttttgctgcacttctcaatgtctcattgtttcctgcctcaatagcaccactcaaatctgcagttgcatcagctctcttggagtaactgataacaatcctcaaaataaagagaaacccgaaagctgataaggcagtacccaagatcctaatcgcaagctttgcagttcctggatccagatctgctagagatatgttaagcaaggcctccgagattggttttgacgagacaatacttgaacagaggcttgttgttgttgttgttgtgtctacttcgatttgggttaacgatgctgaaaccacgggaagacatgcagactgagttcggatgttgggacatgaccgtcgagatttggcctgaaaatctattgaattggagaggtggttagagaaaacaggtagtgtaagaaggagatttgatgaatcttggtcgatttgtctctccagattcagcgccagcgagaaagatacgaagccggaggctactgtggtcatcaagaaatagaagcgtcgctggattgagaacggaagaggtggggaaactcgccggagttgtaccgaatctgggtttgagatcaatacatcgagtgaacaagactt

SEQ ID NO: 6931 - DNA, 583 bp, Zea mays
  Peptide Sequence Number=SeqID_10897
  Probeset Number=SeqID_21334
aagtgctccaatcattattccagcgatgatgaaagcaaaccagaaagcgaaaccacacgcgccaccgcgtcctctcttctcctgcggcttcttccgccgctgcacacagtccgtcctcagtccaacctctcctcaccgtaagccgaccaccaccccttcctcctcttcgtcctcatcaacctccacctctcaaagcttcactcaatggcgtttcccgcatcacgctgaccaaactccatccaccgtcactcttcctcccactcctccccctccgccgcctcttccggtcgccaccactctccaagaaacgttccagatcgctgagcttcacctcgcatccgtctcccagtccgacaagctcctcgctctccagctgctcgagcgagtcgtcgtacccgacccgccgtcgaatccgacttgcccgccgggtctcatgcgaggcctcgtctcttgcctccgcagcaacaacatcgtaacccgccaaatacgtcaccaagatcctcctcgcgctctgcctcgccgaaggtaaccgacaagtggcggtcgaggcgggagccgctcgagcggtggtggagactgcgcc

SEQ ID NO: 6932 - DNA, 559 bp, Zea mays
  Peptide Sequence Number=SeqID_10898
  Probeset Number=SeqID_21335
aagaattcgaaaaaagccagatctagatccaccttaaggagagcgtcttcatacacgcccttccgtctcttcctcctcctcgcgaatcttgttttctacagatctattcttctccgaaaacgaaaatgagggagtgcatctcgatccacatcggtcaagctggtatccaagtcggaaacgcctgctgggagctttactgccttgaacatggcattcagcctgatggccagatgccgagtgacaagaccgttggcggaggtgacgacgctttcaacaccttcttcagcgaaaccggcgcggggaagcacgtcccacgcgccgtcttcgtcgaccttgagcccaccgtgatcgacgaggtcagaaccggtacttaccgtcagctcttccaccctgagcagctcatcagcggtaaagaagacgcagctaacaacttcgcccgtggccattacaccattgggaaggagattgttgatctgtgcttggaccgaatcagaaagctcgctgataactgcactggtctccaaggcttcctcgtcttcaacgctgttggtggaggaac

SEQ ID NO: 6933 - DNA, 653 bp, Zea mays
  misc_feature (648)..(648): n is a, c, g, or t
  misc_feature (653)..(653): n is a, c, g, or t
  Peptide Sequence Number=SeqID_10899
  Probeset Number=SeqID_21336
gttcactagcttcgaagtttctttcgaatagttaaaaaaaacaaacaatggcgacggttcagttcttcaaccaattcccctgccaaacccgagtccaaagcccatcaaactcaaaacccctctccaagccaccgtcttcgctggtgccaatgagcgcgctcactcgccgtccgtcgttttcccccggagaaatcgccgtttctcgttctgatttcagagtcagagtcatcgatgcggaagacgagttggatccggagacgagtgagggaggaggatctgctctattgatggcggaggaagcaatcgaatctgtggaggaaacggaggctctcaagagatcgctggtggattcgttgtacggcacagaccgagggttgagcgcatcgagcgagacgagagccgagatcggagatctaatcacacagctcgagtccaagaaccctacaccagctcccaccgatgctctcttccttctcaacggcaaatggatccagattaagttcgaggaaaggtgtgatcggcactcctcagctaacggattcgattgagatcccggaggttaggttggagtttcttgggtcagaagattgatcttacttccggaatcagaggggttgcttacatcggtccagacacgccggcctccgntctgn

SEQ ID NO: 6934 - DNA, 610 bp, Zea mays
  misc_feature (597)..(597): n is a, c, g, or t
  misc_feature (601)..(610): n is a, c, g, or t
  Peptide Sequence Number=SeqID_10900
  Probeset Number=SeqID_21337
gttcactagcttcggagtttctttcgaataattttttaaaaaaaaacaatggcgacggttcagttcttcaaccaattcccctgcaaaacacgagtccaaagctcagcaaactcaaaacccctctccaagccaccgtcgctggtgccgacgagcgcgttcactcgccgtccgttgttctcccccggcgaattcgccgtttctcgtgcggatttcagagtcagagtcatcgatgcagaagacgagtttgattcggagaggagtgagggaggatcggctctattgatggcggaggaagcaatcgaatccgtggaagagacggaggttctcaagagatcgctggtggattcgttgtacggcacagaccgagggttgagcgcatcgagcgagacgagagccgagatcggagatctaatcacacagctcgagtccaagaaccctacaccagctcccaccgatgctctcttccttctcaacggcaaatggatcctcgcgtacacatcgtttcgttggtttgttcccgttgctttccacgagggatcgtgccgttagttaaagtcgacgagatctcacagacgattgattcggaaaacttccggncgannnnnnnnnn

SEQ ID NO: 6935 - DNA, 648 bp, Zea mays
  misc_feature (601)..(648): n is a, c, g, or t
  Peptide Sequence Number=SeqID_10901
  Probeset Number=SeqID_21338
aaaaaaagaagtggccgacaacgtttcagatcgccggcggagtctcagatcccccacgttaccatcctccgaagattgtaacttttctacaaatctacgcttttgtacgttgacttcgaaaaactggtggttataagtcaaaatctctctctctctatatctctcgtcttctttgcagaaaccttttattccgatccaataaaaactctacaatggcagacaccacaggatccggttcgtttatgtcggagaaatccgcaaagatcttcgtcgctggacacagaggacttgtcggatccgcaattgtccgaaaactccaagaatccggtttcaccaatctcctcctccgaacccactccgacctcgacctcactaaccaatccgacgtcgaatccttcttctccacagagaagcctgcttacgtcatcctcgccgcagccaaagtcggtggcatccacgccaacaacacctacccagccgacttcatcgccgtcaatctccaaatccaaaccaacgtgatccactccgcttacactaacggcgtcgagaaactcctcttcctcggctcctcttgcatctaccccaaagtcgctcctcagcnnnnnnnnnnnnnnnnnnnnnnnnnnnnnnnnnnnnnnnnnnnnnnnn

SEQ ID NO: 6936 - DNA, 572 bp, Zea mays
  misc_feature (564)..(564): n is a, c, g, or t
  Peptide Sequence Number=SeqID_10902
  Probeset Number=SeqID_21339
ctttttcgcattagcgacaaatcccccttttctagggcgtcacgatgcagcagccaccacaaaacgccgccggagcagggcagcagatcccttctgaccagcaagcctatcaccagcagcaactctcgtggatgatgcaacagcaacagggccagcaatggaaccagcagtcagcgccgtcacagggtcaacagccctacggatctcagaatccaggatccgataacgagattcgctccttgtggatcggcgccttgcagccgtggatggacgaaagctacatcatgaccgtcttcgctcaggccggcgagggttcaatcggctaaagtgattcgcaataaactgactggtatgtgcgagggttacggatttcgttgagtttgccaaccacgctgcagctgagcgtgtgttgcagacctacaacggtactcagatgcctaactctgaccagacctttaggctgaactgggctcaggccggggctggtgagagacgccaagctgaagggcctgagtacactatccttgggggcgacctggctcctgaaagtactgacttcatgcntcgcgaga

SEQ ID NO: 6937 - DNA, 568 bp, Zea mays
  Peptide Sequence Number=SeqID_10903
  Probeset Number=SeqID_21340
ctagtttttctaatcggtttgcgcgagagagtttagagtgtaaaacggcgagagcttctctcatcttctcactcaggcagcttctattccaaccgaacaatgtcgctggtagcaaacgaggagttccagcacattctgcgtgtgctcaacaccaacgtcgatggcaagcagaagattatgtttgctcttacctccatcaagggtattggaaggagactagccaacattgtctgcaagaaagccgatgtcgacatgaacaagagggccggtgagttgtctgcagctgagatcgacaacctcatgaccatcgtagcgaacccgaagcagtacaagattccagactggttcttgaacagacagaaggactacaaggatggaaagtactcccaggttgtttccaatgccctcgacatgaagctcagggatgatcttgaacgcctcaagaagatcaggaaccaccgtgggctgaggcactactggggtctccgtgtccgtggacaaccaccaagacaactggtcgcagaggaaagactgttggtgtctctaagaagcgttaagagaatgatgt

SEQ ID NO: 6938 - DNA, 611 bp, Zea mays
  misc_feature (601)..(611): n is a, c, g, or t
  Peptide Sequence Number=SeqID_10904
  Probeset Number=SeqID_21341
gagcgtgtttaacagtctcaaatagtctaaccagaagaagaagatcatagcaacaatggcttcaagctctgcgtctcttctcaaagcctcaccggtgaaatctgattgggttaagggacagagtctcctcatccgtcaaccatcctcagtcgcagctatccgcagcaacgcagcaccttccgctctcaccgtccgtgcggcctcttacgccgacgagctcgtcaaaacagctaaaacaatcgcgtctccgggacgcggaatattggcgatggacgagtcaaacgcgacttgcgggaagcgtttggcgtcgattgggctagagaacacggaggctaaccgtcaggcttaccggacgctgcttgtgtcagctccgggattgggacagtacatctccggagctatcctcttcgaggaaactctctaccagtccaccgttgacggcagaaaaaatggtcgatgttctggtcgaccagaacatcgtccctggaatcaaggtcgacaaggggtttggtgcccgcttgttgggtctaacgacgagtcatggtgccagggactccaccggttggcctctcgtaccgctgctactacccaacaggtgctnnnnnnnnnnn

SEQ ID NO: 6939 - DNA, 690 bp, Zea mays
  misc_feature (462)..(462): n is a, c, g, or t
  misc_feature (601)..(690): n is a, c, g, or t
  Peptide Sequence Number=SeqID_10905
  Probeset Number=SeqID_21342
aaagtctcgaatcgcttctgcagccgtttccttccgtcagccgcagccatggtgaagttactcgcaagagcctgacaatcagaccaagtcttgcaaggctagaggatccgatcttagggttcacttcaagaacactcgggaaacagcgcacgctatcaggaagctaccattgctcaaggcccagaggtaccttgaggatgtgatagctcacaagcaggctattcccttcacccgtttctgcagaggtgttggaaggactgctccagccaagaacaggcactccaatggtcagggacgttggcctgctaagtctgctcagtttgttcttgatttgctcaagaatgctgagagcaatgctgagagtgaaaggtttggatggtgatgccctctttatttcgcacatccaagtgaccaagctgccaagcaaaggaaaaaggacttacccgggtcatggaaagatcnacccttacatgggccacccatggccatttgaactaatttttctgaaaaagaaaaagtctgccaaaaaaagcccggaacccctttgggcgcccaagccaaaaaaacccccgcccaaactttcttgggtttttaactcccnnnnnnnnnnnnnnnnnnnnnnnnnnnnnnnnnnnnnnnnnnnnnnnnnnnnnnnnnnnnnnnnnnnnnnnnnnnnnnnnnnnnnnnnnn

SEQ ID NO: 6940 - DNA, 579 bp, Zea mays
  Peptide Sequence Number=SeqID_10906
  Probeset Number=SeqID_21343
acacatcaaagcatcacacacacacacaaacacacactttctcttctcttcttttgatcttttcctcttttctacacattcaaatggccactgctgatgttgaacaagtgactccagccgcagctgagcacgtcgagatgacaccaccaaagacagtggagcctgaggaaaccgccgccgccgttgtgaccgagtctgctccagctcaggtaacagaaactgaagctcccgtggaagaaacagagaaaccaaccgaagaagcagatgaaaccaaaaccgagacgaaagaggaagaagctccagtcgaagtaaccacaaaagacctccccgtcgaagaaacagagaaaccagctgaagaaacagaggaggccaaaacagaaactgaagagatcaagaaagaggaagaagctcccgtggaagtaaccactaaagacctccctgttgaagaaacagaggaaatcaagaaagaagaagaagctccggcggttgtggaggaagagagcaaaacagaggaagttgtagagcctaagaaagaggaagaagctccggtggtcgtggaggaagagagcaaagcagagg

SEQ ID NO: 6941 - DNA, 579 bp, Zea mays
  Probeset Number=SeqID_21344
cctctgctttgctctcttcctccacgaccaccggagcttcttcctctttcttaggctctacaacttcctctgttttgctctcttcctccacaaccgccggagcttcttcttctttcttgatttcctctgtttcttcaacagggaggtctttagtggttacttccacgggagcttcttcctctttcttgatctcttcagtttctgttttggcctcctctgtttcttcagctggtttctctgtttcttcgacggggaggtcttttgtggttacttcgactggagcttcttcctctttcgtctcggttttggtttcatctgcttcttcggttggtttctctgtttcttccacgggagcttcagtttctgttacctgagctggagcagactcggtcacaacggcggcggcggtttcctcaggctccactgtctttggtggtgtcatctcgacgtgctcagctgcggctggagtcacttgttcaacatcagcagtggccatttgaatgtgtagaaaagaggaaaagatcaaaagaagagaagagaaagtgtgtgtttgtgtgtgtgtgtgatgctttgatgtgt

SEQ ID NO: 6942 - DNA, 1014 bp, Zea mays
  misc_feature (999)..(1014): n is a, c, g, or t
  Peptide Sequence Number=SeqID_10907
  Probeset Number=SeqID_21345
ataaaacaaaacaaaaaacaataaaacaataaaaataaataaaaacaaaaatgggttcatatttaggaatttatacaattttggttctatgtttgctgggatattcagccaatgctgaggtgttcaccgttggtggtcctccaggttctgatattactgcggctcttcttaaagcgttcacatcagcatgccaagcccctgcaccgagccaggttctgatcccaaaaggtgacttcaagcttggtgagatcgctatgactggtccatgcaaatctccagtggagttcacccttcaaggcaatgtcaaagctgacggtggctcaacgcagggaaaggataggtgggtcgtcttcgaaaaaatcaatgggtttaagctaaacggaggtggaacatttgacggtgaaggcaatgcagcttggaaggccaataactgccacaagacttttgagtgcaaaaaacttcccatcagtgtaaggtttgattttgtggataacgctgagataaaagacgtaacctcgttagatgccaaaaatttccacttcaacgttatcagcggcaagaacatgacctttgataacatcaagatcatcgctccagctgaaagccccaacactgacggtatccatttgggaagatgtgagggagtcaagatcctcaacactaagatcgccacaggagatgactgtatctccgtgggagatgggatgaagaatctcctcatttgagaaagttgtgtgccgtccaggacaccgaatcaagtgttggaagccttggaagggacggatgggagccagatgtcactgacattacggttaagaactggaccctcgagggaaccgacaacggtctgaggatcaggacatggccatctgccgcttgcaccaccaccgctgccgggattcattttgtaggatatctcccttaacaaagttagcaaacccattcctcttcgaccaggaggactggcccttggaaccatggcaacaagaacaaaccatnnnnnnnnnnnnnnnn

SEQ ID NO: 6943 - DNA, 580 bp, Zea mays
  Peptide Sequence Number=SeqID_10908
  Probeset Number=SeqID_21346
gcgttatccaaacacacacttctcagtcctttcttggcgatagaaatggcttctcaatcttttactttggcgaatctaaggatctcccaaatcgattccttctacagtcagaaaccatcttctccaatacacttcttctccactagaaatccagtaaaatccctgaacctgacgaatccatggatggccggtgattcttctctctctctcgattcttccgcctccgtcttgcgaactaactcgacaacgcgcagaaagatcccaatcgccgtcgttgccagcttacccaccgcgaatccagaatctgcggtttctgatgcgaaaaagccaaaatggtcgtggagaggaatcatatcatttgcaatgggagagctcgaagctaggaagctcaagtatcccaacaccggtactgaatcacttctcatgggtatcttgattgaaggaactagttttacttccaagtttttgagggcgcataagataacgctttacaaagttcgtgaagaaacaatcaagtactagggaaagcagatttgtattccttcagccctgaacatcctccctttcccccacgcgcaaa

SEQ ID NO: 6944 - DNA, 558 bp, Zea mays
  Peptide Sequence Number=SeqID_10909
  Probeset Number=SeqID_21347
acgcactttaacatcttttaaacacatcaccgaacaggtctctctcacacctatctatcaaaatgggttcttcttctacagctcaagaagagcctcaactagtagatacacctgccattgttccttctccgttagctcaggaacctgacaacgatgtaccggcgccgggaaaccagtttgctgagttcgccgccggttgcttctggggggtggagcttgcttaccagaggatccctggcgtgacagagactgaggttgggtacactcagggtatctctcacaatccttcttacaaggatgtctgcaccaacacaacgaaccatgcagaggttgtaagggttcagtatgatcctaatgagtgcacctatgagactcttcttgatttgttctggtctaggcatgatcccaccaccttgaatcgtcagggaaaacttgtgggagctcaatatcgttcaggtatatacttctacacgcccgagcaagagaaactagcacgcgagtctcttgagaaccaacagaagaaactggagaagaagattgtgagtgagatattaccgg

SEQ ID NO: 6945 - DNA, 638 bp, Zea mays
  misc_feature (596)..(596): n is a, c, g, or t
  misc_feature (598)..(598): n is a, c, g, or t
  misc_feature (601)..(638): n is a, c, g, or t
  Peptide Sequence Number=SeqID_10910
  Probeset Number=SeqID_21348
atcaccatccatcacatcgttttcttcgtcgaaaatcaatttaaaaagcaaaaaaaaaagaaggaagaatcgtcttcttctcttcaaacgaacgccttctcagatatcctctttgcacacccgattagcccagcgatcatggctcaaaccgatctcaatcagccgaaactcgatatgactaaggaggagaaggagaggttgaagtatttggagtttgttcaagctgctgctgttgaagcagtgcttcgctttgctctcatttacgccaaggctaaggacaagtctggccctttgaagccaggtgttgaatccgtcgaaggagctgtcaagactgtcgtcggtcctgtctaccagaagtaccacgacgtacccgtcgaggttctcaaatacatggaccagaaggttgacatgtctgtgaatgaacttgaccgccgcgtcccaccagtggtcaagcaagtctctgcccacgccatctcggctgctcagatagcacccgtcgtggcacgtgccttcgcctccgaggttcgacgtgctggcgtcgtggaaaccgcctccgggatggctaagtccgtctacaccaagtacgagcccgcagncnagnnnnnnnnnnnnnnnnnnnnnnnnnnnnnnnnnnnnnn

SEQ ID NO: 6946 - DNA, 638 bp, Zea mays
  misc_feature (601)..(638): n is a, c, g, or t
  Peptide Sequence Number=SeqID_10911
  Probeset Number=SeqID_21349
acattttaaactctcttttttgtaatgacaggttgcttcagcttctctgaagtaatagaaggggcttacagatacgggttcaaaagatccggtatacgacccgtaaccatcgacttgaaagacggaaccgtggtccatttctgggtatccaagacccgagacgagtccaaacccaacctcctcctcatccacggactcggagcttctgccatctggcaatggtacgacgtcgcacgacgcctctctcctcatttcaacctcttcatccccgacctcgttttcttcggcggatcctccacgacccgacccgaaagatccgacgttttccaggcccagacgcttatgcgggccttagaggcccagtccgtgaaacgtttcagcctcgtcggtcttagctacggcgggttcgtcggttaccgaatgccgtcgatgtacggagacgccgttgagaagggggtgatatgctgcgccgccgtgtgcgtggaggagatgacatgagggaccgcgttttcgccgtctcggatcttgatggagctcccaagatccccgtggcggagtctggtgaagagctacgggaacttatcggttacatctctacaannnnnnnnnnnnnnnnnnnnnnnnnnnnnnnnnnnnnn

SEQ ID NO: 6947 - DNA, 637 bp, Zea mays
  Peptide Sequence Number=SeqID_10912
  Probeset Number=SeqID_21350
gttacaatctgcccccaaaaaatcgatctctggtctcaactatcgatttccaggcatctacaaatggctgtatgcaccaaactcggggttttacagaacagaaatgttccagtgacatcaatgctccgctacatgtccacaaaacttttcattggtggcctatcaccaggaactgacgaccagtccttaaaagatgctttctctaccttcaatggagtgacagaggcaagagtcatgacaaacaaagtgacgggaaggtcaaggggttatggatttgtcaatttcacaagtgaggattctgccaaatctgctatttcagctatggatggacaggagttgaatgggcgtaacatccgcgtggatgttgcaaaagaatggccgagcttgccgttttcttcggttgaaggtacagaagatgagaagaaaggcaataagatggtgagccgatctgtatggaaagatccgttcgttgacgccttcttgatgaagaagaaaaacgcagctctgaacaggaaatatggtccagggagtcgacgattctgccagagtatggtgattcgtcggtgagaatctaacatggcaaaactcacgtgcgttgtaagatcacagaagggaaaagttggcataagtttggaga

SEQ ID NO: 6948 - DNA, 427 bp, Zea mays
  misc_feature (404)..(404): n is a, c, g, or t
  Peptide Sequence Number=SeqID_10913
  Probeset Number=SeqID_21351
aaagtttgagcttttccccggggactcgaatttcatttttccgatttgcctccgccaagctgaatccaagagagacaatgggagctttcgcatctagattttggttcatgatgttccctgcaaaagagtacaagattgtcgttgtcggtttggacaacgccggtaaaacgacgacgctttataagcttcacttgggtgaagttgtcactactcatcctaccgtcggaagtaatgtcgaagagctcgtttacaagaacatccgcttcgaggtgtgggatcttggtgggcaagataggctgagaacatcgtgggcaacgtactatagaggaaccaacgctgtaatcgtggttatagatagcactgacagggccagaatctctctcatgaaagatgagctgttcagnttactggggcatgaggcatcttc

SEQ ID NO: 6949 - DNA, 703 bp, Zea mays
  misc_feature (649)..(649): n is a, c, g, or t
  misc_feature (655)..(703): n is a, c, g, or t
  Peptide Sequence Number=SeqID_10914
  Probeset Number=SeqID_21352
acagaaaaaagcttagagctctgctagcagtaatggcgggtttggcaatttcacctcctctgagtcttaccttctcttctcgaactagaaacgctaaacccacttcgtatctatctcgcaatcaaagaaatcttacaaggcgtatagtttctgctcttccaagcccgtatggtgattcactgaaagctggactttcgagtaatgtctctggcaacaaggatcctcgtaacattgctccaagatctggagttatagtggcgaagaaaggaaacccgcctgtaatgccatcagtgatgacccctggaggacctttggacctctcttcagtgttattccgtaaccgcataatcttcatcggacaaccaatcaacgcacaggttgctcagcgtgtcatatctcagcttgtaaccctcgcttctattgatgataaatccgacatcttgatttacttgaattgtcctggaggcagtacttactcggtcttagcaatctatgactgtatgtcttggataaagcctaaagttggaacagtagcgtttggagtagcagcgagtcaaggagcacttcttcttgctggaggggagaaaggaatgcgctacgcaatgccgaacactcgtgtcatgatcctcccttcccactcgggatgtgnaggacnnnnnnnnnnnnnnnnnnnnnnnnnnnnnnnnnnnnnnnnnnnnnnnnn

SEQ ID NO: 6950 - DNA, 632 bp, Zea mays
  misc_feature (624)..(632): n is a, c, g, or t
  Peptide Sequence Number=SeqID_10915
  Probeset Number=SeqID_21353
acggttcctgtcctaaaagaggctctttcttctttccagcttccaagttgtttgctgttggcaatggcgaggataaagcctcaggctcttcttaatcaaagcaagaagaagaagggtccaagtcgtataagtatctccacgattgtcgtgtgtaatcttgtagttgctgtagtcgtactatccttggtcactacttaccgccattggtcccagaggtcaataaacgttattgaaacccagagtcaaagattcgaggacacaaatgctgcttcagaacaaaagagttacgatcttcctggttatgccgatataagcacatcaaaaggtctcataactgtggaactctttaaagatgcttcccctgaagctgtggaccggtttctagatctatgtcaaaaagatcacttcaagggaatgccgtttcatcgggttataaaaaactacttggtaacaagctggtcactcccagagctccatacctggttgaagaatggacatctaaaggaaagctccgtggtcgccttaacactagcccaaaacatgaggcatttctgtggttggggaccccccaaaaaccacagggggaacaacaaccaacaagggacttcccgcctctcatcacannnnnnnnn

SEQ ID NO: 6951 - DNA, 633 bp, Zea mays
  Peptide Sequence Number=SeqID_10916
  Probeset Number=SeqID_21354
atcttccaagaaagtcttcattttaccaattatttgctcaggagggagaagagagtcagggaagcaatggcaaagatgcagttttcaatctttatcgccgtcgccttcatcgtcttctctgcatcaacaaacgccaaaaccgcgagcccaccagctccaatgctaccaccgacacccgctccagcaccggccccacaccacgtgaatctcacggagcttctaagcgtagctggtccgttccacacgttcctcgactacctcctctcgtcaggagtcatcgaaacattccaaagccaagccaacaacactgaggaaggcgtcacgatcttcgtcccaaaagacgatgctttcaaggctcagaagaatcctcctctgtcgaacctcaccaaggatcagctcaagcagctcctccctctcccacgctcttcctcactactactctctttccgagttccagaacctgagcccatccggccccggtagcactttcgccggtggacagtacccttttgaaggtcactgatgtttccggtaaccggtcggatcgagacgcctctggaccaggactaaagtccccagcagcggtttctccaccgaccccgtggcggtttaccaagtgaaccgggtgctttt

SEQ ID NO: 6952 - DNA, 634 bp, Zea mays
  misc_feature (634)..(634): n is a, c, g, or t
  Peptide Sequence Number=SeqID_10917
  Probeset Number=SeqID_21355
ccctttcgtcgtcgttttcttcttcaatcagacttttccaatcgccgacaccgttttaacttcgatggttccgtcaccgttaaacccgcaacagatccaacaattcctctcctccgtcctctcacagcgcgggcccaactccgtcccctacgacgagtccaccaagtggctaatccgccaacatctcctcaacctaatctcatcctacccttccctcgagcccaaaacggcgacgtttatccacaacgacggccgttccgtaaacctcctccaagctgacggaaccatcccgatgccttaccacggcgtcacctacaacatccccgtcatcatctggctcctcgagtcctaccctcgccaccctccttgcgtctacgtgaaccccaccgccgacatgatcatcaaacggccccacgcgcacgtcaccccctcggggctcgtctctctcccttatctgcagaactgggtttaccctagctccaatctcgtggatctcgtctccgatctcggcgccgccttcgctaacgatcctcctctctactcccgccgccgtccggggccttcaccgactcccgcgccgtacgagacacgcccccctcctcctccgacgggtgatcagagaccgttcccgccn

SEQ ID NO: 6953 - DNA, 537 bp, Zea mays
  misc_feature (262)..(262): n is a, c, g, or t
  misc_feature (519)..(519): n is a, c, g, or t
  misc_feature (535)..(535): n is a, c, g, or t
  Peptide Sequence Number=SeqID_10918
  Probeset Number=SeqID_21356
gaaaggattcggattctctgtcaattagggaagagaagagaagttatcagcagtattgggataagatagatagatgagttcatctctacctatgaggctcctcgtgcctctcacacttcccttgattcctcctcctccttcttcttcggattctctagcgctcagatcgaaaaatcctaactttagtctccgatcctcttcttcttgtacctcttgctcttcttccctgtggcagctattcccccggagatccagatcctcnttctccttgtgttcccatgtgcacgaaagatcaagacaggacagatattttgagaaatgaagatggatctagttacgtgtgggcttgaatctgatgaagattccggaggcctccggattcctactcaggctcaggccatcgtggaaggagcaccgcggtcacagtggctgtctctgagctcaaaccttcccctgggatgttgattacattcaagagctactggcgatacagcagcaagggcctagaaccattggggncttttttggacagggnaa

SEQ ID NO: 6954 - DNA, 537 bp, Zea mays
  misc_feature (3)..(3): n is a, c, g, or t
  misc_feature (19)..(19): n is a, c, g, or t
  misc_feature (276)..(276): n is a, c, g, or t
  Peptide Sequence Number=SeqID_10919
  Probeset Number=SeqID_21357
ttnccctgtccaaaaaagnccccaatggttctaggcccttgctgctgtatcgccagtagctcttgaatgtaatcaacatcccaggggaaggtttgagctcagagacagccactgtgaccgcggtgctccttccacgatggcctgagcctgagtaggaatccggaggcctccggaatcttcatcagattcaagcccacacgtaactagatccatcttcatttctcaaaatatctgtcctgtcttgatctttcgtgcacatgggaacacaaggagaangaggatctggatctccgggggaatagctgccacagggaagaagagcaagaggtacaagaagaagaggatcggagactaaagttaggatttttcgatctgagcgctagagaatccgaagaagaaggaggaggaggaatcaagggaagtgtgagaggcacgaggagcctcataggtagagatgaactcatctatctatcttatcccaatactgctgataacttctcttctcttccctaattgacagagaatccgaatcctttc

SEQ ID NO: 6955 - DNA, 639 bp, Zea mays
  misc_feature (556)..(556): n is a, c, g, or t
  Peptide Sequence Number=SeqID_10920
  Probeset Number=SeqID_21358
aaggatacatttagaaacagacaaccgctgataaacatgaggacggaggagaaagaagaaggagaagaagaagaagaagaacaacaacaatggccatcatcaagatcagctcacgaggttttactaattgttcttccatatctccactcactcttcgagcttctctccatgaccggcgtttcacgctccttaagagacgcgatcagagacgaaacagctttatggacaaagatcgttgttgaaccacccctgcgttctcgtctaaccgatgatattctacgggagatcacttccaaatccgccggaaaattaaacactctgattctccgacagtgtcttaggatcaccgacaagggacttcgacgtgtggtggacgcaaatcctctgataagaaagataattgtgcccggatgcactgaactgactccagaaggaatcattggatgcgttgaaagcttagccaccgtggagacacttcacatccacggcgtacatcgcttcactaaagaccatctctcagcactctccacttaccttcctcacgggggcgccatangatgtcgaggtctgtcccaaatgtgacctagtcaagatgattccctcatgctccagagcgtcatgtaacggtgggagaaggaa

SEQ ID NO: 6956 - DNA, 671 bp, Zea mays
  misc_feature (1)..(40): n is a, c, g, or t
  misc_feature (650)..(650): n is a, c, g, or t
  misc_feature (652)..(671): n is a, c, g, or t
  Peptide Sequence Number=SeqID_10921
  Probeset Number=SeqID_21359
nnnnnnnnnnnnnnnnnnnnnnnnnnnnnnnnnnnnnnnngtcgcggatctctatctctctctctccctctctcgattccgaaactattccgcagagtgaagaaggatggggttgtctttcgggaagcttttcagcaggctttttgccaagaaggagatgaggattctgatggttggtcttgatgctgctggtaagaccaccatcttgtacaagctcaagctcggagagattgtcaccaccattcccactattgggttcaatgttgaaactgtgcagtacaagaacatcagcttcacagtctgggatgtcgggggtcaagacaagattcgtccgttgtggaggcactacttccagaacactcaaggtctcatctttgtggtggacagcaatgacagagaccgtgttgttgaggctagagatgaattgcacagaatgctcaatgaggatgagctgcgtgatgctggtctgctcgtgtttgctaacaagcaggatcttcccaatgccatggacgcagctgagatcaccgattagcttggcctccactctcctcggcagcgtcactggtacatccagagcacatgtgccacttcaggcgaggggctttacgaaggtctggactgggtgccccacacatcgcgcgcagggcgangnnnnnnnnnnnnnnnnnnnn

SEQ ID NO: 6957 - DNA, 581 bp, Zea mays
  Peptide Sequence Number=SeqID_10922
  Probeset Number=SeqID_21360
aataatttctgcaagatcatcaaaagctgatacaccaagctggttataaactctactttctcagtttcagacatacaaaaacaacagaaaaatgggaacagagatggtcatggttcacgaggttccttttcctccacagatcatcacttccaagcccctctctcttcttggccaaggcatcactgacatagagatccatttccttcaagtgaagttcacggccataggagtttacttagatccttcagatgttaaaacccatcttgacaaatggaaaggcaagaccggaaaggatcttgccggcgatgacgacttcttcgacgccctggcctccggggagattgagaaagttataagggtggtggttataaaggaaataaaaggagctcagtacggagtgcagctagagaattcggtgagagatcgtttggctgctgaggataagtacgaggaggaagaagaaaccgagctcgagaaagttgtgggattttttcagtctaggtacttcaaaactcattccatcatcacttaccgtttctcagccaaagatggaatttgccagatcgggttttgaaaacgaa

SEQ ID NO: 6958 - DNA, 575 bp, Zea mays
  Peptide Sequence Number=SeqID_10923
  Probeset Number=SeqID_21361
ctcggcaacgaagcaaaagaaaaaaaaagtagttgtctctctctggatctagctgcgcaacattgcagctgatacttgcttgttaagctatggtgacgatccggagcgtttcagtgtttatccttgttctactcgctatatcatccctggctttggttgcgaacggggaagacaagacgattaaagtgaagaaagtgaaggggaaggaggtgtgcacgcagggatgggaatggtgtctggtggtccgagtactgctgtaaccagaacatatcagattactttcaggtttaccagtttgagcagctctttgccaaaagaaacactcccatagctcatgctggtggtttctgggactaccagtccttcatcaccgccgctgctctcttcgagcctctccggtttggtaccactggtggaaagctcatgggacagaaagaaatggctgccttcctccgtcatgtcgccagcaaaacttcctgttggatacggagtcgcgacaggagggcctttagcttgggggctgtgctataacagggagatgagtccaatgcaatcttacggtgacgagactggaa

SEQ ID NO: 6959 - DNA, 640 bp, Zea mays
  misc_feature (571)..(571): n is a, c, g, or t
  misc_feature (601)..(640): n is a, c, g, or t
  Peptide Sequence Number=SeqID_10924
  Probeset Number=SeqID_21362
gaaaagaaacaaaatttgcttctctgttagctcaaagatcaaccatggaagctaccgccctaagctctgcggccaccatcgtctcttcctcatcttcgtcgctatccatcttctctccgaagaagagaacatactcatcttcgccaagaatcgtccggctttctaagagtaaacaaccttacgcataatatgctatttcattgcttacgatcatctctcagggttactttgattcttctcttttcttattttgattcagaggacgacaaagattatgatcccaaattcgaatcggattccttgagcctcgttcctctattccaaaatcgaactctctcgaatgatgaggccatgggattggtcttgagcgccgcctcggtcagaggctggaccaccggttccgggatggaggggccgtctcttccggcaaaggccgatgcggagacgatttcaacatttccgtggtcactattcacgaaatcgcccccgtaggcgtatgcgcgttgccttcacttgcaacgtttgtggacagagaactacacgagccataaatccacatgcctacactgancgcaccgtcttcgtgcagtgttgcggatgnnnnnnnnnnnnnnnnnnnnnnnnnnnnnnnnnnnnnnnn

SEQ ID NO: 6960 - DNA, 704 bp, Zea mays
  misc_feature (637)..(704): n is a, c, g, or t
  Peptide Sequence Number=SeqID_10925
  Probeset Number=SeqID_21363
acaaattaggtctcgaattcgatataatcaaaaaacaatcttctcaatcctctctctcaatcgcaagtttcgatcaagatgcagatctttgtgaaaactctcaccggaaagaccatcacccttgaggtggaaagctctgacaccatcgacaacgttaaagccaagattcaggacaaggaaggcattcctccggatcagcagaggctcatcttcgccggaaagcagcttgaagacggcagaactttggccgactacaacatccaaaaggagtctacgctccacttggtcttgcgtctacgtggaggcatgcagattttcgtcaagacgttgaccggaaagactatcactttggaggtggagagctctgacaccatcgacaacgttaaagccaagattcaggacaaggagggaatcccaccggatcagcagaggctcatcttcgccggaaagcagttggaagacggcaggaccttggctgattacaatatccagaaggagtctacgctccacttggtcttgcgtctacgcggaggcatgcagatctttgtcaagactttgaccggaaagactatcacttttggaggtggagagctctgacactattgataatgtcaaggccagatcctcggttgggagnnnnnnnnnnnnnnnnnnnnnnnnnnnnnnnnnnnnnnnnnnnnnnnnnnnnnnnnnnnnnnnnnnnn

SEQ ID NO: 6961 - DNA, 634 bp, Zea mays
  misc_feature (101)..(101): n is a, c, g, or t
  misc_feature (482)..(482): n is a, c, g, or t
  misc_feature (543)..(543): n is a, c, g, or t
  misc_feature (622)..(622): n is a, c, g, or t
  Peptide Sequence Number=SeqID_10926
  Probeset Number=SeqID_21364
acaaattaggtctcgaattcgatagaatcaaaaactcttctcaattctctctcaatcgcaagtttcaatcaagatgcagatctttgtgaaaactctcaccnggaaagaccatcacccttgaggtggaaagctctgacaccatcgacaacgttaaagccaagattcaggacaaggaaggcattcctcctgatcagcagaggctcatcttcgccggaaagcagttggaagacggcaggaccttggctgattacaatatccagaaggagtctacgctccacttggtcttgcgtctacgtggaggcatgcagatcttcgtcaagactttgacccggaagactatcactttggaggtggagagctctgacactattgataacgtcaaggcccagatcccaggataaggagggaatcccacccgaccagcagaggttgatcttttgccggccagcagttgggaagatggggggactcttgctgactancacatccaagaggaggctacttctccatctcggcctcagggctccggggggggatgcaaantttttggcaggacttttgacgggggagaactatcactttgggaggtggagagctctgacactattgataatgtcaaggncagatccaagaa

SEQ ID NO: 6962 - DNA, 644 bp, Zea mays
  misc_feature (637)..(644): n is a, c, g, or t
  Peptide Sequence Number=SeqID_10927
  Probeset Number=SeqID_21365
gttatttagagagattcagagagaaatggcttcatattcttcgtcctctctttctagaatctcaactctccagaatcatatctcccctcttgaagccaacaacaagctacggagtctggtcaagatatctccacaagtgtctgaagccatagccagtggacgtgctgtggtcgctcttgagtcaaccattatctcacatgggatgccttaccctcaaaacctgcaaacagcaaaagaggtggagtcaattgtgagagagaatggagcagtccctgcaacaatagctatattaaacggagtaccttgcataggtctgaacgaagaagaactagaacgtcttgcatctctgggcaaaagtgtccaaaagactgcaggcagggacataccacatgttgtggcgacaagaggagatggtgcaactacagtctctgcaacgttgttttttgcttcaatggttggcatccaagtctttgtaaccggcggggataggaggtgtgcatagacatgccaaccatactatggacatatcatctgatcttactgcactaggaaggactcctatagctgtgatatcagcaggcgttaaatcaatacttgatatcccaaagactcttgaatatttgaaaactccaggagnnnnnnnn

SEQ ID NO: 6963 - DNA, 632 bp, Zea mays
  misc_feature (610)..(632): n is a, c, g, or t
  Peptide Sequence Number=SeqID_10928
  Probeset Number=SeqID_21366
attcagattcattctcattcaaaaaaaattatttcgatttcgtttctctgatcatcgattctttttatctctctgtaggttttatgactcggatagtgttttgaatggtagaaacaactcctattgccagagattttatgctctcccattgcataaccgcaagggcgagctttctattccctgtctccaccccatcttggtacttctgttgcatcggtctcgacccttgaagaataaaaaaaaactccatcagagtgttagattcctttgtttttttggtatttgtgaaattttattataaagatggtgtataacaagcagaagaaagcccataaatctaagataaacaaattcctcgttagcatcagtttcataggaagtgctggacccattcgttttgttgtcaaagaagatgaaactgtttcacacgtgattgagtatgctctcaaatgctacgcccctgaaggcaggcttccacttctcggatcagattccagctatttcctactttaccggccttactgggcagctgaaggggagatcaaaaatatttccccaaaacccatttgagttttttcctgggggttgtgcacatcggtcctctgttgannnnnnnnnnnnnnnnnnnnnnn

SEQ ID NO: 6964 - DNA, 632 bp, Zea mays
  misc_feature (1)..(23): n is a, c, g, or t
  Peptide Sequence Number=SeqID_10929
  Probeset Number=SeqID_21367
nnnnnnnnnnnnnnnnnnnnnnntcaacagaggaccgatgtgcacaacccccaggaaaaaactcaaatgggttttggggaaatatttttgatctccccttcagctgcccagtaaggccggtaaagtaggaaatagctggaatctgatccgagaagtggaagcctgccttcaggggcgtagcatttgagagcatactcaatcacgtgtgaaacagtttcatcttctttgacaacaaaacgaatgggtccagcacttcctatgaaactgatgctaacgaggaatttgtttatcttagatttatgggctttcttctgcttgttatacaccatctttataataaaatttcacaaataccaaaaaaacaaaggaatctaacactctgatggagtttttttttattcttcaagggtcgagaccgatgcaacagaagtaccaagatggggtggagacagggaatagaaagctcgcccttgcggttatgcaatgggagagcataaaatctctggcaataggagttgtttctaccattcaaaacactatccgagtcataaaacctacagagagataaaaagaatcgatgatcagagaaacgaaatcgaaataattttttttgaatgagaatgaatctgaat

SEQ ID NO: 6965 - DNA, 635 bp, Zea mays
  misc_feature (623)..(635): n is a, c, g, or t
  Peptide Sequence Number=SeqID_10930
  Probeset Number=SeqID_21368
acacaaaagacactgtaaaaacataaactctcgtaaatgctctcttgagattgtctcttaagaaatgagtcccgtcggagtatctgccctctcttctccggctaaattccaccgccgccgggaaaaagcacagacttttactccgacccacttccctaatccaaatgggtttccatctccgtggataaagtctcgacctttcgctcccaaactctcccaatccctcaatttcgcttccccctctccacatctccctctcatacgctcctcgacgtctccttcttccaaggacttccttcagattctagcgagaaaagcagcgatctttctcgtcgggtcgtttgttttcctagggttctgttcttcgaagcctgctttagcgctgcccactgcgactgcgagctctcaatcggagctagaggacgaggcaatgttcgagaaggttctggagagtgagccggagaatatggaggcgatgaaggctgttttgtataagaagatgaggagagggaaacctgaagacgccgtcaagtacgttgagaagctgatgaagttagagcctcgtgaagtggagtggaagcttctagaagcgctttgctatgagacgatggggcagttgagtnnnnnnnnnnnnn

SEQ ID NO: 6966 - DNA, 725 bp, Zea mays
  misc_feature (658)..(725): n is a, c, g, or t
  Peptide Sequence Number=SeqID_10931
  Probeset Number=SeqID_21369
attactaacccattttcccaatcaatcactcttcacttctcccactcctactcctttttctcctttctaagcaatctctctctctctccttatattctcaaatttgattctctctctctcatacctgcacaccactaccaacagagctaaattgctacactgtaaaaaagaagatgtttggacaaagcttcccggaggatattgattgtggcaacttctttgacaacatggacgacattcttgactttcccggttgtgatatggatgtcggtttcaacatcggtgactccgactctttccctaacatctggaccaatcatcaggacacatggcccgccgcttctgaccctctcttctcttccaacacaaactctgactcatcacctgagctctatgttccgtttgaagatattgtgaaagtggaaaggccagcaagctttgtatcggagtctttggtcgcgaagaaggaagattcgttttccacaaacacggactcatcttcttctcacagccagttcaggagctcaagtccagtgtcggtactcgaaagcagctcctcatcgtctcaaaccaccaacgcaacctcacttgtccttctcgggaaagcacgggtcgtccacccacaaaacgcccctcccccccccgggtttcgggaaannnnnnnnnnnnnnnnnnnnnnnnnnnnnnnnnnnnnnnnnnnnnnnnnnnnnnnnnnnnnnnnnnnn

SEQ ID NO: 6967 - DNA, 626 bp, Zea mays
  misc_feature (601)..(626): n is a, c, g, or t
  Peptide Sequence Number=SeqID_10932
  Probeset Number=SeqID_21370
attacttaacccattttgccaatcaatcactcttcacttcttcccactcctacttttttcctttctaagcaatctctctctctcatactatctgcacagcactactaacagagctatttgctatattgtaaaaggaagatgtttggacaaagcttcgcggaggatcttgattgtggcaacttctttgacaacatggacgatcttcttgattttcccggtggtgatatcgatgtcggtttcggcataggtgactccgactcttttcctaacatctggactactcatcaggacacatggcctgcagcttctgatcctctcttcgcttccaacacaaactctgactcatcacctgagctctatgttccgtttgaagatattgttaaggtggaaagaccaaaatgctttgtagaggaatccttagttgagaagaaggaagattcgtttttcacaaacacggattcatcatcttctcatagccaattcaggagctcaagtccagtgtcggtactcgaaagcagctcctcatcgtctcatacaaccaacacaacctcacttgtcctcctggaaaaagcacggtcgtccacgcacaaaacgtcctcgnnnnnnnnnnnnnnnnnnnnnnnnnn

SEQ ID NO: 6968 - DNA, 626 bp, Zea mays
  misc_feature (1)..(26): n is a, c, g, or t
  Peptide Sequence Number=SeqID_10933
  Probeset Number=SeqID_21371
nnnnnnnnnnnnnnnnnnnnnnnnnncgaggacgttttgtgcgtggacgaccgtgctttttccaggaggacaagtgaggttgtgttggttgtatgagacgatgaggagctgctttcgagtaccgacactggacttgagctcctgaattggctatgagaagatgatgaatccgtgtttgtgaaaaacgaatcttccttcttctcaactaaggattcctctacaaagcattttggtctttccaccttaacaatatcttcaaacggaacatagagctcaggtgatgagtcagagtttgtgttggaagcgaagagaggatcagaagctgcaggccatgtgtcctgatgagtagtccagatgttaggaaaagagtcggagtcacctatgccgaaaccgacatcgatatcaccaccgggaaaatcaagaagatcgtccatgttgtcaaagaagttgccacaatcaagatcctccgcgaagctttgtccaaacatcttccttttacaatatagcaaatagctctgttagtagtgctgtgcagatagtatgagagagagagattgcttagaaaggaaaaaagtaggagtgggaagaagtgaagagtgattgattggcaaaatgggttaagtaat

SEQ ID NO: 6969 - DNA, 662 bp, Zea mays
  misc_feature (601)..(662): n is a, c, g, or t
  Peptide Sequence Number=SeqID_10934
  Probeset Number=SeqID_21372
acttcaaaacagaatcaaatatccactttctctctctctccctccactagagaaaagcttgaaccaaagcaaattcatattttgattctccttcaatggcttccatgtccaccgccttccccaaaacaactcctttcctctctcatcctctcaccaaatccgattccctgatcgcaaccaccgtttcatttccctccagcgcgagatctcgcagcctccgaagagccaccctccgcgtacgatccgcgctgatcgagccagacggcgggaagctggtggagcttgtggtcccggagacgcgacgaagggagaagaagcacgaggcggcggatttgccgagagtgaaactgacggcgatcgatttgcagtggatgcacgtgttgagcgaaggctgggcaagtccgcttagagggtttatgcgggaagctgagttccttcaaactcttcatttcaattcgcttcgtctcgacgacggatccgtcgtccaatatgtctgtacctatcgttctcgccatcgatgatgaacagaaagctctaatcggagaatctaaacggggcccccttggtgattcccatggtaaacccaacccctttctcccgnnnnnnnnnnnnnnnnnnnnnnnnnnnnnnnnnnnnnnnnnnnnnnnnnnnnnnnnnnnnnn

SEQ ID NO: 6970 - DNA, 680 bp, Zea mays
  misc_feature (680)..(680): n is a, c, g, or t
  Peptide Sequence Number=SeqID_10935
  Probeset Number=SeqID_21373
aagaatggaaaaaagttagagagaggtgagagaatttttctctcttctctttctctcccgacgtatttttactcgtagcctcctatagatttcagctccggtggttgacggtgccttatcaaccgtcggccgccaccccctccttcccctctttcttgctagcctcataatctgtcgtttaagcggttatttcactttttccttgctttaacatctgtggatttccaccggatagcggccggatccggtagatctaaacggtagctgggtgggtgctcagcttccctggagtgttggcgatgtcgtgcttggccgcttatcatcaggaagctccaacttgaggtcagatcttgactcgatttcggtcagatctgggtcagatccgccgtggagggtttgccggaaacaaagcgtcgctgcctttgtctctctggtcagttgttcagcctcctcttgtctctagttatgtcctctgttggttgctactgtagaacttccccatcgagatcttccgatctatgatgttaaaggcgaaccgaggcttcgctggggacttctttagtttcggattctggttgcagcaagcgtggtggctgtgtgtgccgcctattgggttttggagttttcccactcctctgggtttcagaggttcaaagggagtggacagcccccgtctcctn

SEQ ID NO: 6971 - DNA, 680 bp, Zea mays
  misc_feature (1)..(1): n is a, c, g, or t
  Probeset Number=SeqID_21374
naggagacgggggctgtccactccctttgaacctctgaaacccagaggagtgggaaaactccaaaacccaataggcggcacacacagccaccacgcttgctgcaaccagaatccgaaactaaagaagtccccagcgaagcctcggttcgcctttaacatcatagatcggaagatctcgatggggaagttctacagtagcaaccaacagaggacataactagagacaagaggaggctgaacaactgaccagagagacaaaggcagcgacgctttgtttccggcaaaccctccacggcggatctgacccagatctgaccgaaatcgagtcaagatctgacctcaagttggagcttcctgatgataagcggccaagcacgacatcgccaacactccagggaagctgagcacccacccagctaccgtttagatctaccggatccggccgctatccggtggaaatccacagatgttaaagcaaggaaaaagtgaaataaccgcttaaacgacagattatgaggctagcaagaaagaggggaaggagggggtggcggccgacggttgataaggcaccgtcaaccaccggagctgaaatctataggaggctacgagtaaaaatacgtcgggagagaaagagaagagagaaaaattctctcacctctctctaacttttttccattctt

SEQ ID NO: 6972 - DNA, 623 bp, Zea mays
  misc_feature (601)..(623): n is a, c, g, or t
  Peptide Sequence Number=SeqID_10936
  Probeset Number=SeqID_21375
attatctctccgcctcactcattagcttctcctctcccgttagctcccaccgtaacacacacctgatccgattatcagaagcacaagcttggtatatattctccgagtctgagctatggctttggtgatgcactcgtacaagggaaacaaaaactctgacaaggcattcattgccgcagagttcgctggtgtgaagatcgatatgccttctggctttgagatgggtgtcaccaacaaaacccctgagttcctcaagatgaaccctctcggaaagattcctgttcttgagactcctgagggtcctatctttgagagcaacgccattgcccgttacgtaagcagattgaacggtgacaactccttgaacggatcctctctgatcgaatatgcacatattgagcaatggatcgatttctcctcattggagatttatggaacatctttcactggttcgtcccaaggaatgggctttatggccttacagggttcccggggaggaagctgcgatctctgctttgaaaaagggacttggggctctgaaccaccaccctcgcccccaaaattgaccctcgtgggaaccttgggccccctggggaattannnnnnnnnnnnnnnnnnnnnnn

SEQ ID NO: 6973 - DNA, 535 bp, Zea mays
  Peptide Sequence Number=SeqID_10937
  Probeset Number=SeqID_21376
accttcaattatcacaccgtcccctctctccctctccggttattacgttatggccaagatgggtttgaaacccgacccggttactcctaacccgacccacaataatgccaaggagattcgttacagaggcgtgaggaagcgtccttggggccgttacgccgccgagatccgagatccgggtaagaaaacccgcgtctggcttggcaccttcgataccgcagaggaggcggcgcgtgcttacgataaggcggcgcgtgatttccgtggcgctaaggcgaagacgaattttcttgagctgaatgagaaggtgctctccggtggaggcggtttcgcgcggagccctagccagagcagcacccttgactacgcttctcctccggcggtgactgatgggattgttccaccctcaacttgagctaagtcttggcggcggcggtggcgcgtgttaccagatcccaatggcgcgtcctctctactttttggacctttatgggggtcggaaacggaggtcgtggtcagcttccggtgtcgccgg

SEQ ID NO: 6974 - DNA, 568 bp, Zea mays
  misc_feature (563)..(563): n is a, c, g, or t
  Peptide Sequence Number=SeqID_10938
  Probeset Number=SeqID_21377
agatcgatacccattgtaaagattctctacgctttgaagcgagatcctgtctttggtatctggagctgtatctggttccagagacatggacaacaacaacaacaagaacaatgaagagaacggaaacacgtccaaaacggcgtcggacgacgagggtgttggatccgtggggagacagatgagcgagtcttctctttgcgtcacggaggaagaagaagaagacgattccaaattacatttggctcctcagtacactatcaaggagcatctcgagaaggacaaagatgatgagagtctgaggaagtgcaaggaacagcttcttggaagtgttgatgtcaccaacattggagagacacttgaccctgaagtgaggatcattagcctggtcatcttatcccctgggagaccagacattgttcttatggtacctgagaatggaaacccaaaggggatgtggtttactttgaaagaagggagcaggtactgtttgaaattcacgtttcacggtaacgacaacattgtctctggtcttaggcacaccaataccgtttggaagaccgctngtaaa

SEQ ID NO: 6975 - DNA, 601 bp, Zea mays
  misc_feature (601)..(601): n is a, c, g, or t
  Peptide Sequence Number=SeqID_10939
  Probeset Number=SeqID_21378
ctagaatcctccagactcgcgcctgtcgccgttctcgatcctctcaatctcaaccatggcggcaacaaacgagcacaccggcttgcaattcattgctccttcatcgacggcgtccacaaccacccaagtgctcacagcgcgaatccaccctctcgttatcttcaacgtctgcgactgcttcgtgagacgacccgactcagctgaacgagtcatcggcactctcctcggatctatcctacccgacggaaccgtcgatatccgcaattcttacgccggacctcacaatgaatcttcagatcaggttgctggggatattgattaccaccacaacatgggagcttcacaccttaaggtgaatccaaaggaaggaatcgttggctggtactctactggttctggtggcaatggcgggtagggcactgattcatgacttctttgctagagaagccaccaaccctattcacctaaccggggacactgggttcactaatggtgaagggaccatcaaagcttacgtctcttcgaacctttcacttggggaccggcacttgctgctcaagttcaagagattcccgcggatcccccgtatggttgagggccn

SEQ ID NO: 6976 - DNA, 976 bp, Zea mays
  misc_feature (1)..(25): n is a, c, g, or t
  misc_feature (976)..(976): n is a, c, g, or t
  Peptide Sequence Number=SeqID_10940
  Probeset Number=SeqID_21379
nnnnnnnnnnnnnnnnnnnnnnnnnacctttactctagggttctcaagcttccctctccgatccgtttctttctccaagctcaggtcaagatgcaagctgtgattcgttcgtttgtgtccggtggaaatgttgtgagatcatctctgctgcagcatctccgtgtggtcaacccggcgattcagccttccgtgttgtctactcgctctgagtccactcagcctgctcgtatggaggagcatgggttcgagagcacaaccatttctgatgttatgaacgccaaaggcaaaagcgctgatggatcttggctttggtgtaccactgatgactctgtttacgatgctgttaaatccatgacacaacacaatgttggtgccttggtggttgtgaaacctggtgagcaacaatctcttgctggaatcattacagagagagattatctgaggaagatcatagtgcaaggcagatcatccaaatcaacaaaagtaggggacattatgactgaagagaataagcttatcaccgtgacaccagagaccaaggtcttggtcgctatgcagctgatgacagataacagaatcaggcacattccagtgatcaaagacaagggcatgattggaatggtgtccataggagatgttgtccgccgagtggttcatgagcatagagaggagcttcaacgcctaaatgcgtatattcagggaggttactagatcttgaataatggaaagaaaagagttccctgttgtgtcgtctggtcttgtgctgctgaatctgaaaagcttccagatcagtgtaaatatgcagtcctcgttgttattgttgttgttgttgtgtttgatgttttgtgttgtttcgttgtttaacttgtcaaaactaaggccttgtgctgcttctcttcttgcgcttacttagcaagagaataaaaccaaaaactctgatctctttatgaaagatatgatgtttgtttttgttatn

SEQ ID NO: 6977 - DNA, 642 bp, Zea mays
  misc_feature (632)..(642): n is a, c, g, or t
  Peptide Sequence Number=SeqID_10941
  Probeset Number=SeqID_21380
ttaattcgataaaggctcctcaaatggattctaaaatgggaaatttcttcgactccatcggttccttcttcagcggcggcgataagatcccttggtgcgaccgtgatgtcatccttgaatgtgagaaagaagttaagacagcaactgagggtgactcggaagaccaaaagaaagagagcattatgcgattgtcttgggctcttgtccattcccgacaagccgaagatatccagcgtggaatcgccatgctcgaagcttctctagcaagtagtagccctcctttgcaggaccgggagaagatttatcttctcgctgttggttattatcgcactggagactactctagaagcaggcagctcgtggaacgctgtctcgaggttcaacctgattggaggcaagctttagccttaaagaaaaccattgaagacaaattgcaaaagatggtgttattgggataggcatcacggctacggccgttggcctcatagccggtggaatcgctgctgctttggctcgcaaaaagtgacctcgcagattccctgtgcatataataacatatgctttcttttaagtcctttttttttttggtttttcagctttccagatgtcccattactttattttccatgctnnnnnnnnnnn

SEQ ID NO: 6978 - DNA, 618 bp, Zea mays
  misc_feature (601)..(618): n is a, c, g, or t
  Peptide Sequence Number=SeqID_10942
  Probeset Number=SeqID_21381
aaacgcgccgtctctaacctcctccgcctcctcttcatctcccgccgccatggaaactcacaaaaccaaggtctgcatcgtcggaagcggccccgcagcgcacacggcagcgatctacgcagctagggcggagctcaagcctctcctcttcgaaggatgggatggctaacgacatcgctcccggcggtcaactaaccacaaccaccgacgtcgagaacttccccggcttccccgaaggcatcctcggcatcgacatcgtcgagaagttccggaagacaatcggagcgattcggcaccaagatcttcaccgagacgggtaataagggtgatttctcctcgaagccgtttaagctgttcaccgattcgagaaccgtcctcgccgacgccgggatcatctccacgggagccgtggcgaaacgcctcagcttcgctggatctggggaaggcgccggtggtttctggaacagagggatctcggcgggcgctgggtgccaccgagctgctccgatttttagaacaagcctctggggggttaatcgggcggcggcgattccggctatggggggggcgaatttctgactaagtatggttctaagggttnnnnnnnnnnnnnnnnnn

SEQ ID NO: 6979 - DNA, 643 bp, Zea mays
  misc_feature (1)..(1): n is a, c, g, or t
  misc_feature (641)..(643): n is a, c, g, or t
  Peptide Sequence Number=SeqID_10943
  Probeset Number=SeqID_21382
naaaattcgaaaacaagaagctgtccctctcagatctgaaacctccttccccttgaagcttgaacaaaaaaagagagagaaaatggcggcgagggaagagtttgtatacctagcgaagctggcggagcaagcggagcgatatgaagagatggttgaattcatggaaaaagtggcggaaggcgtggaactcagcgtggaggaacggaacctcctctccgtggcttacaaaaacgtaatcggcgctcgtcgtgcctcgtggcgcatcatctcctccatcgaacagaaggaagagagccgcgggaacgatgaccacgtcaccacgatccgtgactaccgaagcaagatcgagtctgagctctccaaaatctgcgacggcattcttaagctgctcgattcaagactcattcccgcttcttctgccaacggagactccaaggttttctaccttaagatgaagggagattaccataggtacttggctgagtttaagaccgctcaggacaggaaagacgccgccgagcataccctcaccgcttacaaagccgctcaggacattgctacctctgaattgcctccaacccaccccatccgtcttgggctcgctttgaacttctctggcttttactacgagattccccacnnn

SEQ ID NO: 6980 - DNA, 701 bp, Zea mays
  misc_feature (469)..(469): n is a, c, g, or t
  misc_feature (601)..(701): n is a, c, g, or t
  Peptide Sequence Number=SeqID_10944
  Probeset Number=SeqID_21383
gtcttggcctcctcgtcttcttcagcaaagtctctcttgcaactccaaaaagcaaccatgtctgcttttgtcggcaaatacgcagatgagctgatcaagacggccaagtacattgcaacaccgggaaagggaattttggcggcagatgagagcacaggaaccattgggaaacgattctccagcatcaatgttgagaacattgagtccaaccgccaagctctccgtgagcttctcttcacttccccaggcgctctcccttgcctctccggtgttatcctcttcgaggaaaccctttaccagaaaacttctgatggcaagccttttgtcgagttcctccaggagaacggagttatccccggaatcaaagtggacaaggggtgtggttgatctagcaggaaccaatggtgagaccactactcagggtctagactcgcttggtgcacgttgccaggagtattacaaggcaggnagccaggtgggccaaattggcgtgctgtcctcccagattggtgccaccgagccgagcgagctctcgatccaagagaacgcccaaggggctggcacgttatgccatcatcgcccaggagaaacggactggtcnnnnnnnnnnnnnnnnnnnnnnnnnnnnnnnnnnnnnnnnnnnnnnnnnnnnnnnnnnnnnnnnnnnnnnnnnnnnnnnnnnnnnnnnnnnnnnnnnnnnn

SEQ ID NO: 6981 - DNA, 704 bp, Zea mays
  misc_feature (636)..(704): n is a, c, g, or t
  Peptide Sequence Number=SeqID_10945
  Probeset Number=SeqID_21384
cccacggccaaaccaaaacccccaaatactggcttctcgatctacttctgaaaccctaatctcgttctcttcgtctcgcccggcacacactcgattcgccggccgcgcgtattactactgaatcgacgacgatgtcgatgtcgaagagctccaagatgctccagttcataaactacaggatgcgagtcaccatccaagacggacggcagctcgtcgggaaattcatggccttcgaccgccacatgaacctcgtcctcggcgactgcgaggagttccgcaagcttccgccaggcaaaggcaagaagatcaacgaagagagagaagagcgccgcacgctcggcttggtcttgctcagaggcgaagaagtcatctccatgacggttaaaggaccgcctcctcccgaagagtctcgcgctaaggccggctcagcagcggctcttgctgggcctggagtgggccgtgctgctggacgtggagtgcctacagggccgcttgtccaagctcagcctgggctttctgggcctgttcgtgggagttggtgggccttcgcctgggatgatgcagcctcagatctctcgggctccgggtaatgagacctcctgggcagatgcttccgccgcctcctgcttttgggtnnnnnnnnnnnnnnnnnnnnnnnnnnnnnnnnnnnnnnnnnnnnnnnnnnnnnnnnnnnnnnnnnnnnn

SEQ ID NO: 6982 - DNA, 632 bp, Zea mays
  misc_feature (598)..(598): n is a, c, g, or t
  misc_feature (601)..(632): n is a, c, g, or t
  Peptide Sequence Number=SeqID_10946
  Probeset Number=SeqID_21385
ataaatatctgagtcgtggtcttctaaattcgttgctagtaaattgatcgaccagtcagctcctcgaccagcgaaaatggacgtgcgagaatcaatctcactgcaaaaccatgtctccttgagcctcgccaagaacgtgatctccaccgtctctaaaaactccaacgtcatcttctccccggcatcgatcaacgtcgtcctcggcataatcgccgctggatccgccggcgctaccaaagaccagatcctctccttcctcaacttcccttcaatcgaccacctcaacaccttctcctccgatatcgtctccgccgtcctcgccgacggcagcgctaacggtggccctaaactctcggcggctaacggtgtatggatcgataagtctctgtcattcaaaccttccttcaagcagctcttggatggttcttacaaagctgcttctaatctagcagattttcagacaaagggctgtggaagtgattgctgaagtgaattcatgggctgaaaaggagacgaatggcctcttataccgaggttctaccgggaaggatcaccagacagtttgcccagactgatttttgcaaatgctttgtacttncannnnnnnnnnnnnnnnnnnnnnnnnnnnnnnn

SEQ ID NO: 6983 - DNA, 443 bp, Zea mays
  Peptide Sequence Number=SeqID_10947
  Probeset Number=SeqID_21386
cttcggcgattttagggttctgactggtcacatccaccaaagagacaaaaaatgccggcgggacatggagttcgtgctcgaacgagggatctgttcgctagagggttcaggaagaagggtacaattccactgtccacctacctcaggaccttcaaggtcggcgaatacgtcgatgtcaaagtgaacggcgccatccacaagggtatgcctcacaagttctaccacggtcgtactggtcgtgtctggaacgttaccaaacgtgccgttggtgtcgaagtcaacaaacagattggaaacaggatcataaagaagaggcttcatgtgcgtgtggagcatgtgcagcagtctagatgcgcggaggagttcaaactgaggataaagaagaacgatgagttgaaagctgcagccaaagccagaggcgagacaataagcaccaagaggca

SEQ ID NO: 6984 - DNA, 584 bp, Zea mays
  misc_feature (340)..(340): n is a, c, g, or t
  Peptide Sequence Number=SeqID_10948
  Probeset Number=SeqID_21387
atctcagttttcaaacctctctctctttctccttctccaactctcaatcatggttgaaccggcgaataccgttggaatcccactgaaccacgccgcgctgctgaaggatgagctcgacatcgtgatcccgacgatccgcaacctcgatttcctcgagatgtggaggccttttctccagccttaccatctcatcatcgtccaagacggagatccttccaagaccattggctgtccccgaagggttcgattacgagctctacaacaggaacgacattaaccggtatcctcggtcccaaagcttcgtgcatctccttcaaggactctgcttgtcgctgcttcnggttacatggtctcctaagaagaagtacatcttcaccatttgacgacgatttgctttcgttgccaaggatccatctggggaaaagcagtgaacgctctcgagcaacacatcaagaaccttctctgcccatcctctccacttttcttcaccaccttgtacgaccctatacccgggaggggcgctgcctcgccgtcgtgaaaaccctttcagccccccccgggggggggggttcccgggctggggg

SEQ ID NO: 6985 - DNA, 628 bp, Zea mays
  misc_feature (564)..(564): n is a, c, g, or t
  misc_feature (601)..(628): n is a, c, g, or t
  Peptide Sequence Number=SeqID_10949
  Probeset Number=SeqID_21388
ataactctttcgccgtcttgttcctcatatactcttcgactcgcttcgcttctcgatctcgatctccgccgtttcagtttgatcatcgatggctttaccaaaccagcaaaccgtggattaccctagcttcaagctcgtcatcgttggtgatggaggcacagggaaaacgacgttcgtgaagaggcatcttactggagagtttgagaagaagtatgaacccactattgggtgttgaggttcaccctctagacttcttcactaactgtggcaagatccgcttttactgctgggatactgctggacaagagaagtttggtggtcttagggatggttactacatccatgggcagtgtgccgtcatcatgtttgatgtcacagcacgtctgacatacaagaatgtcccaacatggcaccgtgatctttgcagggtctgcgaaaacatcccgattgttctttgtgggaacaaagttgatgtgaagaacaggcaagtgaaggcccagcaggtgacattccacaggaacagaattccccgggcctacgagatctctgccaagagcaactacnatttcgagaagccattctttgtacttgctagaaaacnnnnnnnnnnnnnnnnnnnnnnnnnnnn

SEQ ID NO: 6986 - DNA, 584 bp, Zea mays
  misc_feature (584)..(584): n is a, c, g, or t
  Peptide Sequence Number=SeqID_10950
  Probeset Number=SeqID_21389
gaatacttccatataaaccatccccttcctatctcgctttaccaatcactcttcagagattaagtaaacaaactagtaatggctatcacacgtctaactctagctcctctcctcctcatcgccgccgtgattctctcgactgagacatcagctcagccggcagcacccgctccaggccctgctggtcctatcaacctcacggcaatcctcgaaaaaggcggtcaattcactaccttcatccatcttttgaaaatcactcaagttggggaacaagtgaacactcaagtcaacagttcatccgaaggcatgaccgtgttcgcgccaacggacaatgctttccaaaacctccaggccggcactctaaacaagttgagcgcagacgaacaggtcaaactcattctctaccacgtcagccctaaattctacactttggacgatctcctctcagtaagtaacccggttaggactcaagcttctggccgaggacacggggggttccgtcttaacttcaccggtgaagctaaccaagtcaatgtctcaacgggttacgtggagacacgtgtcagcaatgcgttgagaacacn

SEQ ID NO: 6987 - DNA, 761 bp, Zea mays
  misc_feature (1)..(61): n is a, c, g, or t
  misc_feature (658)..(658): n is a, c, g, or t
  misc_feature (692)..(761): n is a, c, g, or t
  Peptide Sequence Number=SeqID_10951
  Probeset Number=SeqID_21390
nnnnnnnnnnnnnnnnnnnnnnnnnnnnnnnnnnnnnnnnnnnnnnnnnnnnnnnnnnnnnacctaaaactgcgagaaggaaaaaaggcgaaaagctcgccgatcgggagtccgcgaaaccaaagagatcgtaggttttggatatggcgtcgaagcggatcttgaaggagctgaaggatctgcagaaggatccacccacctcatgtagcgcaggacctgttgctgaagacatgtttcattggcaggcaacgataatgggtcctaccgacagtccttatgctggaggtgttttccttgttaccattcacttccctccagattaccctttcaagcctcctaaggttgcctttaggacgaaggtgttccatcccaacattaacagcaacggaagcatttgcctcgacatcttgaaggagcaatggagtcctgcactcaccatttccaaggtgctgttatcgatatgttctttgttaaccgatccaaacccagatgatcctttggtgcctgagatagctcatatgtacaagactgacaagaaccagtatgagtccactgcacggagctggactcagaagtatgccatgggctgaaaggaaggatcctaaactatctctttttatgggaaaaatctgccgtaatttctagtgtatgattcagnagacttccggtttctgtcggcccttttaaaattnnnnnnnnnnnnnnnnnnnnnnnnnnnnnnnnnnnnnnnnnnnnnnnnnnnnnnnnnnnnnnnnnnnnnn

SEQ ID NO: 6988 - DNA, 647 bp, Zea mays
  misc_feature (627)..(647): n is a, c, g, or t
  Peptide Sequence Number=SeqID_10952
  Probeset Number=SeqID_21391
atcaattcctccgtctccaccgagccggagattttcctccgcctttgttgatttcacgttatacggattcctcccactcccactcgcagtcgcaggcaggcgtgtgtgttcttgtttagaaaatggctcttgtccagcgaatacccagtttctcatccaatcttcgaaattggaagaacaccaattcgacaaaccacaagcctgtttcttctctccattacaaaacccagatcactgcttcttcttcgcccttcacggagaagcactctgtcgagagataccaaagagatcaatggctgtacaaagcatccactccatcgccaccttcgaatcagcaagatgaagtctttgttagagaaaacgacatcgcgtcgcagcttccggagctgaagaagctcttggaggttctgagagagaagagagagagtgggtgcagaggcggtgattgcggaccaggagatgtgtttttagtcgggacagggccaggagatccagagcttttgactttgaaagctgtcagagtcattcaaagcgctgatcttctgctttacgacaggctttgtctctaagatggtgcttggagttggttgctcctgatgctaggcttctctatgtcggcaaaactgnnnnnnnnnnnnnnnnnnnnn

SEQ ID NO: 6989 - DNA, 652 bp, Zea mays
  misc_feature (652)..(652): n is a, c, g, or t
  Peptide Sequence Number=SeqID_10953
  Probeset Number=SeqID_21392
atatcaatagttcagttcgtctttctaaaacaggagaagaaagtgtttggcgatgaaaaagcacgcactttggctactatgcgttctggtgttaccggcgatagcctggggcaggaatcctgagaagaaggcaacgacttcgtccgggaggaaggaagatgacctggtaaccggtttgcctggccaaccaccggttaacttcagacattacgccggctacgtcaatctcgggccacgacagaagcaaaaggcgcttttctactggttcttcgaagcccaacgaaactcctcaggtcgtcctcttgtcctctggctcaacggaggacctggttgttcatcgatagcctatggagctgcacaagagctaggccctttccttgttcgcgccggcggtgacaaccttaccttccataagttctcttggaacaaagaggccaatatgttgttcttggaagcaccggttggggggttgggttctcgtataccaataactcaatggatcttcataagcttggagatcaagttagtgcagaggattctcttgctttctttgatcaactggttcatgaaatttcctgagtacggatcccacgagttttacatcgcccggagagaagttacgccgggtcactatggtccacaacttgcgaan

SEQ ID NO: 6990 - DNA, 650 bp, Zea mays
  misc_feature (648)..(650): n is a, c, g, or t
  Peptide Sequence Number=SeqID_10954
  Probeset Number=SeqID_21393
gtacaagcaggatcagtttatttcataggattaacaaaaaaaaatggcaaagggacaccaaggcaaatgctttgcactcgtcctgttactatgcttctttagttcaactttggcacgcagggttctcaaggatctctcaatgatggagatgaaccatgttgtgaagcctgggatggttagtttgagcgtgcaagatcatgagatgttcaatgtagaatctgagcacatagtgaagcctgaccataagctgcagtccatgccgggtgaaccggaagagcctgaggacaggatcatgcctgatcgcaaaatgcaatccatgccgggtgaaccagaggagcctgaggacaaggtcatgcctgatcataaactccagtccatgccgggtgaaccagaggagcctgaggacaagatcatgcctgatcataaactgcaatccatgcccggggaaccagaagagcctgaggacaaggtcatgcctgatcataagctgcagtccatgccgggtgaaccagaagagcctgaggacaaggtcatgcctgatcatgaactgcaaaccatgtggggtgagctagaagaacctgatcctaaaactatgctcgatcacaaagaaaagcctgatcataaagtgcagtccctggcgagtgaacnnn

SEQ ID NO: 6991 - DNA, 619 bp, Zea mays
  misc_feature (408)..(408): n is a, c, g, or t
  misc_feature (482)..(482): n is a, c, g, or t
  misc_feature (499)..(499): n is a, c, g, or t
  misc_feature (588)..(588): n is a, c, g, or t
  misc_feature (597)..(597): n is a, c, g, or t
  misc_feature (601)..(619): n is a, c, g, or t
  Peptide Sequence Number=SeqID_10955
  Probeset Number=SeqID_21394
atccctcaagttcatcagcgagaagagagaatcgaatcgatggcggggatgcttgcgaacagtgtcctcctccctcaaccttcgattttccttcccgtttcttcttctcgaagcagcagatcaatccgaagaaccctagtcatggtcaaagcctcctccaaaccttccgactctgtctcagcgtccaccaaatccaaatccaaatccagcgacgctgtgttcactgctcctcccggtttcaagcctcccgagccgaaacgcttcgccgttaaaccgggaaagctcttagatgtactgggtgctgcaatcggagtgcttctccgactcggcgctggcgttttcgtttctgggtactctgcttctttcgtgtctaaggatgcgattccagctgatcagtatgcgttgcgnaattggggggatcacggtgaaggaaccctcaaagcttgggcctcgtcctgagaaacccattgagatatatgagngttgagggctgtccctntttgccgtaggggtagggaaaatggttcacagcgctgggatcttggtattcctctactttcctgcccccagagggagtcccaatttccngcctatggnttannnnnnnnnnnnnnnnnnn

SEQ ID NO: 6992 - DNA, 610 bp, Zea mays
  misc_feature (601)..(610): n is a, c, g, or t
  Peptide Sequence Number=SeqID_10956
  Probeset Number=SeqID_21395
tcagtttgtttaggaggcagagttagtcatgggtagaggtcgttgccgcatggtaatgtgttgtgaacccaatgagtttacagaaccccgtccataccgacctcccgcactcaaacgtatcctcttccaacaaaagagattggccggactacgtgaaggatctcaagtctcgttggagatccaatcagataagagtctgaagggaactgatcaggatcagaccactcttgtctctggaattgatattcaggaaaagtcgtcgtctgatgttgttgctagcacctcgaagcctcagacgccatcatcgagtttggtcgggatgaagaaaacactaggttctcaagtctcgttgctacgttgttctgcctgtatgcaaataatccagtccgataagagtctaaagggatcttctgatcaggatcagaccactcttgtctcccaaattgatattcaggatcagaccactcttgtctcccaaattgatattcagggaaaagttgtcgtctgatatcgttagtaacacctccaagactcatcaaggtaagcttctccgatcaagttcaaaaatacacaagccccaagctcttcctgaagaaagaannnnnnnnnn

SEQ ID NO: 6993 - DNA, 610 bp, Zea mays
  misc_feature (1)..(10): n is a, c, g, or t
  Probeset Number=SeqID_21396
nnnnnnnnnnttctttcttcaggaagagcttggggcttgtgtatttttgaacttgatcggagaagcttaccttgatgagtcttggaggtgttactaacgatatcagacgacaacttttccctgaatatcaatttgggagacaagagtggtctgatcctgaatatcaatttgggagacaagagtggtctgatcctgatcagaagatccctttagactcttatcggactggattatttgcatacaggcagaacaacgtagcaacgagacttgagaacctagtgttttcttcatcccgaccaaactcgatgatggcgtctgaggcttcgaggtgctagcaacaacatcagacgacgacttttcctgaatatcaattccagagacaagagtggtctgatcctgatcagttcccttcagactcttatctgattggatctccaacgagacttgagatccttcacgtagtccggccaatctcttttgttggaagaggatacgtttgagtgcgggaggtcggtatggacggggttctgtaaactcattgggttcacaacacattaccatgcggcaacgacctctacccatgactaactctgcctcctaaacaaactga

SEQ ID NO: 6994 - DNA, 356 bp, Zea mays
  misc_feature (306)..(308): n is a, c, g, or t
  misc_feature (320)..(322): n is a, c, g, or t
  misc_feature (326)..(328): n is a, c, g, or t
  misc_feature (341)..(343): n is a, c, g, or t
  misc_feature (345)..(347): n is a, c, g, or t
  misc_feature (352)..(352): n is a, c, g, or t
  misc_feature (354)..(354): n is a, c, g, or t
  Peptide Sequence Number=SeqID_10957
  Probeset Number=SeqID_21397
tgcattctcgatagagccagtcaagcagtcagcagcaccaccggtctcctccacgacaaaaaacagatattctatcgtcagcaatcctgcgttccctgcccgacggaggtgcttccctcgttgctgcgttgcactgcggcggcctcgcgcttgttgtcgattccagctccatgcgcccatgatttactttacttgtgtaagatcaccaatctccagtctctactgctattcccccctttgcgttgctggaaaataattggtttgccatttagattcactaattttatgcgtctttccaattctagnnnttcttgagtctnnngcgnnntttatcagctgcnnncnnnctgcngnag

SEQ ID NO: 6995 - DNA, 627 bp, Zea mays
  misc_feature (1)..(4): n is a, c, g, or t
  misc_feature (627)..(627): n is a, c, g, or t
  Probeset Number=SeqID_21398
nnnngtttagctttctaccgacgaaaatgggcgctttcaggtttcaccagtaccaggttgtcggaagagctctcccgacagagaaagatgtgcagcctaagatctacaggatgaagctctgggccacgaacgaggttcgtgccaagtccaagttctggtacttcttgaggaagctgaagaaggttaagaagagcaacggtcagatgctcgccatcaacgagatctttgagaagaacccaacaaccatcaagaactttggaatctggttgaggtaccagagcaggactggataccacaacatgtacaaggagtaccgcgacaccaccttgaacggagccgtggagcagatgtacaccgagatggcgtcgcgacaccgcgtcaggttcccttgcatccagatcatcaagactgccactgtcccggccaagctttgcaagagggagagcaccaagcagttccacaacagcaaaatcaagttcccattggtgttccgcaaggtcagaccaccaaccaggaagctcaagaccacctacaaggcctccaaacccaacttggtcatgtgataggagtctctggttgacgctcacataccttttttggttgggggattgggccccggtgaaagtn

SEQ ID NO: 6996 - DNA, 591 bp, Zea mays
  Peptide Sequence Number=SeqID_10958
  Probeset Number=SeqID_21399
gattcatcatcgtcgtcgcgtctctcttaagcttctctcgcagatcctccggtgcagagtttaaaaggaaaaaaaaaatggggttgagtttcgcgaagctgtttagcaagctctttgcaaagaaggagatgaggattctgatggttggtcttgatgctgctggtaagaccactattctctacaagctcaagctcggtgagattgtcaccaccatccccactattggtttcaatgtggaaactgtggagtacaagaacatcagtttcactgtgtgggatgtcgggggtcaggacaagatccgtcctttgtggaggcactacttccagaacactcagggtctgatctttgtcgtggacagcaacgatagggacagagttgttgaggctagagatgaacttcacaggatgcttaatgaggatgagctgcgtgatgctgtgttgcttgtgtttgccaacaaacaagatcttccaaacgctatgaatgccgccgaaatcacagataagcttggccttcaactccctgcgtcagcgtcactggtacattcagagcacatgcgccacgtcaggtgaaggactgtacgaaggtctggac

SEQ ID NO: 6997 - DNA, 645 bp, Zea mays
  Peptide Sequence Number=SeqID_10959
  Probeset Number=SeqID_21400
acactgcaccatcatcacaaaacgatgaaactcaatgtcgccggatcactccttctccttctaatctcaaccgccacgcgttgtccgccgtcagacctccgtgcactcctagctttccgcgcagcactccacgagcacatacctcggcattttcaactcatggacccgccaagactgctgccacaactggtacgccgtgagctgcgacgccgtcactcaccgagtcgccgacatcaacctccgcggcgagtcagaagacccaatcttcgagcgagctcaccgaaccggttacatgaccggccgcatctctccggcgatatgcgacctcgctcgcctctccgccttaacaatcgccgactgggaacgcatctccggcgacatccccagatgcatcacgcgcctctctttcctccgtactatagacctcatcggaaaccgaatccccggcgagattccgaacgacatcgggagattacaccggctagctgtcttaaacgtcgcggataaccggatatcccgcttcatcccgaagtgcgtaaccaacctctctagcttaatgcacttgggccgccgtcacaccttaatgaaccgtgttagtccaaactgagtttcgggccgattgacatgactcaggcgtgcaattgc

SEQ ID NO: 6998 - DNA, 608 bp, Zea mays
  misc_feature (476)..(476): n is a, c, g, or t
  misc_feature (601)..(608): n is a, c, g, or t
  Peptide Sequence Number=SeqID_10960
  Probeset Number=SeqID_21401
aaactccaatcattctgcgactcttcaaaccaactctttgtgactcacattcatccaactctctctagctatgtcaacatccgagaacaaagtggagatagtcgacagaggccacaaggaggaggaagaaaaagaagaaggcaaaggaggcttcctcgacaaggtcaaagacttcatccacgacatcggcgaaaagatcgaaggaaccatcggcttcggcaaaccaaccgccgacgtctccgccatccacatccccaagatcaacctcgagagagccgacatcgtggtcgacgtcctcgtcaagaaccccaaccctgtccccatccctctcatcgacatcgactacctcgtcgagagcgacgggcgaaagctcgtctccggcctcatccccgacgcaggaaccatcaaggcgcacggggaagagaccgtgaagatacccttgaccttgatctacgacgacatcaagagcacttacnacgacatcaacccggggatgatcataccttacaggatcaaagtcgaccccatcgtcgacgtgctggtcctagggaggctgacgcttcccttggaggggcgcggcgagatccctatcccccagagnnnnnnnn

SEQ ID NO: 6999 - DNA, 641 bp, Zea mays
  misc_feature (478)..(478): n is a, c, g, or t
  misc_feature (584)..(584): n is a, c, g, or t
  misc_feature (613)..(613): n is a, c, g, or t
  misc_feature (617)..(617): n is a, c, g, or t
  misc_feature (619)..(619): n is a, c, g, or t
  misc_feature (628)..(629): n is a, c, g, or t
  Peptide Sequence Number=SeqID_10961
  Probeset Number=SeqID_21402
cacacttggtctcctccaacagtttttcttcagctccaatcaaattttaacggaagaaatcgatctaccggtggagtttgaggaggagatggtgtcacccgaaaacgctaattggatatccgacctgatcgatgccgactatggaagcttcaccatccaaggtcctggtttctcttggcccgttcaccaacctcttgccgtttcttctaactccagcgcgggagttgatggttcggctggaaattcagaagccagcaaggaacctggctccaaaaagagggcgagatgtgaatcatcctctgccactagctcaaaagcatgtagagagaagcagcgccgagacaggctgaatgacaagtttaccgaattgagtgtaattttggagcctggaaaccctcccaaaacagacaaggctgcaatcttggtcgatgctgtccgcatggtgacacagctacgcggcgaagcccagaaggtgaanggacaccatttcaagtcttcagggacaaaatcaaagagttaaagactgagaaaaacgagctgcgagatgagaaacagaggctgaagacagagaaagagaagctggnagcaacagctcaaagccatgaatgctccntcancnagcttcttnnccagctcaccta

SEQ ID NO: 7000 - DNA, 635 bp, Zea mays
  Peptide Sequence Number=SeqID_10962
  Probeset Number=SeqID_21403
aaaaccaagtcctcctccgttcttgatcttgaagagaaaatggctagcgacgaagtgaaggtgatcggcgcatgggcgagtccttttgtgatgaggccgaggattgctctgaacctcaagtctgttccctatgagttcctccaggagacgtttggagcaaagagcgagttgcttcttaaatcaaacccggttcacaagaagattcccgttctgattcatgctgacaaaccggtttgtgagtctaacatcatcgttgagtatgttgatgagacttggagcgcatctggaccgtccatgctaccttccactccttatgatcgagccatcgctcggttctggggcggcctacattgacgaaaagtggtttccctctctaaaagtatccttaaaagctgagggagaagaagagaagaaagcggtgttagctcaagtggaagaagggaacgcgcttctcgagaaggccttcaacgattgcagcaaaggaaaagcgttcttcaaccgtgaacacatccgttacctcgacattgcattccggtgcttcttggcttgggtgaaagtcaccgagttggcaggggtcataaactttcgatgggtcagactcctctctgtccaatgggctgacaggtctgtatgat

SEQ ID NO: 7001 - DNA, 611 bp, Zea mays
  Peptide Sequence Number=SeqID_10963
  Probeset Number=SeqID_21404
atctttgatcttcccttgagctccctcccctgaatcgctaatctcgtcattcgtctctcgaatccttaaaaagaaccgtaggaaggagccatggatccagctgagatgaggtacttggaagaagaggacggccccatgatgaagaccatcaaaggcagcgtgactggcttcgccgccgggaccatctacggaaccattttggccacgtggaaagacgttccgagggtggagaggaacgtggctcttccggggctcatcaggaccctgaagatgatgggaactcacgggctcactttcgccgccattggaggagtttacatcggtgttgagcaggtggttcagggctatagaggcaagagagattttttcaatggtgctattggtgggtttgttgctggagcttctgtccttggctacagagcaaggagcatcccaacagcgatagctgcaggtgcaacactagcggttacatctgctttgattgactctggaggtcagaccacaagagtagaccacggcagagagtattatccttacgcccccgttgagaaaacagctcaagctgctgatgcctgatctctcttttggcggtcggaactcttaataaagga

SEQ ID NO: 7002 - DNA, 643 bp, Zea mays
  misc_feature (610)..(610): n is a, c, g, or t
  misc_feature (629)..(643): n is a, c, g, or t
  Peptide Sequence Number=SeqID_10964
  Probeset Number=SeqID_21405
aagagaggaatcgataggactctgtaactcttcccttatatgagatctatagtttaacctaaacctaaaggtttatatatcaataatgatgctttcagtgatcgttgcaatccttgtctgccttgcaagctacatttaccgatcattgaagcctccaccgccgcgagtctgcggcgttcctcacggtcctccgattacttctccgagaatcaagctcagtgatggaagatatcttgcttatagagaatctggcgttgatagagccaatgctaatcacaagatcatcgttgttcatggatttaacaactccaaagacatggaacttcccatctctaaggatcttattgaggaactagggatatattttctgtttttcgatagagcagggtatggagaaagtgatccacaccctacacgtacggtcaaaagtgaagcatatgacattcaagaactcgctgataaactcaacatcggaccaaagttctatgttatagggttatcagtcggtgcttactcggtttatagctgcctcaaatatattccccacagattagctggagcagtcttagtggttccatttgtcagctattggtggactaaagtgcctcangacatctcgagtaaagcgnnnnnnnnnnnnnnn

SEQ ID NO: 7003 - DNA, 670 bp, Zea mays
  misc_feature (601)..(670): n is a, c, g, or t
  Peptide Sequence Number=SeqID_10965
  Probeset Number=SeqID_21406
atcatttcagactctctctctctctccattcttcagctcagagagagagagagagagatggcgagttccatttcttcgatgtcaacacgtttttgtttcatccttaacaacaatggtagtcacaaaccaaacccatggctctatcaaccatcgttaagctcgaacagtctcatattctattcaaagcatcatcctcatcgtcgtccactatcttcttcttcccagattcccgtcgtagagactgatgaaggcgacgaccaagatggccttacattcagtggttgcagcggatgcgggaaggaggtgaaggagaatggttgcaacggcgacggacggattcaaggaggcattgccactgtccctggcttcggttggtggcccattaaggcttaccggccttgtcccggtttcgttgaggccggaggtagataccgccgcatagggcagagcatggatgaggttgcctttggtcgcggtgactctaaatcctccaccgattcctagctttatggctcaggtaaaaaattgcaaacatataccagtttttaattggactattgaaacatattcagattttcactttagagaaagtcttatgtannnnnnnnnnnnnnnnnnnnnnnnnnnnnnnnnnnnnnnnnnnnnnnnnnnnnnnnnnnnnnnnnnnnnn

SEQ ID NO: 7004 - DNA, 636 bp, Zea mays
  misc_feature (616)..(616): n is a, c, g, or t
  Peptide Sequence Number=SeqID_10966
  Probeset Number=SeqID_21407
attcacattctcgcacaaagcaaatcacaaaagagtaagattcgttctctatcagcagcaaatggctcgtaccaagcaaaccgcgagaaaatccaccggaggaaaggctccgaggaagcagctggcgacgaaagcggcgaggaaatcggctccggccaccggaggagtgaagaagccgcacagattccgtcccggaacggtggcgttgagggagatcaggaagtaccagaagagcaccgagcttctgatccgcaagcttcctttccagcgccttgtccgtgagatcgctcaggatttccagacggatctgagggtccagagcagcgccgtcgcggctcttcaggaagccgcggaggcttaccttgtcgggctgttcgaggacacgaatctgtgtgcgattcacgccaagggggtcaccatcatgcctaaggacatccagcttgccagaagaatcagggggtgagaagggcttaagaagagataaagaaagaacagtggttttttaggaatggcttgggttgtttagttggttgggtaaatcctcttttaaaatggtccgctggtgttagtgttggtttcagtcttttgatttgatgaatatgtctacttaatatcnatctagtggtatttctccaa

SEQ ID NO: 7005 - DNA, 633 bp, Zea mays
  misc_feature (631)..(633): n is a, c, g, or t
  Peptide Sequence Number=SeqID_10967
  Probeset Number=SeqID_21408
attccatcgctccaaaataaaaaagaatagctaaaagatggctctcgaagtctgcgtgaaagccgccgttggtgcccctgatgctctcggcgactgccctttcagccaacgggttctcctcaccctcgaggagaagaatcttccctacaaaatgcatctgatcaacatctccgacaaacctcaatggttcttagccattagtcctgaagggaaagtaccagtcctcaagaacgacgaccagtgggtgtctgattccgacgtcatcaccggcattctcgaggagaagtatcctgagccatctctcaagactcctcccgagctcgcctccgttggatccaaaatcttcggtaccttcgtgaccttcttgaagagcaaagactccagcgacggatccgagaaggccttgcttgatgagcttgaagctctcgagactcatctcaagactcatgacggtcctttcatcgccggagggaaagtcagtgctgtggatctaagcttagcaccgaagctttaccatctcaaggtcgctcttggccactacaaaagctggtctgtccccgagagcttgcctcatgttcatggctacttggaggctttggtctctccttgactcgtttgagaaaacaagacnnn

SEQ ID NO: 7006 - DNA, 613 bp, Zea mays
  misc_feature (571)..(571): n is a, c, g, or t
  misc_feature (592)..(592): n is a, c, g, or t
  misc_feature (601)..(613): n is a, c, g, or t
  Peptide Sequence Number=SeqID_10968
  Probeset Number=SeqID_21409
atcgtagtactgaacaagtgcgaagaaaaaaacatacatttttgtgtgtgtttgagtgaagaaggaaaaagtataaagagaagcgcagacgacgatctgcctactctgtctgtttgtctgtgtgcaagtaagtaatgtctgaagcagcagcacaaaaggcggctttcctcggtggacttgttgtctcattcaaggaacaaatgcacactgatgttctcgttcatcctggtgatcaatctccccccatcccgacccacaaggccatcctctcgtcaagatctaaggtcttcaggaacatgctagactccgatgaatgcaaggcctctgctgaggaatcgatcactctccccgacttgaaccacgacgagctccattctcttctcgagttcctctactccggcaacttaattgctccatacaatcagtaccgagccctctatctggctgctgacaaatacgacatcgcttatctccaagacgtttgccgcgaccatttcattgcatctctcacctctaggaacgtccttgacatcctggagctcgccagcatcccttctgacaccatctgaangcgctgcccatcaccttgtgntcagatatnnnnnnnnnnnnn

SEQ ID NO: 7007 - DNA, 606 bp, Zea mays
  misc_feature (601)..(606): n is a, c, g, or t
  Peptide Sequence Number=SeqID_10969
  Probeset Number=SeqID_21410
gagagctcactagtccccccccccccccatttaggcctgcactcctttcttcttccctgtcgccgcaacaaaaagagaaacgcaataggctttttgtaactaactcttcactgcaacatgactttcaagcgtaggaacggtggcaggaacaagcacaaccgtggtcatgtgaagcccatcaggtgttccaactgcgggaaatgctgtcccaaggataaggctatcaagaggttcatcgtcaggaacatcgttgagcaggctgccatcagagatgttcaagaagccagtgtctacgatggttacactcttcccaagttgtacgctaagacgcagtactgtgtctcatgtgctatccactctcacgttgtgagagtccgttcccgcaccaaccgtagggttcgtaccccacccccacgtttcgtcagacgcaaggaggatgctcccaagcccggacaacctggtcaggctgctcgccctgctggtggtgcccctgctgctcctcgtgcctaaaaactgcaagaagctggcaacacaaacctctttatattctcgtgtctcgcgcagggttgtctagaatattgcaagatgttttctacatttnnnnnn

SEQ ID NO: 7008 - DNA, 663 bp, Zea mays
  misc_feature (601)..(663): n is a, c, g, or t
  Peptide Sequence Number=SeqID_10970
  Probeset Number=SeqID_21411
tcacttgatagttttctttattataagtacagtgacggactttgctttctgtctacagaaaattatcaaagcccagtggtgtgtgtgtgtatctgactccgtttcgctcatcttctatcagaaaaatggcagaaaatgctgatttggtggagtggccaaagaaggataagcgtcgttttctccatgttgtgtaccgcgttggtgatcttgatcgcactatccagttttacacagagtgctttggcatgaaggtgttgaggaaaagagatgtccctgaggagaagtactctaatgctttccttgggtttggtcctgaaacctccaacttcgttgtcgagctcacttacaattatggtgttagctcatatgacattggaactggatttgggcatttcgctatttcaactcaagatgtttctaagatggttgaggcggttcgtgccaagggtggaaatgtccccagagaggctctggcccggtcaaaggtggagagcaggggcctttgcctttggccaaggaccctgatgggtacaccttttggagcttaaccacagagaggtccacccccctggaaccttctttgcaaaggaaggtttcgggnnnnnnnnnnnnnnnnnnnnnnnnnnnnnnnnnnnnnnnnnnnnnnnnnnnnnnnnnnnnnnn

SEQ ID NO: 7009 - DNA, 650 bp, Zea mays
  misc_feature (457)..(457): n is a, c, g, or t
  misc_feature (622)..(650): n is a, c, g, or t
  Peptide Sequence Number=SeqID_10971
  Probeset Number=SeqID_21412
gaaccactttatgtgctgacacagtcgccggcgaaaagtctcatctcaccgccactcgattccgtgccctgaagtcctccgacatttctctctcttctccgagaagatttcgactggcgatgggagacgagaagccgacggtggtgatggccaatcgagaaagagatctggagcttctgatgcccgttgctgataaagaggaaggttctacttcgaagccgtcttcctcttcctcttcgcatcatcaggctagccacgagactttaagcttgttcataaggggttgggcctcaaagaagttcatgactggctgtgttatcctccttcccattgcgattacattttatataacatggtggtttattcactttgttgatggtttcttctctcccatttatgctcaacttggaatcaaccttttttggtttcgggttcttgacttcatccgcattcatcnttcttgggtcggggtgttcatgtcctcaatggtgggggggcttcggttctgacccgggggggagtggtttatcaagcgggatgccattttgttcgtcacatcttacaacgcttccaagcaattcagcactgccctttctcctccgcagttacacaaccatgcctnnnnnnnnnnnnnnnnnnnnnnnnnnnnn

SEQ ID NO: 7010 - DNA, 740 bp, Zea mays
  misc_feature (1)..(93): n is a, c, g, or t
  misc_feature (737)..(740): n is a, c, g, or t
  Peptide Sequence Number=SeqID_10972
  Probeset Number=SeqID_21413
nnnnnnnnnnnnnnnnnnnnnnnnnnnnnnnnnnnnnnnnnnnnnnnnnnnnnnnnnnnnnnnnnnnnnnnnnnnnnnnnnnnnnnnnnnnnngtgacggttttgagagaaagctagaagagagatttttcaaaaaaaaaatcaacagaagagaaagagcaaaaacccaaatcgattacacgcgctgattccattgttccgttgtttccactgataatccctaaaatggcgagtgagagttcccaatcgtcgtcgccgtcgccgggcgatacgttcattgggagcttcatcagtctaatttctaagtccgagatccgctacgaaggcattctataccacctcaacgttcacgactctacgctaggtctgaagaaggtaagatcttgtggtacagaggggaggaagaaagatgggccgcaagttccaccgtctgatgctgtttacgattacattcttttccggggaagtgacatcaaggatctgcaagttaacccttctccatctgtacaatcaagaaaggatattcaaagcgaaaaggacatcagtcagtcctctcagtctaggccagctgtgagctctccgcctactggatatgaagaagggttatgggtttggggagaggagggacaatgggtccatacacctgctttgactagtaatccggttcctaccacactacattcaccggttccttttagggagggagggagcttgacagaatccccagcgtctatgcnnnn

SEQ ID NO: 7011 - DNA, 637 bp, Zea mays
  misc_feature (637)..(637): n is a, c, g, or t
  Peptide Sequence Number=SeqID_10973
  Probeset Number=SeqID_21414
gtttaactgccgtaaattatctggaacttgcaccaactaggtcaccataacgtcttgatcacgtggcggaatcccccagcaaaacgctgaaacatggagagactttcaaggaacctccgatgtttacagagcaaaagcaagctccagcgttgttggtacacaaaagatcgagtcacttatacagaaacggaagcccaagtttgacactaacaagttgcagcaagtagcaacggatgataaaggattgtggattgctgtcgtggggttggtgctgatgtcatcatgacttcagagtcttgcagaaatggtactgagctgtgcagcgaagcaatagaaaatctggagaagaagtatgatgtggtccttaacattcaaggagatgaacaactcattgagcctgtgattatagacagtattgtcaaagcacttcaggtagcacctgatgcagtatttagcacagcggtgacgtcattaaaaccagaagacggagatgatcctaaccgagtcaaatgtgtggtggacaaccgtggctatactgtctatatctccagtggtttggttccgtataacacgagtggtaacgtcaatccagatttccttacatgcttcatcttgaaatacagctacgacatctaan

SEQ ID NO: 7012 - DNA, 657 bp, Zea mays
  misc_feature (657)..(657): n is a, c, g, or t
  Peptide Sequence Number=SeqID_10974
  Probeset Number=SeqID_21415
aaacgttcaccctagacagtttgttattgatcttcatctttctctgactcggacaaaaaaagatgtggtttttcggaaagaaaggagcatcaggattctcggctcgttccacagcagaagaagtaacacatggtgttgacggaactggcctcactgccattgtcacaggagcatcgagtggtataggagtggagaccgcgcgtgttcttgcactgcgtggtgtgcacgtggttatggcggtgaggaacactggctcgggtgctaaagtcaaagaagatattgtcaaccgggtccctggagctaaacttgatgtcatggagttagatctcagctcaatggactctgtcaggaagtttgcatctgattacaaatcatctggtcgtcctctcaacctcttggtcaacaatgctgggataatggcatgtccctttatgctctccaaggacaacattcgagcttcagttcgcacccaaccatttaggtcattttctgttgacaaagctactgctagatacaatgaagaacacatcacgtgagagcaaaagagaaggcaggattgtgaatctatcatcggaagctcatcggtactcgtaatccagaaggagcccccttccatatgatctccggcgaagagcccggtttaccggtaattccccn

SEQ ID NO: 7013 - DNA, 633 bp, Zea mays
  misc_feature (550)..(550): n is a, c, g, or t
  misc_feature (601)..(633): n is a, c, g, or t
  Peptide Sequence Number=SeqID_10975
  Probeset Number=SeqID_21416
actaccgcttgcttggttcacaatcacagacagactcgagaggagactgtgaggatgaggataatctcaatggcctccaccatccgaccttccttgctaggctgcgtctctgcatctcctcgcttccccgtcgtctccaggaatctctctcgctccaccctctctttctcccatgttactcagtcaaagcttttgactttaagaagaagcgtaagctgcttaggagtagctgaatctggaaacgcaagcacggccgctactgaagaggatcttctcaagtgggtgaaagatgataacaggagaatgcttcacgtcgtttacccgtgttggcgatttagacccggaccataaaattctataccgaatgtcttggaatgaagctttctacgcaagcgtgatataccagaagagaagtatacaaatgcttttccttggttatgggcccgaaagattcacactttgtcattgagctcacttataattatggaggtgacaagtatgacattggagcaggttttggtcactttgggtatggctggtcgacgatgtnggcgaaaactgtggaactttataaagcgaaagggggcaaggtaacaaggannnnnnnnnnnnnnnnnnnnnnnnnnnnnnnnn

SEQ ID NO: 7014 - DNA, 633 bp, Zea mays
  misc_feature (1)..(33): n is a, c, g, or t
  misc_feature (84)..(84): n is a, c, g, or t
  Peptide Sequence Number=SeqID_10976
  Probeset Number=SeqID_21417
nnnnnnnnnnnnnnnnnnnnnnnnnnnnnnnnntccttgttaccttgccccctttcgctttataaagttccacagttttcgccnacatcgtcgaccagccatacccaaagtgaccaaaacctgctccaatgtcatacttgtcacctccataattataagtgagctcaatgacaaagtgtgaatctttcgggcccataaccaaggaaaagcatttgtatacttctcttctggtatatcacgcttgcgtagaaagcttcattccaagacattcggtatagaattttatggtccgggtctaaatcgccaacacgggtaaacgacgtgaagcattctcctgttatcatctttcacccacttgagaagatcctcttcagtagcggccgtgcttgcgtttccagattcagctactcctaagcagcttacgcttcttcttaaagtcaaaagctttgactgagtaacatgggagaaagagagggtggagcgagagagattcctggagacgacggggaagcgaggagatgcagagacgcagcctagcaaggaaggtcggatggtggaggccattgagattatcctcatcctcacagtctcctctcgagtctgtctgtgattgtgaaccaagcaagcggtagt

SEQ ID NO: 7015 - DNA, 720 bp, Zea mays
  misc_feature (1)..(6): n is a, c, g, or t
  misc_feature (659)..(720): n is a, c, g, or t
  Peptide Sequence Number=SeqID_10977
  Probeset Number=SeqID_21418
nnnnnnagacattttctctcgtctcgccgcaggagaaaggaagctctcttcagtgacattctgaactgaagaaatgaagcacaacaatgttatcccgaatggtcatttcaagaagcactggcagaactatgtcaagacatggttcaaccagcctgccaggaaaaccagaagaagagttgcgagacagaagaaggctgtgaagatcttcccacgtcccactgctggacctctccgccctgttgtgcatggtcagaccctaaagtacaacatgaaggtcagaactggtaaaggattcactcttgaagagctcaaggctgctgggatccccaagaagttggcacccaccattggtatctctcttgaccatcgtcgcaagaacagatcattggagggtcttcaatccaatgtccagaggctgaaaacttacaaggctaagttggtcatcttcccgcgtcgtgccaggaaggtcaaggctggtgattctactgcagaagagttggctaatgccactcaagtccagggagattacatgcctatcgtccgtgagaagcaagcaacggagctagtgaagctgacctctgagatgaaatcggtgaatgcttacgacaagattcgtctagagcgccacaaacaaggagacatgccagggtgctaagagnnnnnnnnnnnnnnnnnnnnnnnnnnnnnnnnnnnnnnnnnnnnnnnnnnnnnnnnnnnnnn

SEQ ID NO: 7016 - DNA, 610 bp, Zea mays
  misc_feature (369)..(369): n is a, c, g, or t
  Peptide Sequence Number=SeqID_10978
  Probeset Number=SeqID_21419
atcatttctctcgtctcgccgcaaccttttctctgacattcatctgaggtgaagaaatgaagcacaacaatgtcatccccaatggtcatttcaagaagcactggcagaactatgtcaagacttggttcaaccagcctgccaggaaaaccaggagaagagttgcgagacaaaagaaggctgtgaagatcttcccccgtcccactgctggacctcttcgccctgttgtgcacggtcagactctcaagtacaacatgaaggtccgaaaccggtaaaggtttcactcttgaagagctcaaggctgctggaatccccaagaagttggcaccaaccattgggtatctctgttgaccatcgccgcaagaacagatnctctcgaggggtcttcagtccaatgtccagaggctcaaaacctacaaggggctaagttggtcatctttcccgcggcgggccaggaaggtccagcggctggtgattctactgctaagaagagttggccattgccactcaaggtcccaggggactccatgccctttgtggtccgtgagaagcacccaaatgaagctttgtgaagctgaccctctgagatgaaatcagtccaagctttttggaa

SEQ ID NO: 7017 - DNA, 801 bp, Zea mays
  misc_feature (701)..(704): n is a, c, g, or t
  misc_feature (716)..(801): n is a, c, g, or t
  Peptide Sequence Number=SeqID_10979
  Probeset Number=SeqID_21420
aaaaattaaagtactcgtgttcacctcgtgcccatccagattcttatcttctctcgaaaaaggttttagcgaagatgacgaagaactacccagctgttagcgaagagtaccagaaggctattgagaagtgcaagaggaagctgagaggcttgatcgctgagaagaactgtgcaccaatcatggttcgcctcgcatggcactctgctggaacatttgattgcgcctcgaggactggtggtccgtttggaacaatgaggtttgacgatgagctagctcatggagccaacaatggtctccacattgctcttaggttgttggagcctatcagggagcagttccctaccatctcccatgctgatttccatcagcttgctggtgttgtggctgttgaagtcaccggtggacctgaaattcctttccaccctggaagagaggacaagccccagccacctccagagggtcgtctccctgatgccacaaagggctgtgaccacttgaggcaggtcttcttaaagcagatggggtttaactgaccaagacattgtcgctttatctggtgcccacactctgggacgatgccacaaggataggtctggcttcgaaggtgcatggacatcaaaccctctaatcttcgacaactcttacttcaaggaactcttgagcggagagaaggaagccttcttcgcttgtctctgacaaannnnctattggacgannnnnnnnnnnnnnnnnnnnnnnnnnnnnnnnnnnnnnnnnnnnnnnnnnnnnnnnnnnnnnnnnnnnnnnnnnnnnnnnnnnnnn

SEQ ID NO: 7018 - DNA, 644 bp, Zea mays
  misc_feature (629)..(644): n is a, c, g, or t
  Peptide Sequence Number=SeqID_12676
  Probeset Number=SeqID_21421
ctttttattcttcttcatctctttgatcgtcatcacacagatcctccattctcttttcgttcagatcttggaaggtcctcagctcaaggagaggagaagaggaacgtaaagactttgaaggatgtcttcattcacaggaactcagcagaagtgcaaggcttgcgagaagacggtgtaccctgtggagcttctctctgctgatggtgtcagctatcacaagtcttgcttcaaatgctctcactgcaaatccaggcttcagctgagcagatactcatcaatggaaggtgtgctgtactgtaagcctcattatgagcagctcttcaaggagtctggtagcttcaccaagaactttcagtcccctgttaaacctgcggctgagaaatcaagtcctgagctgacaaggacccctagccgagttgccggtatgttctcaggcacacaagaaaaatgcgccacttgcagtaaaactgtctatcctatcgaaaaggtaacagtggagagccagacgtatcacaagtcctgcttccagtgctcacacggaggctgcccaatctcgccttcaaactacgcagctcttgaaggaatcctctactgccagcaccatttcgctcagcttttcaggaaaaggnnnnnnnnnnnnnnnn

SEQ ID NO: 7019 - DNA, 576 bp, Zea mays
  Peptide Sequence Number=SeqID_12677
  Probeset Number=SeqID_21422
agaataattctctgtccgtcgaatcattttttgtttcagcgtggaaagagatgaccatggcagcaaacttggcgagacggctgatcggaaaccgatcagcgcagatcctcgggacggcgaactccacctcaaccgcagccacttccgccgctaggactttctgctcctccaccactccaatcaccgcaaccttgttccctggcgacgggatcggccccgagatcgctgaatccgtcaaaaaggtgtttacaacggccggtgtgccgattaactgggaagaacattatgttagcactgagattgatccgagaacgcagagcttcttgacgtgggagagtctcgaatccgtgcgtagaaacaaagttggtctgaaaggtccaatggcgactccaataggaaaaggtcaccgttctttgaacttgactcttaggaaagagctgaatctatacgccaatgttaggccctgctacagtcttcctggttacaagactcgatacgacgatgttaatctcatcaccattagggagaacactgagggagagtacagtgggcttgaacatcaggttgttagaagtg

SEQ ID NO: 7020 - DNA, 632 bp, Zea mays
  misc_feature (601)..(632): n is a, c, g, or t
  Peptide Sequence Number=SeqID_12678
  Probeset Number=SeqID_21423
cttttgcattagggttttcacttcggctgctgctagtgagtgagcaacgaatcttcaaccccaaccatggcgacgaaacaagccaaagcgtccgtgcaatgcttcggaaggaagaagacggccgtcgccgtcacccactgcaagcccggctgcggtctgatcaagctcaacggctccccgatcgagctgttcaacccagagatcctccggttcaagatcttcgagccggtgctcctcctcggaaagcaccgtttcgccggcgtcgacatgaggatccgcgtcaacggcggtggtcacacttctcaggtctacgcgattcgtcagagcatagccaaggcgctcgtggctttctaccagaagtatgttgatgagcagtcgaagaaggaggtgaaggatattttgataaggtacgataggactctgctcgtggcggatccgaggaggtgcgagccgaagaagtttggtgggcgtggtgctcgttctcgtttccagaagagttaccgttaaaacataatctggtttgtgtttttttttctgatctcaaccgttttgagactttaattatctttttgagttttgtctttttgggtattggataatnnnnnnnnnnnnnnnnnnnnnnnnnnnnnnnn

SEQ ID NO: 7021 - DNA, 581 bp, Zea mays
  Peptide Sequence Number=SeqID_12679
  Probeset Number=SeqID_21424
attagggttttctcttcttctcatctatcacttcggctgctgcaagtgagccatggcgacgaaaccagctaaacaatccgtgcaatgcttcgggaggaagaagacggccgtcgccgtcacccactgcaagcccgggtgcggtatgatcaagctcaacggttccccgatcgagctcttccagcccgagatcctccggttcaagatctacgagccggtccttctcctagggaagcaccgtttcgcgggtgtcgacatgaggatccgtgttaacggtggtggtcacacttcacaggtctacgcgattcgtcagagcatcgccaaggcgttagttgctttctaccagaagtacgttgacgagcagtcgaagaaggaggtcaaggatatcttgataaggtacgataggactcttctcgtggcggatccgaggaggtgcgagccgaagaagtttggtgggccgtggtgctcgttctcgtttccagaagagttaccgttaatcaaaatctggtttgttcattgctcaaaatgagacgttagactctcatttgcgttttttttttattattgggaagggggaaaatggg

SEQ ID NO: 7022 - DNA, 618 bp, Zea mays
  misc_feature (601)..(618): n is a, c, g, or t
  Peptide Sequence Number=SeqID_12680
  Probeset Number=SeqID_21425
atgactgatccttattccaatttcttcacgggctggttcaagtccaatccctttcaccactaccctaattcctcaactagcccttcgcctcctcctcctcactcttctttcttcttccctcactccggcgacctccaccgtccaccgccagcaccaactcctcctccttcccctcctctccgtgaagccctccctctcctcagcctcagccccgccaacaaacaacaacaccaccatgaccatcaaattcaagaaccaccttcaatctccatggatgttgactacgatcatcatcaccatcaagatgatcataacctcgatgaccatgaccatgacgtcactgttgctcttcacataggccttccaagccctagtcctcaagatatggcctctttgctcatgatgtcttcttcctcctcttcctcgaggcccactactcactatcttgaggacatgaacggaaagaaagatcttgacaacgactaccatcaaggcggcgttggaggaggagaagatgacgatgaagattcagtcggtggagacggcggatgtagaataagcagactcaacaaggggtcaatattggatccctacaccttcnnnnnnnnnnnnnnnnnn

SEQ ID NO: 7023 - DNA, 618 bp, Zea mays
  misc_feature (1)..(18): n is a, c, g, or t
  Peptide Sequence Number=SeqID_12681
  Probeset Number=SeqID_21426
nnnnnnnnnnnnnnnnnngaaggtgtagggatccaatattgaccccttgttgagtctgcttattctacatccgccgtctccaccgactgaatcttcatcgtcatcttctcctcctccaacgccgccttgatggtagtcgttgtcaagatctttctttccgttcatgtcctcaagatagtgagtagtgggcctcgaggaagaggaggaagaagacatcatgagcaaagaggccatatcttgaggactagggcttggaaggcctatgtgaagagcaacagtgacgtcatggtcatggtcatcgaggttatgatcatcttgatggtgatgatgatcgtagtcaacatccatggagattgaaggtggttcttgaatttgatggtcatggtggtgttgttgtttgttggcggggctgaggctgaggagagggagggcttcacggagaggaggggaaggaggaggagttggtgctggcggtggacggtggaggtcgccggagtgagggaagaagaaagaagagtgaggaggaggaggcgaagggctagttgaggaattagggtagtggtgaaagggattggacttgaaccagcccgtgaagaaattggaataaggatcagtcat

SEQ ID NO: 7024 - DNA, 645 bp, Zea mays
  misc_feature (636)..(645): n is a, c, g, or t
  Peptide Sequence Number=SeqID_12682
  Probeset Number=SeqID_21427
gaaaaaccagatctagagagcgtcttcatacacgccctcccatttcttcttctctgcgatcttccgcgaaacgaaaatgagggagtgcatctcgatccacatcggtcaagccggtatccaggtcggaaacgcctgttgggagctttactgccttgagcatggcattcagcctgatggccagatgcctggtgacaagactgttggcggaggtgacgatgctttcaacaccttcttcagtgagaccggtgcaggcaagcacgtcccgcgtgccgtctttgtcgatcttgagcccactgtgatcgatgaggtcaggaccggtacttaccgtcagcttttccaccctgaacagctcatcagcggtaaagaagacgcagctaacaacttcgctcgtgggcactacaccattgggaaggaaattgttgatctgtgcttggaccgtatcagaaagctcgctgataactgtactggtctccaaggcttccttgtcttcaacgctggtggtggagaaactgggtctgggtcttgggtcgctcctcctcgagagactttctgtcgactacgggaaaaggcccagctccggggttcactgtttacccatctccccgtctcccccccctctggtgttgagccttacannnnnnnnnn

SEQ ID NO: 7025 - DNA, 574 bp, Zea mays
  Peptide Sequence Number=SeqID_12683
  Probeset Number=SeqID_21428
accacaccaccagatctagatttattttttcccaggagagcgtcttcatacacgcgccccccttcgtctacgaatctgaaacgaaaatgagggagtgtatctcgatccacattggtcaagctggtatccaggtcggaaacgcctgttgggaactttactgccttgaacatggcattcagcctgatggccagatgccgagtgacaagacagttggcggaggtgacgatgctttcaacaccttcttcagtgagaccggtgctgggaagcacgtcccacgtgccgtctttgtcgaccttgagcccactgtgatcgacgaggtcaggaccggtacttaccgtcagcttttccaccctgaacagctcatcagcggtaaagaagacgctgccaacaacttcgcccgtggacattacaccattgggaagggaattgttgatctgtgtttggaccgtatcaggaagcttgctgataactgcactgggtctccaagggttccttgtcttccacgctgttggaggaggaactggatctggtcttggatcacttctcctcgagcggatctctggtcgagtacgga

SEQ ID NO: 7026 - DNA, 648 bp, Zea mays
  misc_feature (620)..(648): n is a, c, g, or t
  Peptide Sequence Number=SeqID_12684
  Probeset Number=SeqID_21429
atccgattcactccaatacagattcatcgccttaaacccctctttaaatccattaactacgatctacccttcaattcgagtttctcatctgcaaggcggtctatctgcgattagccttcctccaataaaattcatcttcccagttcgttaaaacaacaaagtaaatttatttaccgacaaatggctgatttcaaagttcttctttctgatttgaagtcaatcgcggttgggaacttatatgctcttactagatgcaaagttgctttgttgatgacatagaagaaaagaagggagggagcagaaggagagtattgttaatggtatcagagagactgtcaaaaatataactctgtccatgtttctcttttgaaaacatgaaaaatatcaaattcaaggagtttagacaacagtttagacacaacgaaaggttcttcctcggctagaacaaattgatgcagtttgctcttggtccttctgcttgggatgaaatccatcctgccatctttaaagcttccaagattcttcatggtgagatgactgcttattacagatatgccaaaggaagacgttgaaagcttattttgactcttatgaagatcaccccttttacagggcggggnnnnnnnnnnnnnnnnnnnnnnnnnnnnn

SEQ ID NO: 7027 - DNA, 648 bp, Zea mays
  misc_feature (1)..(29): n is a, c, g, or t
  Peptide Sequence Number=SeqID_12685
  Probeset Number=SeqID_21430
nnnnnnnnnnnnnnnnnnnnnnnnnnnnnccccgccctgtaaaaggggtgatcttcataagagtcaaaataagctttcaacgtcttcctttggcatatctgtaataagcagtcatctcaccatgaagaatcttggaagctttaaagatggcaggatggatttcatcccaagcagaaggaccaagagcaaactgcatcaatttgttctagccgaggaagaacctttcgttgtgtctaaactgttgtctaaactccttgaatttgatatttttcatgttttcaaaagagaaacatggacagagttatatttttgacagtctctctgataccattaacaatactctccttctgctccctcccttcttttcttctatgtcatcaacaaagcaactttgcatctagtaagagcatataagttcccaaccgcgattgacttcaaatcagaaagaagaactttgaaatcagccatttgtcggtaaataaatttactttgttgttttaacgaactgggaagatgaattttattggaggaaggctaatcgcagatagaccgccttgcagatgagaaactcgaattgaagggtagatcgtagttaatggatttaaagaggggtttaaggcgatgaatctgtattggagtgaatcggat

SEQ ID NO: 7028 - DNA, 644 bp, Zea mays
  misc_feature (1)..(3): n is a, c, g, or t
  misc_feature (639)..(644): n is a, c, g, or t
  Peptide Sequence Number=SeqID_12686
  Probeset Number=SeqID_21431
nnnatccacaatgggtcgtgtcatcagagctcaacgtaagggagcaggttccgtcttcaaatcccacactcaccaccgtaaaggccccgccaagttccgcagcctcgactacggcgagagaaatggatacctcaagggcgtcgtgacggagatcatccacgatcccggccgtggtgcgccgctcgctcgcgtcgccttccgtcatcctttccgttacaagaagcagaaggagctcttcgtcgccgccgaaggcatgtacaccggacagttcttgtactgcggtaagaaagcgacgctcgttgtcggaaatgttctcccgcttagagctatccctgaaggagctgttgtctgtaacgtcgagcatcatgtcggtgaccgtggtgtgctcgctagagcttctggcgattacgccatcgtgatttcgcacaaccctgacaacgacactactaggatcaagttgccatctggttcgaagaagattgttccgagtggatgcagggccatgattggtcaggtcgctggtggtggaagaacggagaagccgatgctcaaggcgggaaacgcgtaccacaagtaccgtgtgaagagaaactcgtggcctaagggtttcgtggtgtggctatgaatccagtgcagctnnnnnn

SEQ ID NO: 7029 - DNA, 586 bp, Zea mays
  Peptide Sequence Number=SeqID_12687
  Probeset Number=SeqID_21432
taacgcaggaatcgaaaatcgaacaatcacggacccaaattcgaatctgaagaaactcatcggagcttgattctctccgtcgtcgccgagatcgattccatcctgtggcggctccgaatcgagtggggagagtatggattgggagaacgttgcagcagaggacgtgatcgaggcgctgagagaagtggagtggtcgacgcctcctcgctcattcggcgaattcttctctagattcgcgttcccgcgctctttctctaagtggaggagccgtctcaaatgccatctctactactatcggacgaattactttatcctggtgattcttgttctaggtcttgctctgattacaagaccattggctattcttggtgctgctttcaccgccttgagcttagctttccttaacgatagttttgcggctacttttaatgagaagtttataaggactattaggcttttctctccacacttggcagctaagatgaggcctccccacatgcctggcatacgtgggagatcagcagcaaggaggacggtttacgtttgggggaaaccacgatggggggtttggcgtactttcctgaag

SEQ ID NO: 7030 - DNA, 580 bp, Zea mays
  Peptide Sequence Number=SeqID_12688
  Probeset Number=SeqID_21433
atcaagattctcaattctacccgacgcttcttcagattctctttgtcatcggtttcaaaacaatcggagagatcaaatcaatggcttcgctcgattccgacgtcaccatggttcccgcaggagaatcctcaagcagcgtcgccccatcgtcgtcgtccaccaagaaggcgaagagattcgaagttaagaagtggagcgccgtggctctctgggcttgggatatcgttgttgataattgcgctatctgcagaaaccacatcatggatctgtgtattgaatgtcaggctaatcaggccagtgctacgagtgaggagtgcactgttgcttggggagtttgcaaccacgccttccactttcactgcatcagcagatggctaaagactcgtcaagtttgtccattggataacagtgagtgggagttccagaagtatggtcactaaaccaactaatcgtaccggcaaatcatttggttggcgcatatgagatgctgatatttcgctcgaaaggtccttggggttttttttttttccggcttggccgcaaagttggtcaaaacagaggttaccctctgttgaatata

SEQ ID NO: 7031 - DNA, 432 bp, Zea mays
  Peptide Sequence Number=SeqID_12689
  Probeset Number=SeqID_21434
attttctttcgatcgtctcgcatcgacttttattagggttttcgtttcctgagagatcaatcaatcaatcgatatggcttccctagattccgacgtaaacatgatccctgctggtgaatcctccagctccgttgccgcttcttcgtcgagcaagaaggccaagagattcgaagttaagaagtggagcgccgtggctctctgggcttgggatatcgttgttgacaattgcgccatctgcagaaaccacatcatggatctctgtattgaatgtcaggctaatcaggccagcgctacgagtgaggaatgcactgttgcttggggggtttgcaatcacgccttccactttcactgcatcagcagatggttaaagactcgtcaagtttgcccattggataacagtgagtgggagttccagaaatatggtcactaaat

SEQ ID NO: 7032 - DNA, 639 bp, Zea mays
  misc_feature (639)..(639): n is a, c, g, or t
  Peptide Sequence Number=SeqID_12690
  Probeset Number=SeqID_21435
atgaaaaccaccctttactgaaaaacaataaaatctaagagaatgaaattttcatattctctatccaaacgatttgtttcccctattttggctatgcagttcctcatcatacatagtgtttcttcattgaaccttaccaatgagtatctcaaccacaaatgcttccttgatcaagggatatataatactggaagtgagtacgaggacagcctcaacattattttacgtagtgttcgtactggtagttattataagaacggtttcatgcgcacaagcaagggtcgtgaacctgctcctgatgctgtcaccgtcatgttccagtgtcgtggtgactcttatgggtctaaatgccgtacatgtgccgacaccgcagtcgcagggtttcgtagaagatgtctaaggaacaaaggaggaataatatggtacgaccaatgttttctctgggttagtgcaatcggtgaagacatgccaatcaatactaattacaagaatattttttctatgtacaacccaaataacgtaagaggggatgcaaaattgtttgccaagagggtgggccggatgttttctctgagctaacactttagggttgttaaaaataccgaaagtccactctggcgtcatatttttgcgcagaan

SEQ ID NO: 7033 - DNA, 641 bp, Zea mays
  misc_feature (641)..(641): n is a, c, g, or t
  Peptide Sequence Number=SeqID_12691
  Probeset Number=SeqID_21436
aacaaaaagagagaagaaacatctctcctctctttgaacaagaacatcaagaacaatggcttgtactaatctaacaacaatgtgggtttcatcaaaactatctatttctgattcctcttccttgtccttccgttctattctcaacccacttcctctcccaaaccacaactcatctccttcaagatcttcctctgtctctccaatccagtcctctcttcgtgagctccgagaccgtatcgactcagtcaaaaacactcagaagatcactgaagccatgaagcttgtcgctgcagcaaaagtcaggagagctcaggaagctgtggtcaacggccgaccattctcagaaaccctagttgaagttctttacaacatcaacgaacagcttcaaaccgatgatatagatgtgcccttaaccaaaatcagaccggttaagaaagttgcactcgttgttgtaacaggagaccgaggattatgcggtggattcaacaacttcatcatcaagaaagcagaggcaaggatcaaagagcttcaaggcctaggtcttgactacacagtcattagcgtggggaaaaagggaaactcttatttcctccgtcgtccttacatccccgtcgacaagtacctcgaaagccgaacccttn

SEQ ID NO: 7034 - DNA, 649 bp, Zea mays
  misc_feature (447)..(447): n is a, c, g, or t
  misc_feature (460)..(460): n is a, c, g, or t
  Peptide Sequence Number=SeqID_13427
  Probeset Number=SeqID_21437
aaacagagataggcaaaactgcttcgagaatgacgattgctccttccttgttgtcatcatcttcctcagcctctcaattcctccctagattcccaaccgccgctaggttcaatgtagccgcttcacggagcagagccgtcaccgtcgtcgctgcatccgtcaccgacctatccagcgttgacagcacgaccatcgccgtactcggaggcggatcagtcgcagctctggcgacgatcgtttccttgacggacccggagaggaggcggaaactgcaggcggaggaagtcggaggaggcgacaaggaggtggtgagggagtatttcaacagcacggggttcgagcggtggaggaagatctacggcgagactgacgaagtgaaccgcgttcagaaggatatacgaatcggccacgccaaaacggttgagaaaacgatgctcatgctgacgngaagaaggttcgnttagccggcgtaacggtctgcgacgctggctgcgggacaggtctgctctcgattccacttgctaaggaaggtgcgatcgtctccgctagcgatatctctgcagctatggtcgccgaagctgagatgaaggcaaagcagcagttagcatcagagaatctgccgagatttggagtgaatgattaagaggct

SEQ ID NO: 7035 - DNA, 636 bp, Zea mays
  misc_feature (625)..(636): n is a, c, g, or t
  Peptide Sequence Number=SeqID_13428
  Probeset Number=SeqID_21438
aggatttatcttcgtcttcaatctctgaaaatctaaacaagcaatggaatttcaggaggtcgagggaaacgaatcgttatgaggaaccttgatgtcaagctttgattgcgttgcttggtcgtctcctacgaaacgttacgagagttattgattcatccactttaaccaacttgataagcaaaatttctcattcaatgctacttctaggcggtgcatctcaacctataaaaaggcgggtctttgttcttccgccgttgaggtgggactgctccgattctgcaaatcaagaaatgtatgcacttcctagatgcaaaggatgtgactggtcagaaactcaggctgcaagattcctctctattgattcgattcagtgattcaccctctttcgatgagtaacgaaccggtctccccaatacctgaagaatattttaggttccgcaatcacagtgagatgcttgattactttgacaatgaatacatcagcagcatcattgctgaggggctatgccaaggtttgaacctcgctctgatcgtagctgagcttaatgaattatcatcactcgggtcatacatctatatatatgtttaatagtttagaatatggcagggtttgggctctgattgnnnnnnnnnnnn

SEQ ID NO: 7036 - DNA, 636 bp, Zea mays
  misc_feature (1)..(12): n is a, c, g, or t
  Probeset Number=SeqID_21439
nnnnnnnnnnnncaatcagagcccaaaccctgccatattctaaactattaaacatatatatagatgtatgacccgagtgatgataattcattaagctcagctacgatcagagcgaggttcaaaccttggcatagcccctcagcaatgatgctgctgatgtattcattgtcaaagtaatcaagcatctcactgtgattgcggaacctaaaatattcttcaggtattggggagaccggttcgttactcatcgaaagagggtgaatcactgaatcgaatcaatagagaggaatcttgcagcctgagtttctgaccagtcacatcctttgcatctaggaagtgcatacatttcttgatttgcagaatcggagcagtcccacctcaacggcggaagaacaaagacccgcctttttataggttgagatgcaccgcctagaagtagcattgaatgagaaattttgcttatcaagttggttaaagtggatgaatcaataactctcgtaacgtttcgtaggagacgaccaagcaacgcaatcaaagcttgacatcaaggttcctcataacgattcgtttccctcgacctcctgaaattccattgcttgtttagattttcagagattgaagacgaagataaatcct

SEQ ID NO: 7037 - DNA, 629 bp, Zea mays
  misc_feature (600)..(629): n is a, c, g, or t
  Peptide Sequence Number=SeqID_13429
  Probeset Number=SeqID_21440
atggaaacagcgtcgagagtcgaagcagttaccaaaggcggcttgcctgtagtcccttcccagtacatccaaccaccggaagctcgccccaacctccaccacgccggcgacgctgctccaatcccaaccatcgacctctctaactccgattccgcaaaagaatccatcggcgaagcttgccgcaactggggagccttccacgtggtcaaccatggcgtccccatccatctcctcgatcgaatgaaggctctaggcctatccttcttccaagactgtccgttggaagacaagctccaatacgcctgcgactcaacctccgcggcctccgaaggttacggaagccgtatgctcctcggagccgaaggcgacgtcgttttggattggagagattacttcgatcaccacacgttccctctctctcgccgcaacccctctcattggccgttacgtcctcctgactacagacaagtagtggaagagtatggtaacgagatgaagaaactagctcaaaagctgttggggataatctcagagagcttgagtcttccatgctcatctatagaggaagctgttggagaatctatcagaactttacatgannnnnnnnnnnnnnnnnnnnnnnnnnnnnn

SEQ ID NO: 7038 - DNA, 594 bp, Zea mays
  Peptide Sequence Number=SeqID_13430
  Probeset Number=SeqID_21441
atcagaatgagaagataaacggatccgatctagggcgtctcttcttcttcttcttcttcttcttcgatatctatctccatcgtggatcgaagagctaaggtggaacatggacaaaggcaaagcagtgatgggtgctggccggagatgggccgtcgatttctccgatcaatctaccggtccatcttcccgcgacatcctcgatccggcctggcttctctcgggctcctcccgaacagggatgattcagcaacgagccgccaaaagaaagacgctgaggctagttggaaacttcagaaagcatgggaagtaccgcagtcaccgtttaagaatctggggatgatggggttcaggatgtggatggctggggacactgttcacctctttagcattgggatcactttccctgctctttgggagcctctcagcgccctccagaggggtggcaagatttttggagccttcagggataacaagggggggccttactatgcgccaaactagtggttctttggcctaaaccttgggggggctaagttctgggtatccggaaccttcacccttttgggggctccttcccacccaaaatgcatcaaa

SEQ ID NO: 7039 - DNA, 572 bp, Zea mays
  Peptide Sequence Number=SeqID_13431
  Probeset Number=SeqID_21442
ttctcttctccgtctcttcgcttttctctccggcactgagcgacgtgcctctcgagctgccaattcaaaaaggcttgagcttaaggagaaaaagatggtgagaatcagtgtactcaacgatgctctcaagagcatgttcaatgcggagaaacgaggcaagaggcaggtcatgatcaggccctcctcaaaagtcatcatcaagttcctcatcgtcatgcagaagcacggttacattggtgagtttgagtacgtcgatgaccccccttccggcgggggcggtgtggagttgaacgggaggttgaacaaatgtggcgttatccgcccttcgttttggtgttggtggttaggagattgaagggtggacctgcccgtctgcttccttccagacaggttgggtaactttgggttgactacttccagctgggattatggaccctgaagaaccccggaaaaaatggccgagggaaattcctccgtttcttctattgaaaacctctatttggggaaaaacttccccattttaaactttttggcctcctttcccttgaaatttctggcctttagaatttttg

SEQ ID NO: 7040 - DNA, 409 bp, Zea mays
  Peptide Sequence Number=SeqID_13432
  Probeset Number=SeqID_21443
ctcttctccgtcactgcctctcgagctaaccaacctaagttatttagcagaggctttgagtttttgggagaaaaaatggtgagaatcagtgtgctcaacgatgctctcaagagcatgttcaatgccgagaaacgtggcaagaggcaggtcatgatcaggccttcttccaaagtcatcatcaagtttctcatcgttatgcagaagcacggttacatcggtgagtttgagtatgtggatgaccaccgatccggcaaaatcgttgtcgaattgaacggaaggttgaacaagtgtggcgttatcagccctcgttttgatgttggtgtcaaggagattgaaggttggactgctcgtctgcttccttccagacagtttgggtacattgtgctgactacctctgctggtattatga

SEQ ID NO: 7041 - DNA, 551 bp, Zea mays
  misc_feature (548)..(548): n is a, c, g, or t
  Peptide Sequence Number=SeqID_13433
  Probeset Number=SeqID_21444
aaatcgaaatacaatcttctcaattctctctctctctcgcgaattacgatcaagatgcagatcttcgttaagacactcacgggaaagacgatcacccttgaggtggaaagctctgacaccatcgacaatgttaaagccaagattcaagacaaggagggtattcctccggatcagcagaggctcatcttcgccggaaagcagctcgaggacgggagaaccctagctgactacaacatccagaaggagtcgactcttcatctcgtcctcaggctccgtggtggcatgcagatctttgtcaagaccttaacgggaaagacgatcacactcgaggtggagagctccgacaccatcgataacgtcaaggctaagatacaggacaaggagggaatcccgcccgaccagcagcgtttgatatttgccggcaagcagcttgaggatggtcgtacattggccgactacaacattcagaaggagtcgactcttcatctcgtgttacgtctgcgtggaggcatgcaaatctttgtcaagaccttgactggtaagacatncac

SEQ ID NO: 7042 - DNA, 605 bp, Zea mays
  misc_feature (336)..(336): n is a, c, g, or t
  misc_feature (405)..(405): n is a, c, g, or t
  misc_feature (443)..(443): n is a, c, g, or t
  Peptide Sequence Number=SeqID_13434
  Probeset Number=SeqID_21445
gacataaagaatattcattcctctcgacaccgttcgattcgatcgacctgctgctaacggaaacctagagtggattgctccgggatgtcgaacggcacagatcacgcccaaccaccgtcggaaaagttgagtcttccgatggaatcgaggccgaagaagcgtgcgtcaccgggggataactgggcgcctcctccaggttggacgaccgaagaaaaggttcgaacctccggtaccaaagctggtttggtggacaagttctactacgaacctgttacaaatcgcaagttccggtcaaggaccgaggtgatgtactacttggaacacggaacgcctaanaagaaaaacaagaaatcggttaacaacagtgacaccaaatcacaacgttctgaagacccgagaagctantagcggctgaccccaatccacacaaagcctaacgaagnagccacccccccaacccacccccaccccaatgccgctggactttgattttgggatggcccccagaaggtcatttggaacgggaccaacggtttacggaagcttgggggcctcccctgggggtacaacattcagaactgtccgcaaaatgggaacgaccctcc

SEQ ID NO: 7043 - DNA, 605 bp, Zea mays
  misc_feature (163)..(163): n is a, c, g, or t
  misc_feature (201)..(201): n is a, c, g, or t
  misc_feature (270)..(270): n is a, c, g, or t
  Peptide Sequence Number=SeqID_13435
  Probeset Number=SeqID_21446
ggagggtcgttcccattttgcggacagttctgaatgttgtacccccaggggaggcccccaagcttccgtaaaccgttggtcccgttccaaatgaccttctgggggccatcccaaaatcaaagtccagcggcattggggtgggggtgggttgggggggtggctncttcgttaggctttgtgtggattggggtcagccgctantagcttctcgggtcttcagaacgttgtgatttggtgtcactgttgttaaccgatttcttgtttttcttnttaggcgttccgtgttccaagtagtacatcacctcggtccttgaccggaacttgcgatttgtaacaggttcgtagtagaacttgtccaccaaaccagctttggtaccggaggttcgaaccttttcttcggtcgtccaacctggaggaggcgcccagttatcccccggtgacgcacgcttcttcggcctcgattccatcggaagactcaacttttccgacggtggttgggcgtgatctgtgccgttcgacatcccggagcaatccactctaggtttccgttagcagcaggtcgatcgaatcgaacggtgtcgagaggaatgaatattctttatgtc

SEQ ID NO: 7044 - DNA, 632 bp, Zea mays
  Peptide Sequence Number=SeqID_13436
  Probeset Number=SeqID_21447
aacggggttcatcttttacagaagaagaaactgagaacatcttcaattattaacacttaccgaagagagagaaagaaagtaagaaggagaatgggagacgcgccagaaacttttgccacgacggcgccgttagctccggtgactagtgagcgaaaagtacgtagcgacttggaggagaaactaccaaagccatatttggcaagagcactagtagctccagatacagagcatccaaatggaacagaaggtcatgacagcaaaggcatgagtgttatgcaacagcatggtgctttcttcgaccaaaacggcgacggtattgtctacccttgggagacttatgctggattccgtgacctcggtttcaacccaatctcctctgtcttctggagcttaatcatcaacttagcgtttagctatgttacacttccgagttggttgccatcaccattactgcctgtctatatcgactacatacacgaagccgagcatgggagtgattcaagcacctatgataccgaaggaaggtatgtcccattttatctggagaacatatttagcaagtacgcactaacggctgcgaataagttacattcaaagagatgtggaacttaaccgaggtgaacgaatgtcat

SEQ ID NO: 7045 - DNA, 544 bp, Zea mays
  misc_feature (194)..(194): n is a, c, g, or t
  misc_feature (203)..(203): n is a, c, g, or t
  misc_feature (544)..(544): n is a, c, g, or t
  Peptide Sequence Number=SeqID_13437
  Probeset Number=SeqID_21448
acaacaatggcgtatggttctttcgctatctcatcgaaagctctagtcttttgccgtccttgctatggtggctccatcagagatctccctttctccctccgcacgcctacgattgggcgttgcggatgcgttggagcaatcgcggcaccgagaaacctggtgaagccacgcaaggaagagagcacggaaaaggnagattaggnggaggaagggagagtaaggataaaacgacgccgtggaagaagttagatgctaatgagtttggtatacagaggtccatgatccctgaatctacacgcatggttctcaataagctcaggaaaaaagggtttcaagtatacctagtggggaggttgtgttcgggatcttatactagatagaatccccaaggattttgatgtcatcacttctgccgaaactcaaagaggtacggcaagtatttccccgatgccaaatcgttggaagacggtttcccatctgccatgtttatgtcgatgatatcatcatagaggtgtcaaggtttagtacttcagcaaggactggn

SEQ ID NO: 7046 - DNA, 704 bp, Zea mays
  misc_feature (553)..(572): n is a, c, g, or t
  misc_feature (575)..(704): n is a, c, g, or t
  Peptide Sequence Number=SeqID_13438
  Probeset Number=SeqID_21449
tagattgttcctacacacgccatttgcattcttctctctcttcagctactaaccaacgaatctctctctctctctaaaacaatggctcaggaagacgtcgctgctgctgctgctgctgctaacggtgctaccacggcggtggagaagtccgttacgttcacggcgtacaagcctcagctgattgtggaagcacagaaggtcggtgacgctgttgcgttctacaaggctgtgtttggcgccgtggagactggacgctctctctaccccaagcgtaaggctgaccaagagctccctcacctcgtctcttccgagctcgagctcgccggaacaaccgtagtcgtttctgacgtatccgttaactctggccctgatgcgaagacggggactatgcctgcgatcctcgaaaccgatgacgtggaagctgccgttgcgaaggccgttgcggctggagctgtcaaggaggaggaggaggaggaggtctcggagggtggagtcaaggggaaagtgacggatccgttcgggttcacgtggatctttgttgctccggcgaaannnnnnnnnnnnnnnnnnnnctnnnnnnnnnnnnnnnnnnnnnnnnnnnnnnnnnnnnnnnnnnnnnnnnnnnnnnnnnnnnnnnnnnnnnnnnnnnnnnnnnnnnnnnnnnnnnnnnnnnnnnnnnnnnnnnnnnnnnnnnnnnnnnnnnn

SEQ ID NO: 7047 - DNA, 704 bp, Zea mays
  misc_feature (1)..(130): n is a, c, g, or t
  misc_feature (133)..(152): n is a, c, g, or t
  misc_feature (704)..(704): n is a, c, g, or t
  Peptide Sequence Number=SeqID_13439
  Probeset Number=SeqID_21450
nnnnnnnnnnnnnnnnnnnnnnnnnnnnnnnnnnnnnnnnnnnnnnnnnnnnnnnnnnnnnnnnnnnnnnnnnnnnnnnnnnnnnnnnnnnnnnnnnnnnnnnnnnnnnnnnnnnnnnnnnnnnnnnnnnagnnnnnnnnnnnnnnnnnnnntttcgccggagcaacaaagatccacgtgaacccgaacggatccgtcactttccccttgactccaccctccgagacctcctcctcctcctcctccttgacagctccagccgcaacggccttcgcaacggcagcttccacgtcatcggtttcgaggatcgcaggcatagtccccgtcttcgcatcagggccagagttaacggatacgtcagaaacgactacggttgttccggcgagctcgagctcggaagagacgaggtgagggagctcttggtcagccttacgcttggggtagagagagcgtccagtctccacggcgccaaacacagccttgtagaacgcaacagcgtcaccgaccttctgtgcttccacaatcagctgaggcttgtacgccgtgaacgtaacggacttctccaccgccgtggtagcaccgttagcagcagcagcagcagcagcgacgtcttcctgagccattgttttagagagagagagagattcgttggttagtagctgaagagagagaagaatgcaaatggcgtgtgtaggaacaatctn

SEQ ID NO: 7048 - DNA, 567 bp, Zea mays
  Peptide Sequence Number=SeqID_13440
  Probeset Number=SeqID_21451
agagatgatcgagcaatggcgacgactttaacgttgactctcttcctccttttttcaacaaaacttccggcgtcagtctccggcaagtgcaccaccaccacatccacaaaaaccttcgagaaatgcatctctcttcccacacaacaagcttcaatcgcgtggacataccatccacacaacgcgaccctcgacctctgcttcttcggaacattcatctcgccttccgggtgggtcgggtgggggatcaacccggatactccctcccagatgaccggctctcgagtcctcatcgcgtttccggatcctaactcgggtcagctcatcctcctcccttacgttcttgactcttctgtcaagctccagaaaggccctctgctttctcgtccccttgacctcctccgtctctcctcctcctccgcttctctgtacggagggaacatggcgactatacgcaacggcgcctccgttcagatttacgcatcggtgaaactctcgtcgacaacaccaagatccaccatgtttgggaacagaggtctttaacgttcaaggttactctcccaccattca

SEQ ID NO: 7049 - DNA, 672 bp, Zea mays
  misc_feature (604)..(672): n is a, c, g, or t
  Peptide Sequence Number=SeqID_13441
  Probeset Number=SeqID_21452
aaatcgaatctcatcatcatcatcatcatcaatggcttcgatgctggctcgcaggtcactgaatacactccgtactcgccacctcgttttgtcagggaaagctttgcagggatctcatctctctgggctgcagtcccgtgctatttcttacggctccaagaaagatgatgaagaagaggagcaacttgccaaggaaatctccaaggactggaatactgtctttgaacggagcataaacacactgtttctcactgaaatggtccgtggtttgtccctgaccctcaagtacttctttgatcccaaagttactatcaattatccatttgagaagggtccactgagccctcgcttccgtggtgaacatgctcttcgtcgttatcctaccgggggaagaacgctgcattgcctgcaaactctgtgaagctggatgtccagctcaagcaatcacaatagaaggcagaggagcgggaagatggtagccgtagaaccactaggtacgacatcgacatgacgaaatgcatttactgtggtttctgccaagaagcttgccccgttgatgcaattgccgaaggccctaactttgaattcccaaccgagacacacnnnnnnnnnnnnnnnnnnnnnnnnnnnnnnnnnnnnnnnnnnnnnnnnnnnnnnnnnnnnnnnnnnnnn

SEQ ID NO: 7050 - DNA, 629 bp, Zea mays
  misc_feature (629)..(629): n is a, c, g, or t
  Peptide Sequence Number=SeqID_13442
  Probeset Number=SeqID_21453
gttagtgttgttgtcttgttgattacagtgtaagaaaaaaaaagggaagagagatgattctagagtggttcctctacgtctcctcccccaaatcctctcgctagggtctctcctccttcgtctctcagactctcctcctcctcctcctccaaatccatcattctacacgaagaggctgattatcaaatgagctgaagcttcttcttagggattcgattcaaccagtggatttctttgtttttttatcttattttgagaaagctgaggatatgtcaagcggtagaaacacccactggtgtcacagatgccaacgtgctgtccgtctccacgccccagaccctgtatgttcttattgtggaggaggattcgttgaggagcttgtcacacctcaagccatagccaacccatttgatatctttagatctcacagggatgttgcagaacgtgatcccgcttttgatctcatggacgcattctccgccttcatgagaaaccgcttagccgaccgagaactcagaaggaagaacatcacttcccgtcctgaaagcttccccggcttagcctcctttgttggatctttggggggccaggttccttatagagaacaatgcagtccaaatttctcagan

SEQ ID NO: 7051 - DNA, 635 bp, Zea mays
  misc_feature (630)..(635): n is a, c, g, or t
  Peptide Sequence Number=SeqID_13443
  Probeset Number=SeqID_21454
attttccagactctccaccttcgatctatagatcctcttcttcaccaccggagagctcagccgtcgcactgaatcaaatcaaccgagaaagcaatctctagatctgtcgtctccttcacatcttctaccagagatgtataataatatgggacctcagcctgggatggcaatgcctcaggcaaatcctcagcctaacccatttgggaatgccttctctggtcctggctctggacttatccggagtggcttgggagcttatggggagaagattttcggatccagctctgagtatgtgcagagcaacataactcgttacttctccgatcctcaatactattttcaagtgaatgaccaatatgtgaggaacaagttgaagattgttctacttcctttccttcacaggggacactggactagaatctcagagccagttgggggtagactttcatacaagcccccgatatatgatattaatgcaccagacttatacattccacttatggcatttggcacatacgttgttcttgctggtttgtcactaggactctatggggaagttttctccggaaagctctgaactggctttttgtcaaaggaatggttggctggtttttgcgggtcatgctgctnnnnnn

SEQ ID NO: 7052 - DNA, 581 bp, Zea mays
  Peptide Sequence Number=SeqID_13444
  Probeset Number=SeqID_21455
gaggaaccaattcgaatcgagaggaagaaagatggtgtctgggtcagggttatgctcgaagcgtgtcgtggtcgacgcaaggcaccacatgctgggctgtctagcttcgatcatcgctaaggagttgctcaacgggcagagagtcgttgtggtcagatgcgaggagatttgcctgtcaggtggattggttcgtcagaagatgaagtacatgaggttcatgaggaaacgcatgaacactaagccttctcacggtcccattcacttcagggctccctctaagatcttctggcgcaccgttcgtgggatgatcccacacaagaccaagcgtggagctgctgctcttgcacgcttgaaggtctttgaaggagtcccacctccttatgacaaggtcaagagaatggttattcctgatgctctcaaggttttgaggctccaggctggtcacaagtactgcttgttgggacgtctgtcttctgagggtggctggaacactacgataccattaaggagcttgaggtcaaaggaagggaaagtcacaggctgtgtatgagcgtaagaagcagctcagcaagctcaggact

SEQ ID NO: 7053 - DNA, 590 bp, Zea mays
  misc_feature (287)..(287): n is a, c, g, or t
  Peptide Sequence Number=SeqID_13445
  Probeset Number=SeqID_21456
agtcagttttactgagtctctgttagcttcttcttcttctagatctgatcgcgattttcgccggaagaggtcttgttatatctatgggtcgtggaaacagctgtggtggaggtcaaagctcactcaattatctctttggtggtggtggtgatgctcctcctcctaagcccgctccagctccagctccagctccttctgctgagccaaccaaggctactgcacctgcacctgcacctgtagctgtgactgcaactgctctcaccaccgctactaccagcgttgagccntgcagaggtcaacaagcagatcccctgctggtatcaaaactcctggttaacaactatgctcgagctgaaggacagaaacaccggaaacttcctcactgaccgtcctttcggaccaaagtccatgcagctcctggaggtggatcatcctttgggttatcttttcactggtggcgcagtaaagtataataaaaacattatgtgtaatgccaatgcgtatccattggctccttgttgcattcgcacactataaaaaatggttgatgtgagccaggctttgatgagtagaaggcgggttctggcaat

SEQ ID NO: 7054 - DNA, 590 bp, Zea mays
  misc_feature (304)..(304): n is a, c, g, or t
  Probeset Number=SeqID_21457
attgccagaacccgccttctactcatcaaagcctggctcacatcaaccattttttatagtgtgcgaatgcaacaaggagccaatggatacgcattggcattacacataatgtttttattatactttactgcgccaccagtgaaaagataacccaaaggatgatccacctccaggagctgcatggactttggtccgaaaggacggtcagtgaggaagtttccggtgtttctgtccttcagctcgagcatagttgttaaccaggagttttgataccagcaggggatctgcttgttgacctctgcanggctcaacgctggtagtagcggtggtgagagcagttgcagtcacagctacaggtgcaggtgcaggtgcagtagccttggttggctcagcagaaggagctggagctggagctggagcgggcttaggaggaggagcatcaccaccaccaccaaagagataattgagtgagctttgacctccaccacagctgtttccacgacccatagatataacaagacctcttccggcgaaaatcgcgatcagatctagaagaagaagaagctaacagagactcagtaaaactgact

SEQ ID NO: 7055 - DNA, 573 bp, Zea mays
  Peptide Sequence Number=SeqID_13446
  Probeset Number=SeqID_21458
atttataatcttccgtagctgaagaaacagtttgcagacaacataaagtctttgtcttcttctctctgtcacattgatttgtgaagaagaagagtggcagagaaacccatggctatggcggagatggcaatgaagtcttcagtaacaactgcaaaactcactcttcctccttcttcttcgtcttgtaagaagagagcgaggcaagtctctgtcgcacttccgacaacaacttcaatctctctgttatctgtcttctcatctcctcctcctgaagccaaagctgctgtttccatttccaaggaccagatcgtctcctctctcactgaagtggagaagacaatcaaccaagttcaagaaactgggttcgagtgttttcgacgcaacgcagcgtgttttccaaggtggtaggagacgctctcaaaccagccttggacactgctttgcccatcgcaaagcaagcccggtgaagaggcctttgaagcttgcttctcctgctttctcagaggcttcgaagaaagctcaggaagcatggcaaggctcttggtaattgatgcagagcctgtctttaatgct

SEQ ID NO: 7056 - DNA, 573 bp, Zea mays
  Peptide Sequence Number=SeqID_13447
  Probeset Number=SeqID_21459
agcattaaagacaggctctgcatcaattaccaagagccttgccatgcttcctgagctttcttcgaagcctctgagaaagcaggagaagcaagcttcaaaggcctcttcaccgggcttgctttgcgatgggcaaagcagtgtccaaggctggtttgagagcgtctcctaccaccttggaaaacacgctgcgttgcgtcgaaaacactcgaacccagtttcttgaacttggttgattgtcttctccacttcagtgagagaggagacgatctggtccttggaaatggaaacagcagctttggcttcaggaggaggagatgagaagacagataacagagagattgaagttgttgtcggaagtgcgacagagacttgcctcgctctcttcttacaagacgaagaagaaggaggaagagtgagttttgcagttgttactgaagacttcattgccatctccgccatagccatgggtttctctgccactcttcttcttcacaaatcaatgtgacagagagaagaagacaaagactttatgttgtctgcaaactgtttcttcagctacggaagattataaat

SEQ ID NO: 7057 - DNA, 605 bp, Zea mays
  misc_feature (601)..(605): n is a, c, g, or t
  Peptide Sequence Number=SeqID_13448
  Probeset Number=SeqID_21460
acagagagacagcagtcgagagacagtgtcaaaaaaaaaaaaaaaactcatcaaagagaaatggctacctccgccgcacgtcctctcgtcaccatccaaggcctagacggcgacatgaccaccgaccaatcctccaccatcgtcctccccgacgtcatgacagcccccgtccgtcccgacatcgtcagcttcgtccacgctcaaatctccaacaactcccgccagccctacgccgtctccaagaaggccggtcaccagacctccgccgagtcgtggggaaccggacgcgccgtctcccgtatcccccgtgtccccggaggaggtactcaccgtgcaggacaagctgccttcggaaacatgtgtcgtggtggacgtatgttcgctccgaccaagatctggcgcaaatggcacaggcgcgtgaacgtcaacatgaagaggcacgctattgtctctgccattgctgcaactgctgttcctgctcttgtgatggcgcgtgggcataagatcgagaatgttcccgagatgccactcgtggtgagtgactctgctgaaggcgtggagaagacggcagctgctatcaaggtgttgaagcagattggtnnnnn

SEQ ID NO: 7058 - DNA, 624 bp, Zea mays
  misc_feature (601)..(624): n is a, c, g, or t
  Peptide Sequence Number=SeqID_13449
  Probeset Number=SeqID_21461
gtagtctctctaactctcttaagattcaaaaggacttttgcttctcttcgtaaagtcaccatgtctggggaagaagctgctcctgctgttgttcctccggctgctgagccagctgcaattccagaggacatggatctgttgactgcattggagctgactctaaggaaagcccgtgctcacggtggtgtgactcgtggtctccatgaaagcgccaagcttatcgagaagcgtgttgctcagctctgcgtcttggctgaagactgcaaccagcccgattacggcaagcttgccaaagctctatgcgctgatcacaacatcaacttgcttactgttccaagtgccaaaaccctcggggaatgggctggccttcccagaatgattccaaggttaaggaaagaaaatttttggaagcctccgcctttggggcaaggattacggtagggaaaaattggccccaaacccgggaaaaagtttttgatttctacaaaaaccgcaaggccaaatttcaaggggttttcccccctttttcttttttttttttgggaacacaaaccttttaatgggatatacccgaaaaaatgttggcgcaaaaaaattttgnnnnnnnnnnnnnnnnnnnnnnnn

SEQ ID NO: 7059 - DNA, 693 bp, Zea mays
  misc_feature (693)..(693): n is a, c, g, or t
  Peptide Sequence Number=SeqID_13450
  Probeset Number=SeqID_21462
acaaccctttcctcgtctggtccaccacaccatcctctttctctctacactccctcgatctttccgtctaaaaccatgtctgccttcaccagcaaattcgccgatgagttgatcgctaacgccgcctacatcggcacacccggaaagggtattctcgccgccgatgagtccaccggaaccatcggaaagcgtcttgcaagcatcaacgtcgagaacgttgagaccaacagacgtgctctccgtgagcttctcttcaccgcccctggtgctctcccttgcctcagcggtgtcatcctcttcgaggaaactctttaccaaaagagctccgatggcaagcttttcgttgacatcttgaaggaaggaggagtactcccaggtatcaaagtcgacaagggtaccgtcgagctagccggaaccaacggcgagaccaccactcagggtcttgacggcctcggtgagcgttgcaagaagtactacgaagctggtgcacgtttcgccaagtggcgtgcggttctcaagatcggcgagaacgagccatcagagctttccatccacgagaacgcttacgggttggctaggtacgctggtatctggccaggagaacggtcttgtacccatcgtcgagcctgagattctagtcgacggtcccatgacatccacatggtgtgctgctggtgaccgagcgtgttcctn

SEQ ID NO: 7060 - DNA, 652 bp, Zea mays
  misc_feature (90)..(93): n is a, c, g, or t
  misc_feature (106)..(106): n is a, c, g, or t
  misc_feature (108)..(108): n is a, c, g, or t
  misc_feature (110)..(110): n is a, c, g, or t
  misc_feature (312)..(312): n is a, c, g, or t
  misc_feature (601)..(652): n is a, c, g, or t
  Peptide Sequence Number=SeqID_13451
  Probeset Number=SeqID_21463
acacctaccttcatcctcccttctctctacacctttctcgatctttccgtctaaaaccatgtctgccttcaccagcaaattcgccgatgnnnnagttgatcgcatncngnctttaacgccgcctacatcggcacacccggaaagggtattctcgccgccgatgagtccaccggaaccatcggaaagcgtcttgcaagcatcaacgtcgagaacgttgagaccaacagacgtgctctccgtgagcttctcttcaccgcccctggtgctctcccctgcctcagcggtgtcatcctcgtgcgaggaaactctttnaccaaaagagctcccgatggcaagcgctttttcgtttgacatccttgaggggaagggggagtactccccaggtatcaaagtcgacaaggggtaccgtccgagctaggcccggaacccaaccggggagacaccccactcaggggcctttggaccgcctccggtgagcggttgcaagaagtacttaccaagcttgggggcacgtttcccccaaagggggggggggggttcccaaagatgggggggagaacgagcccatctagagctttccatccacgaaaaccccccttcnnnnnnnnnnnnnnnnnnnnnnnnnnnnnnnnnnnnnnnnnnnnnnnnnnnn

SEQ ID NO: 7061 - DNA, 652 bp, Zea mays
  misc_feature (1)..(52): n is a, c, g, or t
  misc_feature (341)..(341): n is a, c, g, or t
  misc_feature (543)..(543): n is a, c, g, or t
  misc_feature (545)..(545): n is a, c, g, or t
  misc_feature (547)..(547): n is a, c, g, or t
  misc_feature (560)..(563): n is a, c, g, or t
  Peptide Sequence Number=SeqID_13452
  Probeset Number=SeqID_21464
nnnnnnnnnnnnnnnnnnnnnnnnnnnnnnnnnnnnnnnnnnnnnnnnnnnngaaggggggttttcgtggatggaaagctctagatgggctcgttctcccccccatctttgggaaccccccccccccctttgggggaaacgtgcccccaagcttggtaagtacttcttgcaaccgctcaccggaggcggtccaaaggcccctgagtggggtgtctccccggttgggttccgggcctagctcggacggtaccccttgtcgactttgatacctggggagtactcccccttcccctcaaggatgtcaaacgaaaaagcgcttgccatcgggagctcttttggtnaaagagtttcctcgcacgaggatgacaccgctgaggcaggggagagcaccaggggcggtgaagagaagctcacggagagcacgtctgttggtctcaacgttctcgacgttgatgcttgcaagacgctttccgatggttccggtggactcatcggcggcgagaataccctttccgggtgtgccgatgtaggcggcgttaaagncngnatgcgatcaactnnnncatcggcgaatttgctggtgaaggcagacatggttttagacggaaagatcgagaaaggtgtagagagaagggaggatgaaggtaggtgt

SEQ ID NO: 7062 - DNA, 582 bp, Zea mays
  Peptide Sequence Number=SeqID_13453
  Probeset Number=SeqID_21465
acacaaccaaaacacgagaagattttattcgattttatctgtcatttgcttcaactgttactatcgaccaatctcggtgttcgtagccatgagtcttcttacagatctcgttaaccttaacctctcagagaccactgacaaaatcattgcggaatacatatgggttggaggttcaggaatggatatgagaagcaaagccaggactcttcctggaccagtgagtgacccttcggagctaccaaagtggaactatgatggctcaagcacaggccaagctcctggtgaagacagtgaagtcatcttatacccctcaagccatctttcaaagatccttttccgtagaggcaataacattcttgtcatgtgcgatgcttacactccagcgggcggacccattccccacaaacaaaagacaccgctgccgcctaagggcttttagccacccctgatggtgtacctgaaagggccagggatttggtttggaccaagagtatacctttacttcagaaagatgggaccgggccctcttgggtggccctatgggcggcttccccgccgcccgcggggaaaaaaggattttaa

SEQ ID NO: 7063 - DNA, 624 bp, Zea mays
  misc_feature (601)..(624): n is a, c, g, or t
  Peptide Sequence Number=SeqID_13454
  Probeset Number=SeqID_21466
atttctctctggttgccctagttttccaaatcgccgtgtctcactaaagaagacgaagccatggtgcacgtttgctactaccgcaactatgggaaaaccttcaagggcccacgacgtcctttcgagaaggagcgtctcgactccgagctgaagctcgtcggcgagtacggtctccgcaacaagcgtgagctctggagagtccagtactccctgagccgcatccgtaacgccgccagagatcttctgacgctcgacgagaagaatcccaagaggatcttcgaaggagaggcgcttctccgtaagatgaacaggtacgggcttctcgacgagagccagaacaagctcgattacgtcttggcgttgaccgtggagaattttcttgagcgtcgtcttcagactattgtgttcaagtctggtatggctaagtcgattcatcactcccgtgtcctcatcaggcagaggcatatcagggttggaaagcaattggtgaacattccatcgttcatggtgagacttgactcgcagaaacacatcgactttgctctaaccagtccctttgggtggtggcgtccaggaagagtgaagagaagaacgagaagtnnnnnnnnnnnnnnnnnnnnnnnn

SEQ ID NO: 7064 - DNA, 628 bp, Zea mays
  misc_feature (628)..(628): n is a, c, g, or t
  Peptide Sequence Number=SeqID_13455
  Probeset Number=SeqID_21467
atcgtcctgtttcttaaaattttccggtaacggaggagcgcggctacgaaaccgctctcgaattcctttttcattcggaacatcacccaattctctagcaatttccacatgacttcagatgctctcaacataccatccgagcttgaatctgcgttacggctcaggacggtacaatactttatcacaaagaggccttggcttgatctctatggagtccatgtaaggcccgtggcaccattcggaagcacaagcagtaaaccacaatttgatcctgctttgattcatcgctccttgcctgatgagcttcttttcgaggtgtttgctcggatgttgccttatgaccttggcagagcagcttgtgtctgcagaaagtggaggtacactgttcgcaaccctgtcttctggcgtaacgcctgcttgaaagcttggcagactgctggggttatcgaaaactataggatcttgcagtctaaatacgatggatcatggaggaaaatgtggcttcttagatccagagttcgtactgatggtatttatgtgagtagaaacacttatatccgagctggaattgctgagtggaagatacaaatccagttcacattgtatgttacttccgctacataagatn

SEQ ID NO: 7065 - DNA, 572 bp, Zea mays
  Peptide Sequence Number=SeqID_13456
  Probeset Number=SeqID_21468
ggatttcttttgcttccacgcttctaattgtgtgttgcaaaattggacccgattcgacacaagattgatgctgattaattagtatcgagctttttttgaataaaaaaaaaagttagaattatataggtgcatctaccgtctgtccgttccaatccgacggctgtggaacacgccgtacaatttagactcaatctgacggtggaacaaaacagaaaagatcgcacaatccctcaaatctaatagttgtgttgtgttgtgtgtgtgaagccgaaacgaacagagaaatggcagccgcagctatctccgccggaccaaaccgccttattagctcagcatccgatgttcccccccatctcctcaccaccaagctcaatcccctcttctttccttccgggaagactcagcatctgtggcgctcctcatcgattctcctgcctacgccgccgcgatgcgcggcgccgccgcctagagccagttctcgagctgacgattctccgccgttcgacatgtcccgggaaacggctctgaaagggtactccggggcccctgagggagctcccttccacgaatac

SEQ ID NO: 7066 - DNA, 572 bp, Zea mays
  Peptide Sequence Number=SeqID_13457
  Probeset Number=SeqID_21469
gtattcgtggaagggagctccctcaggggccccggagtaccctttcagagccgtttcccgggacatgtcgaacggcggagaatcgtcagctcgagaactggctctaggcggcggcgccgcgcatcgcggcggcgtaggcaggagaatcgatgaggagcgccacagatgctgagtcttcccggaaggaaagaagaggggattgagcttggtggtgaggagatgggggggaacatcggatgctgagctaataaggcggtttggtccggcggagatagctgcggctgccatttctctgttcgtttcggcttcacacacacaacacaacacaactattagatttgagggattgtgcgatcttttctgttttgttccaccgtcagattgagtctaaattgtacggcgtgttccacagccgtcggattggaacggacagacggtagatgcacctatataattctaacttttttttttattcaaaaaaagctcgatactaattaatcagcatcaatcttgtgtcgaatcgggtccaattttgcaacacacaattagaagcgtggaagcaaaagaaatcc

SEQ ID NO: 7067 - DNA, 575 bp, Zea mays
  Peptide Sequence Number=SeqID_13458
  Probeset Number=SeqID_21470
aagaaaactctctctctctctctctcgagcttttctataagatcccagacgaagaagagacgattgatttgttctaaccatggagagactacagcgaatattcggcgccggtggcggtctaggccacgcatctccagattctcccactctcgacacctcggagcaggtttacatctcctctctcgccctcctcaagatgctcaaacacggaagagctggagttccgatggaggtgatggggttgatgctcggagagttcgtggatgagtacactgtgagagttgtggatgtattcgcgatgcctcagagtgggactggtgttagtgttgaagctgttgatcatgttttccagactaatatgcttgacatgcttaaacagactggcagacctgaaatgggtggtgggttggtatcattcgcatcctgggtttggctgctggctttccggtgttgatattaatactcaacagagttttgaagctttgaaccagcgagctgtagcagtggtgggtgatccgattcagagtgtgaggggtaaaagtggtgattgatgccttccgctccattaccctcaa

SEQ ID NO: 7068 - DNA, 585 bp, Zea mays
  misc_feature (273)..(273): n is a, c, g, or t
  misc_feature (417)..(417): n is a, c, g, or t
  Peptide Sequence Number=SeqID_13459
  Probeset Number=SeqID_21471
gaaccactaaatcacactttatctatcacacaatgggcgacctctctctccgtctccagactcatctcttcatccgccatctccgtcgccaaaccgctactctccccaacctccgccttcaccgccccaatctccttctcccgctccctcgctcccaacctctccctcaaatcccacacccgccgcgcctccatctccgccgtcagatccttctcaacaaccaccatctccgcctccatctccgtcggagacaaactccccgaactctacccntctcctacctcgatcccgccaccaacgatgtcaaaacagtcaccgtctcctccctaaccgccgggaagaaaaccatcctcttcgccgtcccgggcgccttcactccgacctgctcgcagaaacacgtccctggattcgtctccnaggccggagagctcagatccaaaggcgtggacgtcatcgcgtgcgtctccgtgaacgccgcgctcgtgatgctggcgtggaggaaggacctcgggatcgaggacgaggtgatgctgctgtccgatgggaacggagagttcacggggaagctcggcgtggagttggatt

SEQ ID NO: 7069 - DNA, 638 bp, Zea mays
  misc_feature (627)..(638): n is a, c, g, or t
  Peptide Sequence Number=SeqID_13460
  Probeset Number=SeqID_21472
cgccgatcaatcagctgactctaacaagatcgaagtcgaggaagaagatgtttctcactaggaccgagtatgacagaggagtcaacactttctctcctgaaggcaggctcttccaagttgagtatgccattgaagctatcaagcttggttccactgcaattggagtgaagacaaaagaaggagttgtgcttgctgtggagaagcgtatcacctctcctttactggagccgagcagtgtggagaagattatggaaattgatgaccatattggttgcgccatgagcggtttaattgctgatgctcgtacacttgttgagcatgcaagagttgagactcaaaaccacagattctcgtatggtgagccaatgaccgtggagtccacaacacaggcgctgtgtgatctggctttacggtttggtgaaggagatgaagaatcaatgtcccggccatttggagtatctcttctcattgctggccatgatgaaaacggaccgagcttgtactacacggacccgtctggaacattctggcagtgcaacgcaaaagcaattggttcagggtcaaaaggagctgatagttctcttccagagcaattcgacaaagatctgtccctcagtggaactgaannnnnnnnnnnn

SEQ ID NO: 7070 - DNA, 627 bp, Zea mays
  misc_feature (621)..(627): n is a, c, g, or t
  Peptide Sequence Number=SeqID_13461
  Probeset Number=SeqID_21473
attgaattgaatgatggtttcacagagcagaggaagcacgacgatttagcagggcttcgacgaaccccgatccaggtggttttccgtcgatctcgctctccccagatttcagaatcatccttgatcgttttctccgcgatgagttccaatacggcgtcgtcgagtgccggatcgggagattcttccgctgccaggaagaattcgaagcggcccaagtattccaagttcacacaacaggagcttccagcttgcaagcccattcttacgcctggctgggtgatttcgacatttttgatagtcagtgtcatctttattccccttggagttatctctcttttcgcttcccaggatgttgtggagatcgttgatcggtatgataatgattgcattcctgcacctgctaggactaacaaggttgcttttattcaaggagctgctcctaaatcttgtaaccgaactctaacagtgaccaagcgtatgaagcagcctatctatgtttactaccagcttgaaaacttctaccagaatcaccgaaggtatgtgaaaagcagaagtgattcacagctgagaagtccaaaattcgagaatcaaattagcgcatgcaagcctgaggatgatgcnnnnnnn

SEQ ID NO: 7071 - DNA, 642 bp, Zea mays
  misc_feature (535)..(535): n is a, c, g, or t
  misc_feature (601)..(642): n is a, c, g, or t
  Peptide Sequence Number=SeqID_13462
  Probeset Number=SeqID_21474
ctctccctctcttatccaaaactgtctcaagctccaatggctcttcttcgtctccctcccatttccctccaatatctaggtcacaaatctgaacaaaaaacccctaatcccggagtttcgctcaccaatttctctctcacatggtctactccttcactatctcgtctccatctagcgaaacccagaaatcttacctcttactccttcgctactacccaggagccaatcctcgagccttcttcttcggaagagatttccaaaaccagattgattgctcaaaacgttccttggacctctacacccgaagacataaggtcgctgttcgagaaatccggcagtgtcgtcgacgttgagatgtctatgcacaagaaggaaaggaatcgaggtttggttttcattgaaatggcttctcctgaagaagctgcatcagctcttcaagctctcgaatcctatgaatatgaagggtcgtcgtttgaaggtagcctatgcaaaggccaaaaagaagaaaacttatgctcctcgtgagaagcctacngccggtgcctacgttcaaatttgtttgttgcaaacttggcatttgaagctagggccaagcatcttnnnnnnnnnnnnnnnnnnnnnnnnnnnnnnnnnnnnnnnnnn

SEQ ID NO: 7072 - DNA, 539 bp, Zea mays
  misc_feature (519)..(519): n is a, c, g, or t
  Peptide Sequence Number=SeqID_13463
  Probeset Number=SeqID_21475
aaaggagctcagtttggcagaaagaagcaaagaagaaaaatggccgcaacatttggaaccccatcgacggtgataggtctcggaggatcatctgtttctcccatcaaggccaaagctctctcttcatcttttctaaaaccaacattaagagcgaagaacgctctgaaagtcgctggagcatcgggcggaagattcacttgctttgagaggaactggctgaggagagatctgaacgtggtggggttcgggcttgtcgggtggctagctccgtctagcattccggcgataaacgggaagagcttgacgggtctcttctttgagagcataggaactgagctcgctcacttcccaacacctccagctctcacttctcagttctggttgtggctgatcacttggcacttgggcctcttcatatgcctcaccttcggacaaatcggatttaagggcaggactgaagattacttcaagaaataaatcattccctcttgttccatctgtacttattatcttactctnctctctctcttgggtctggg

SEQ ID NO: 7073 - DNA, 647 bp, Zea mays
  misc_feature (446)..(446): n is a, c, g, or t
  misc_feature (542)..(542): n is a, c, g, or t
  misc_feature (588)..(588): n is a, c, g, or t
  misc_feature (620)..(620): n is a, c, g, or t
  Peptide Sequence Number=SeqID_13464
  Probeset Number=SeqID_21476
aaccgtgtgatctttttcgcatctggaacaagcgagaagctctgatatcccttaaaattaaaattacacttttctcgtcttcttcgtcaaaaatcctcttcaccgagtcatcttctctccgatcaaaaagtcattcaagtgatcaggttacacaggaagtaagatttgaggtttgagaagcacaagagaacaagaaggaacctaatcagtctcaatttactcggcttgatcaaattgaaactgcagctaatggcgcttaaccctcagttgatgcctaatgggatgcctgttccctttgttaatgagatgtttgttcttgtccgagaacggcgttgagtttgaagtcgacaagattcctggaggacatggaggtcatgttaaggccaagggagtgatatacttgtctaacattcggatgggtctttgttgcaagcaagcctgttgangaactttgttgctttcgacatgcctctgctttacatccacgccgagaaattcaatcagccaatcttccactgcaacaatatatctggacaagtcgnagcctgtggtaccagagaacgagcacagagcactgtattcaaacancagttttcagatttgtttcaaagggaagtggnttttggggaaaaggttggtccctctct

SEQ ID NO: 7074 - DNA, 647 bp, Zea mays
  misc_feature (28)..(28): n is a, c, g, or t
  misc_feature (60)..(60): n is a, c, g, or t
  misc_feature (106)..(106): n is a, c, g, or t
  misc_feature (202)..(202): n is a, c, g, or t
  Peptide Sequence Number=SeqID_13465
  Probeset Number=SeqID_21477
agagagggaccaaccttttccccaaaanccacttccctttgaaacaaatctgaaaactgntgtttgaatacagtgctctgtgctcgttctctggtaccacaggctncgacttgtccagatatattgttgcagtggaagattggctgattgaatttctcggcgtggatgtaaagcagaggcatgtcgaaagcaacaaagttcntcaacaggcttgcttgcaacaaagacccatccgaatgttagacaagtatatcactcccttggccttaacatgacctccatgtcctccaggaatcttgtcgacttcaaactcaacgccgttctcggacaagaacaaacatctcattaacaaagggaacaggcatcccattaggcatcaactgagggttaagcgccattagctgcagtttcaatttgatcaagccgagtaaattgagactgattaggttccttcttgttctcttgtgcttctcaaacctcaaatcttacttcctgtgtaacctgatcacttgaatgactttttgatcggagagaagatgactcggtgaagaggatttttgacgaagaagacgagaaaagtgtaattttaattttaagggatatcagagcttctcgcttgttccagatgcgaaaaagatcacacggtt

SEQ ID NO: 7075 - DNA, 606 bp, Zea mays
  misc_feature (606)..(606): n is a, c, g, or t
  Peptide Sequence Number=SeqID_13466
  Probeset Number=SeqID_21478
cctctctcacttttccttttttgtagccgctcctccccttccggtgtaccgatatgcttcatgtgttctggtccattgttgactatctcttctccgcctcctgctcatgagggagcttggactgagagggtcgtcaatctctggaattccggtgaggtgcgtctcggaggcagagtgaagctagtcggcttttgggtcaagatttgtctggttccttgtcactttagatctacgacaaatcttggcgtttggtggcgcgtgctctcgtgtggagactcctccgtaccagatctgttcttcatcgtcgtgtttctttcatcgaagttcggacggagtggagcggtggcacgtgatgcattccttcgcttggcgtctcgtcggaggaggctcgtgtggctaccgttcaggtggtttctgagtggttaatccacaaaggcgcgtccaaggtgtaggattcgttgtgtgtcggctcctccgctttgacgatggcgcgtgttgttcaatgcacggtgtcggtgatgagtcgtctatggctctgttatcctgccgtgacagagatgcttccgcctcgatcttctccggtcattggctctcccgtcacactcn

SEQ ID NO: 7076 - DNA, 564 bp, Zea mays
  Probeset Number=SeqID_21479
acatctctctgatgaagaccatggagctcttctctctctcatccatcctccttctccttgtgctctccttcactagtcccattctctccatctctgatcagccattattaatctcttctgttgttcctgatgaagaagaaagctgcccttacactgtgattgtcaccacgagctgtttctcccctgatttgtcaagggatcagatcacattcgctttgggtgacgctgacggcaacaaggtggtcgcaccgagactagatgaaccgttaactggtggaggaggtttcgagaaatgttcatcagacacattccaagtcaaaggtcagtgtctcgacaccatctgctctctctacatctaccgttccggtctagacggttggatccccgagacagtcgagatctacgaggaaggttccaagtctgtgaaattcgatttcaacaaaaacgtccctgataacacttggtacggccacaactattgcaacaacactgggtttgcaccaccttccccggggatttcctcccgtttcccccccccacccaccgccacatccacctcatttt

SEQ ID NO: 7077 - DNA, 597 bp, Zea mays
  misc_feature (597)..(597): n is a, c, g, or t
  Peptide Sequence Number=SeqID_13467
  Probeset Number=SeqID_21480
cttcgaaaccaaaccatctccgaaacagactatgcagttcttcggcggatccgagataagcccgtcgcctcccgtcccaacggcgagtgcgaacaacgcgcacatgatgtacgtgttcaaccgcagcggcgtgtgtctcctctacaaagagtggaaccggcctctccgctcgctcaaccctcagcaagatcacaagctcatgttcggtctcctcttctccctcaaatccctcaccgccaaaatggaccccaccagtgcggataaggggaatctaggggttccacagttgccagcacaaggatgctctttccatagtttcagagccaatacttacaagcttagcttcagggagactccctctggtattaagattattttgctaactcatccaaagactggagatttacgcgcatcccttaagtacatctacggcttatacgtctgagtgtgtgggacaaaaccctatctacggcccaggctcctccaatcaagtcagagttgttcaacactgcacttggccagtatgtgaggagcatctcttagggggcgcatttccagatttggcaatggcaacttctctggttcactgagctttcn

SEQ ID NO: 7078 - DNA, 630 bp, Zea mays
  misc_feature (601)..(630): n is a, c, g, or t
  Peptide Sequence Number=SeqID_13468
  Probeset Number=SeqID_21481
agattccgatcgaaactcaaataactattctctctatctcctccttctgggtttcatcaaaatcacaaatactcgcgacaatcattcagaggatatggctgccgtaggagtggagtcgatgcgtcccgagtcagcgatggaggaaacctgcaacgtcaagatagcggcggcgaaacaaggggaggggcttaagcagtactatctccagcacatccatgagctccagcgccagctccgccagaaaactaacaacctcaatcgccttgaagctcagaggaatgaactcaattctcgagtacgaatgctcagagaagagttgcagctgcttcaagaacctggttcctatgtcggtgaagtggtcaaagtgatggggaaaaacaaggtcttggttaaggttcatccagagggtaagtatgttgttgatattgacaaaagcatagacataacgaagatcacaccatcaacaagagttgctctccgtaacgatagctatgttctccacctcgtcctgccgagtaaagttgatccgctggtcaaccttatgaaggttgagaaggtccggactcacatatgacatgattggggggccttgaccacaaannnnnnnnnnnnnnnnnnnnnnnnnnnnnn

SEQ ID NO: 7079 - DNA, 647 bp, Zea mays
  misc_feature (647)..(647): n is a, c, g, or t
  Peptide Sequence Number=SeqID_13469
  Probeset Number=SeqID_21482
attttatttttgttttgcaaaaagaaagacagagaggcccatcttccttgcatagttgatcaaacatggctgctgctgctataggtgctgcagtctcctatccttcatccaagtcctcttctcttccctccaaaacttccttcgtctcccctcaaaggattttcctcaacaacaagagcacactgtgctacagagaggcatgtatttataggggaagagtgaaggctcaggtgtcaacagaggcgccagtgaaagtagccaaggagtcaaagaaacaagaagaaggaatagttgtcaacaaattcaaaccaaaggacccttacactggtcgatgcctcttgaacaccaggatcaccggcgatgacgctcccggtgagacctggcacatcgtcttcaccaccgaaggtgaggttccttacagagaagggcaatcgataggaataattccagaaggaattgacaagaacgggaagccacacaagctgaggttatactctatcgccagcagtggccattggtgactttggagactccaaaaccgtttctctctgtgtcaagaaggttagtttacactaacgaaagccggagagatttgggttaagggagcctgcctccaccttccttgtgtggccttgaagcccagtgan

SEQ ID NO: 7080 - DNA, 679 bp, Zea mays
  misc_feature (632)..(632): n is a, c, g, or t
  Peptide Sequence Number=SeqID_13470
  Probeset Number=SeqID_21483
agattagcccactttgcttggcttaggattgttcttgcatcatcttaaaaaaatggcttcgctttctttactcagcggcggtgctctccaggctcgttgcgcaagacatgcacatgttagcccacgcgcggcgcatgctaccaaagccgcgcctccgtcctcctctctaaccggcgcctctcgcaggaacctgctgttttccctgacggcagcgacggtggtgacgggactgcagcctgcatcaatggcggagactattccgttattcgggatcagaaagaagctgaagaaggcagaagaagaagcggtggagatcgtgaaggaaggcttcgagacggcggagaaaggactagagacggcggagaaaggaatagaggcggcggagaagggagtagagacggcggagaaagaaatcgagacggcggttagttacaacggattgacacaggcgggagcagtcgtgggctgctgaagttcgtggggagttcttgtcgcaaactttcggccggtcaacgggcatttttaggaccggaaagccccagaaagcccgtagacttttaatccatttccaagactgaaaggcctttgtgctttaagtgtaatattgtgtctaaaaagtgtgtcattacgcngtgaacgtatcgtaattttgtttgagttttatatgtaatatatttaa

SEQ ID NO: 7081 - DNA, 578 bp, Zea mays
  Peptide Sequence Number=SeqID_13471
  Probeset Number=SeqID_21484
aaaaaaatactttaatattcctaaggattctcaccattggagatggtctaattagttcgggaacataataagcgaggtctcttgtgagctctatcttcttccctctttcgatttcctgagcttcagattaacaaacatggccaccgctggaaacaagaacatcaacgccaaactgataacattctcaacgcaattgctaagctgggatttactgagccaacaccaatacaagctcagggatggccaatggctttaaagggtagggatttaatttggctatttctccaccttctccgactacaagcaatgtgtcatctccttctccttgtgatgttaaagtaggtgaagaacctgtttctttgactaagagaagattcaggtctaataatattgaacctatacattttgggaaaatgaaggtaattgagaaaaaaacttaaagctttacacttttttgtggacacatttagtttcttaattttgcgatggaggcagcaaagagaggaagtgagccgagatggccaacgaacatgaccgaatgccttggggggggcaattggtgggggcgcaggctcacc

SEQ ID NO: 7082 - DNA, 578 bp, Zea mays
  Peptide Sequence Number=SeqID_13472
  Probeset Number=SeqID_21485
ggtgagcctgcgcccccaccaattgccccccccaaggcattcggtcatgttcgttggccatctcggctcacttcctctctttgctgcctccatcgcaaaattaagaaactaaatgtgtccacaaaaaagtgtaaagctttaagtttttttctcaattaccttcattttcccaaaatgtataggttcaatattattagacctgaatcttctcttagtcaaagaaacaggttcttcacctactttaacatcacaaggagaaggagatgacacattgcttgtagtcggagaaggtggagaaatagccaaattaaatccctaccctttaaagccattggccatccctgagcttgtattggtgttggctcagtaaatcccagcttagcaattgcgttgagaatgttatcagtttggcgttgatgttcttgtttccagcggtggccatgtttgttaatctgaagctcaggaaatcgaaagagggaagaagatagagctcacaagagacctcgcttattatgttcccgaactaattagaccatctccaatggtgagaatccttaggaatattaaagtattttttt

SEQ ID NO: 7083 - DNA, 625 bp, Zea mays
  misc_feature (601)..(625): n is a, c, g, or t
  Peptide Sequence Number=SeqID_13473
  Probeset Number=SeqID_21486
gtagtcttctacttcaatcgcttttggtatcccactctctgtttgttccaaaaatggcccttcaagctgcttctttggtctcctctgctttctctgtccgaaaagatggaaaactgagtgcttcttcagcatacttcaaggactcgagtctctttggtgcctccattaccgaacatggttcttcctcattaagattcaagagagaacttagcgtgagaaatgtagcgataagagcccaaaccgctgcaacttccagcccatccatcacaaaatcttcagttgacggcaagaagaccttgaggaaaggtaacgtggtggtcacgggagcttcgtcagggttaaggtctggccacggccaaagctcttgccgagacagggaaatggcacgtgataatggcgtgcagggacttcctcaaagccgaaagagccgccaagtccgcagggatgcctaaagacagctacacggtgatgcatctagacttagcttcgttagacaggcgtgagaacagttcgttgataacttcaggagatcggagatgcctctcgatgttttggtctgcaacgctgctgtctaatttcccgacgctaaagagcctacttnnnnnnnnnnnnnnnnnnnnnnnnn

SEQ ID NO: 7084 - DNA, 686 bp, Zea mays
  misc_feature (601)..(686): n is a, c, g, or t
  Peptide Sequence Number=SeqID_13474
  Probeset Number=SeqID_21487
attccatcaaattcttctttctaaatcctcaattcattctcgaaccccttgaatcctatcctcctcatctctctcagaaggaaagctttaatggaggcagcgtctctttccgaagaaagcttgaagcttgagctcgacgatctgcagaaacagctcaacaaaaagctgagattcgaggcatccgttcgttctatccattctctcctccgtgatcgctacacttcctcctctccttctctccgcaaacagttctatacagttgtgtctcgtgtggcgacggttctcaagacgagatacacagctactggcttttgggttgcgggactgagccttttcgaggaagctgagagacttgtctctgatacttctgagaagaaacacttgaaatcttgcatcgaacaagcgaaggagcagttaaccgaggtagatattcagccgacggagagctcacaaggctatcttttcgagggacatctgacggttgatcgcgagccgccgcagcctcagtggctggtgcagcagaatctcatgtctgctttctcttccatcgttgccggtgaatcctctaatgctgctgctgctgctgttggaaacgttcttnnnnnnnnnnnnnnnnnnnnnnnnnnnnnnnnnnnnnnnnnnnnnnnnnnnnnnnnnnnnnnnnnnnnnnnnnnnnnnnnnnnnnn

SEQ ID NO: 7085 - DNA, 695 bp, Zea mays
  misc_feature (609)..(609): n is a, c, g, or t
  misc_feature (629)..(629): n is a, c, g, or t
  misc_feature (640)..(640): n is a, c, g, or t
  misc_feature (643)..(695): n is a, c, g, or t
  Peptide Sequence Number=SeqID_13475
  Probeset Number=SeqID_21488
aaaaaacccctaaagctaaaaacaaaccttatctcttctcatctcttcaccatggctgcttcagcttcctctctcgctctctccaccttcacccccaagtcccttcctttctccatctccagacccgcctccgcttccctctcacctccttccctctccttcaatctccactccctctccgcctccctctccctctccatctccgccgcttcctctcgcttcgtccgtaacgtcgcggttactgacgacttctcggtcgaagaagacggcatcttcgctgacgacgacgctcctcctcccccgcggcgggagcaatccttctcttctgacctcaagctcttcgtcggtaacctccccttcaacgtcgacagcgctcagctcgctcagctcttcgagagcgccggaaacgtcgagatggttgaggttatctatgacaaggtgacagggagaagcagaggttttgggtttgtgactatgtcttcagcctctgagggtcagacagctgaacagcaggtcaatggctatgagttggatggtagaccgttgagaggtaacgccggtcctccctccaccgagaggggagactccttctctcagagacctagaagncagctttggagctctggtgnagatatggggnagnnnnnnnnnnnnnnnnnnnnnnnnnnnnnnnnnnnnnnnnnnnnnnnnnnnnn

SEQ ID NO: 7086 - DNA, 639 bp, Zea mays
  misc_feature (554)..(554): n is a, c, g, or t
  misc_feature (601)..(639): n is a, c, g, or t
  Peptide Sequence Number=SeqID_13476
  Probeset Number=SeqID_21489
acgtttacttttctcaattttaatcagagcttcatattcagctccgactcacgaggacctctcactctcactctcgatctctctcgctattccttcgatcgtctcgactactggattttgatactgcacactagtgtgttattcaaaatgtttcgccgcaagactacttcgcaagctgaacaagagaataatgaagcagctctcagagaggcaaagatcaaagagctcaagactctcataggcgagctctctggaaggagttcactctactgttcagatccctgtctcaagaggtatcttgaagctaggagctggaacgttggcaaagccaagaagatgcttgaagagacgctgaaatggagatcaaccttcaaacctgaagagatccgttgggatgaagtttcaggtgaaggtgagactgggaaagtctacaaagctggattccatgacagaagtggaagaacggttcttatactcagacctggattgcagaacaccaagtctttggagaaccagatgaaacatttaagtgtatctctttgagaatgctattnatgaatcctcccggaggtcaaagagcagatggtctgggctcattgannnnnnnnnnnnnnnnnnnnnnnnnnnnnnnnnnnnnnn

SEQ ID NO: 7087 - DNA, 469 bp, Zea mays
  misc_feature (462)..(462): n is a, c, g, or t
  Peptide Sequence Number=SeqID_13477
  Probeset Number=SeqID_21490
aacgtctcgccttccgcagttgcagcaacagtctctcttctcactctctcgccgtcgcaaacatgggtaagacacgtggtatgggagctgggcgcaagctgaagaggcttaggattaaccagaggtgggctgacaagcagtacaagaagagtcaccaaggaaacgagtggaagaagccttttgctggttcttcccacgctaaaggaatcgtccttgagaagattggtattgaagctaagcagcctaactctgccatccgtaaatgtgctagagttcagttgatcaagaacggcaaaaagattgctgctttcgttcccaatgatggttgcttgaactacattgaagaaaacgatgaggtgttgattgctgggtttgggcgtaaaggacatgccgttggagatattcctggagttaggttcaaggtggtgaaggtgtctggtgtctcactcttggctcttttcnaggagaa

SEQ ID NO: 7088 - DNA, 611 bp, Zea mays
  Peptide Sequence Number=SeqID_13478
  Probeset Number=SeqID_21491
agcctcttcttggtaacttactaagccatgaaatagctcgcaaagccttttcttcctctacgtttctaattgccttcgacgaagatctaccgtagagaagtctacctcgtagaccaatctctcaaatttgattccctattctcgttgccaacgtcaaatatgcgtctctcttgtagtcttacacccttcattctcctcttttttctcttccttgtcgcaccagccgtatcttctggtgtagctatcttgagaacagattattaccaaaagacatgccccgatttcaacaaaatcgtgcgtgatgccgttatagccaagcaaggtcaacaaccgacaactgcggccgggacacttcgtctcttctttcacgattgtttcctcgaaggctgtgatgcgtctgttttgatagcgaccaactcgttttaacaaagcggaacgtgacgatgatctccacgactcccctcccaggagatgcttttgacattgttaatcgcatcaaaacagctctagagctgtcttggcccggtgtgggatcatgcgctgatattttagcgcaggctacgcgtgaccttgtcacgatggtaggaggactttacttcgacggaaagctt

SEQ ID NO: 7089 - DNA, 641 bp, Zea mays
  misc_feature (624)..(624): n is a, c, g, or t
  Peptide Sequence Number=SeqID_13479
  Probeset Number=SeqID_21492
gattcaattcgataacacggcttgactcagagaggctaaggatccagagtcatgcagtatctatcgaactctcgtagaatcgctcgggctctgaaaccccttgcactcctcgaggctgatgtgagattcgcttctcatgttgttgactctacccaatggcagaaccatcgatctccttcagtctctgtctctccagggatgaacactcagtcacacatgacggggcttatgatgctgagatcaagcttttcctctgaagcaaaacttgtcgaagatcctacggaggctgtcaaggagctacatggtaagatacttgattctgtgaatgtcaagagatcccatgcctccaaatgctttgttgtggtcgttgattggggattgtcgcagggaggatgacattagtttcctctttgatgctctccagaatctccggagatttaggtggtccaatcctccgtatacgtggacaactttaatttgcaatctatggcccggcaggttggctaagacccgggggaccgggggggagcaaattaaccctgggataacgggcctctttggaaacctaagggtcatgggttgactcctagcgttgcatctgctcaccatttactggtctatgcngtagagcacaggactct

SEQ ID NO: 7090 - DNA, 641 bp, Zea mays
  misc_feature (18)..(18): n is a, c, g, or t
  Peptide Sequence Number=SeqID_13480
  Probeset Number=SeqID_21493
agagtcctgtgctctacngcatagaccagtaaatggtgagcagatgcaacgctaggagtcaacccatgacccttaggtttccaaagaggcccgttatcccagggttaatttgctcccccccggtcccccgggtcttagccaacctgccgggccatagattgcaaattaaagttgtccacgtatacggaggattggaccacctaaatctccggagattctggagagcatcaaagaggaaactaatgtcatcctccctgcgacaatccccaatcaacgaccacaacaaagcatttggaggcatgggatctcttgacattcacagaatcaagtatcttaccatgtagctccttgacagcctccgtaggatcttcgacaagttttgcttcagaggaaaagcttgatctcagcatcataagccccgtcatgtgtgactgagtgttcatccctggagagacagagactgaaggagatcgatggttctgccattgggtagagtcaacaacatgagaagcgaatctcacatcagcctcgaggagtgcaaggggtttcagagcccgagcgattctacgagagttcgatagatactgcatgactctggatccttagcctctctgagtcaagccgtgttatcgaattgaatc

SEQ ID NO: 7091 - DNA, 622 bp, Zea mays
  misc_feature (402)..(402): n is a, c, g, or t
  misc_feature (597)..(597): n is a, c, g, or t
  misc_feature (601)..(622): n is a, c, g, or t
  Peptide Sequence Number=SeqID_13481
  Probeset Number=SeqID_21494
atactgaaaaacgaagacgctctctctctctctcttcctactcctttgcttctaaatagcccaacttaagagcttctcttccatttctaaatcctgttcccctgaagtcttctcttttgtttgtgggtctaaggtaaagaagctgaactaatgtttagaacattgttgtagtgaaaatttagaaacataaaataaataaaaactgtagaagacattaaaccctttttggtgtcatgatgaaaagactaagcagctcagattcaatgtgtggtctagtctccaattctccagatgagcagagtccacgagggtacggaggtaatttccagtctatgctcgacggctacgaagaagacggcacaatagtcgaggaatattccggcaaccaccaccactggggcnctatcggagaagaagaggaggctgcgtgttgaccaagtcaaagctctcgagaagaatttcgagcttgagaacaaactcgagcccgagaggaaaaccaaactagcgcaagagcttggtcttcagcctcgccaagtagcggtttggttccaaaaccgccgtgcacggtggaagacaaacagctcgaaaagactacgncctnnnnnnnnnnnnnnnnnnnnnn

SEQ ID NO: 7092 - DNA, 617 bp, Zea mays
  misc_feature (617)..(617): n is a, c, g, or t
  Peptide Sequence Number=SeqID_13482
  Probeset Number=SeqID_21495
atatctcttatcccctccttctctcccaatagtctcacagtcccctctagaaatatgtcttcagcttattgttcctccgccgtggcggtttccaccgcagccaccgtttcctccgccactacctttaacccactattctccttccattcgaatttcaaactcttctatcgcatcacaccaaaacccttcaaactcgtcgccaaatgccctactcctcctctcttcctccatctaaatacccatcgccaccgcctcttctgcgccgccgaagacgaaatcccgccgtcatccgaagaagacgaggaagaaaacgaagaagacgaagacgcagatgagacacagacgacgcacgctagcgttgaggaagggaggctgtacgttgggaacttgccttacacaatcactgcctctgagctctcccagcttttcggagaagctggaaacgtcatcgatgttcagattgtgtacgataaagtcactgacagaagcagagggtttggattcgtaaccatgggaaccatcgaagaagctaaagaagcgattcagatgttccacagctctcaaatcggtggaaggacggggaaagggaacttcccggaggggcctagaggcggagn

SEQ ID NO: 7093 - DNA, 643 bp, Zea mays
  misc_feature (406)..(406): n is a, c, g, or t
  Peptide Sequence Number=SeqID_13483
  Probeset Number=SeqID_21496
gggtttcgtgctcctcttcgttacacggcggcacctgttctgcttctccgaactctgaaacggctcgagttatggttttataaatatgcgaccataacgcaggccaccattaatgctaaccggcgtccaacattccgacctagactcacggccggttcgatgtgtttcgatgtgttcaacagccggtactatgatagggttcgtgttttacaaaaatgttaataaatctgtaactgtcgaataaatacacatcagcaatcactattatgttgataatcagagccattgtagctaaacctttcattgcagtacccttagatctgtgagaaatgctctgagtaatggtgaacaaacagatagaaagagttcgaggatctaggtcccagcgaggtgagtagtaacacangaaaaagtttgggcgctgacagaacacaccaaacggtcacgttgacacgagagtctcgagctccggtgatcataccgaccttgcatcacaattatctcacgtgaggggccccttccttaagaggaaatctttgggcccaaacatgattcttatcttgccccccagcatgcgagctccaagaacttggaagagaatgccccaaatggtttttcctataggggattgagaaggttttgg

SEQ ID NO: 7094 - DNA, 643 bp, Zea mays
  misc_feature (238)..(238): n is a, c, g, or t
  Probeset Number=SeqID_21497
ccaaaaccttctcaatcccctataggaaaaaccatttggggcattctcttccaagttcttggagctcgcatgctggggggcaagataagaatcatgtttgggcccaaagatttcctcttaaggaaggggcccctcacgtgagataattgtgatgcaaggtcggtatgatcaccggagctcgagactctcgtgtcaacgtgaccgtttggtgtgttctgtcagcgcccaaactttttcntgtgttactactcacctcgctgggacctagatcctcgaactctttctatctgtttgttcaccattactcagagcatttctcacagatctaagggtactgcaatgaaaggtttagctacaatggctctgattatcaacataatagtgattgctgatgtgtatttattcgacagttacagatttattaacatttttgtaaaacacgaaccctatcatagtaccggctgttgaacacatcgaaacacatcgaaccggccgtgagtctaggtcggaatgttggacgccggttagcattaatggtggcctgcgttatggtcgcatatttataaaaccataactcgagccgtttcagagttcggagaagcagaacaggtgccgccgtgtaacgaagaggagcacgaaaccc

SEQ ID NO: 7095 - DNA, 633 bp, Zea mays
  misc_feature (633)..(633): n is a, c, g, or t
  Peptide Sequence Number=SeqID_13484
  Probeset Number=SeqID_21498
aaaatattatcttctttcctctttagcttcttcttttccagtctcccaatggcttcttcgaaatacaaacctataaacttcatatttcatgttttttatttgatttttattttctccgcccatagttccacggcggagctcaagaggctactgcaaccagctaaaccagatggtagagtaagctttctcgtcatcggagactggggaaggggaggctcctataatcagtctaacgtagctcttcagatgggagaagttggagaaaagttaaatatagattttgtaatatctaccggagataatttttacgacaatgggttacttggcttggatgatcctgcatttcaagattcttttaccaacatttataacgcgtcgagcttgcaaaagccttggtatactgttttacgaaaccatgactatagaggtgacgtcgaggcacaacttagccctatgctaagagctatggacaacagatgggtctgcatgagatctttcgtcggtaatgctgagatcgtcgagttttttgtcatcgacacaactccatttgtcgataaatactttgtccaaccaaataagcatgtctatgactgggagaggagtgttccccagaccaacatatctgaacatctn

SEQ ID NO: 7096 - DNA, 639 bp, Zea mays
  misc_feature (1)..(30): n is a, c, g, or t
  misc_feature (631)..(639): n is a, c, g, or t
  Peptide Sequence Number=SeqID_13485
  Probeset Number=SeqID_21499
nnnnnnnnnnnnnnnnnnnnnnnnnnnnnnttttacatttttctcttcccctccgagttaactcgctcttgcctgactcaccgagtcatggcgcttctcaggcctcaccttcatcgcttccactccaacgctctccaccaatcagcccctcatactaaatcaaccgccgacgctggcggtggacttgtcgtctaccccacctatggtcgtcgtcgtcgtcaccgttgctccgcgattgcgatcgacgctccgtcgtctctcgccggcgtgacgcctatccgatgggggtacacgagcgttcaagggttcagggaggagatggaggacgacatcgtcatccgctcggaagcgctcgacagcttctccttcgccgcggttttcgacggccacgctggatcctcctctgttaagttcctcagggaggagctgtacaagggatgtgttgaggcgttgcaagttggatctttgttgaaaggtggtgactttggtgcgatcaagggaagctttggtcaggcctttgagagtgtggatcagagtttgcttaaatggctagaaacaaaaggtgaagaagatgagtctggttcaacggctactgtgatgctctttagaaatgatgtttcctacttgcacnnnnnnnnn

SEQ ID NO: 7097 - DNA, 643 bp, Zea mays
  misc_feature (496)..(496): n is a, c, g, or t
  misc_feature (535)..(535): n is a, c, g, or t
  misc_feature (587)..(587): n is a, c, g, or t
  misc_feature (621)..(621): n is a, c, g, or t
  Peptide Sequence Number=SeqID_13486
  Probeset Number=SeqID_21500
atcgtcttcttctccaccacacccacacacacacacacgctttcgttactcaatcaatctgttgcaaatgtcgaagagcaacggagctcgcagctgtctaggctcgatggacgacatccgccgagtcttccagcgcttcgacaaaaacggcgacgggaaaatctccgtcgacgagctcaaggaagtgatccgcgcgctcagccccaccgcgtcgccggaggagacggtgaagatgatgaaacagttcgatctcgacgggaacggattcatcgacatggacgagttcgtctctcttttccagatccgagtgaaccaaggcggaggaggagagaaaacagcaagaacgatctgaaggaaagcgtttgagctgtacgatctggacgggaacgggcggatctcggcgaaggagcttcactcggtgatgaaggatctgggaggagaagtgctctgtgtcaggattgcaggaagatgattagccaagttgatactgatggtngacggttgcgttaacttcgagggagtttaagctgatgantgaaccacggcggcgctggatgatcgtcttttaaggattgtgttgatagagnaaatctagagggtctgttaatgttcctgttttanggacgcgttttaatttaaaacg

SEQ ID NO: 7098 - DNA, 600 bp, Zea mays
  Peptide Sequence Number=SeqID_13487
  Probeset Number=SeqID_21501
atgagacgggcatttctaaaccctcgtcgtggctggctcggtgttacaacacatctaccgatcaagccaaagctctggcgggccagcgagcggccatgtcgtggatgaaaggagatttactttccaaaaccaggaggcttgttggtggactcgctacccgtgagcccgtttggcttaaagccatggaagcatcacctcctcctgtctttcctcgctctaatgggaacctcaagaagattgttctccctgaagatccctacgttcgtagattcgcccgcaagcatcctgaagccaaactcgtcgaccccatcaaggcttcggcgtttattccagatccagctcgcgtatatggttgccgggtccttgaactgaccaagaatggcatcagcgaggatgacgccatgtctgttgctaatatggagtaccttgcggagaggaaggaaatgaagaaagcatacaaacgcctaaaggagcttgcggtactgcaagacaagtctcctcctcctaaaccgtatcttagttccaaaacagagatgcaaatccaagagaagaagccccccacggatcctcctagcgtccgcaggcttgttaaccagctga

SEQ ID NO: 7099 - DNA, 655 bp, Zea mays
  misc_feature (598)..(598): n is a, c, g, or t
  Peptide Sequence Number=SeqID_13488
  Probeset Number=SeqID_21502
actaatctcgatctttcttcaacctagccgctacactgagattcatttgacaagtagctatgggtaaagagaagtttcacatcaacattgtggtcattggccatgtcgattctgggaaatcgactaccactggtcatttgatctacaagcttggtggtattgacaagcgtgtgatttgagaggttcgagaaggaagctgctgagatgaacaagaggcccttcaagtatgcgtggggtgttggacaaattgaaggctgagcgtgagcgtggtatcaccattgacgttgctctttggaagtttgagaccaccaagtactactgcacagtcattgatgctcctggacatcgtgatttcatcaagaacatgattactggtacctcccaggctgattgtgctgccttgatcattgactcccccactggtggtttcgaaagctggtatcttccagggatggtcagacacgtgagcatgctctccttgctttcacccttggtggcaagcagatgatttgctgctggaacaagatggatgccaccactccccagtacctctaggccaggatacgatgagagtcatcgaggaggtggcttcctaccntggaaggaagggtgggtacaaccctgacaaaatcccttcgtccccctcctctggttt

SEQ ID NO: 7100 - DNA, 624 bp, Zea mays
  misc_feature (618)..(624): n is a, c, g, or t
  Peptide Sequence Number=SeqID_13489
  Probeset Number=SeqID_21503
aaaacgcacagccacagtcccggacactccaaaaaatggcagccgccgccgcacgccctctagtcaccgtccaaggcctcgacggagacatgacaaccgacaaatccaccaccgtctgcctacccgacgtcatgacagctcccgtgaggccagacatcgtcaacttcgtccacgcccaaatctccaacaacagccgtcagccttacgccgtctccaagaaggccggtcaccagacctccgccgagtcctggggaacaggacgcgccgtctcccgtatccctcgtgttcccggcggcggaacccaccgcgcaggtcaagcggccttcggaaacatgtgtcgcggcggtcggatgttcgctccgactaagatctggagacgctggcaccgtcgcgtcaacgtcaacatgaagaggcacgcgatcgtctcggcaatcgccgccactgctgtgccctctctcgtgatggcacgtggtcacaagatcgagaatgtccccgagatgcctctcgttgttagcgattcagctgaggctgtggagaagactagtgctgcgatcaaggttttgaaacagatcggtgcttatgatgacgccgagaaggcgaaagatagtattggggatnnnnnnn

SEQ ID NO: 7101 - DNA, 613 bp, Zea mays
  misc_feature (565)..(565): n is a, c, g, or t
  Peptide Sequence Number=SeqID_13490
  Probeset Number=SeqID_21504
acacacttctctctctctgccccaaatctctagatccgaaaaatggcgttgatcgttgagaagacgtcgagtggccgtgagtacaaggtcaaggacatgtctcaggccgacttcggtcgtctcgagctcgagctcgccgaggttgagatgcccggactcatggcctgccgtaccgagttcggcccagctcagcccttcaaaggcgctagaatcaccggatctctccacatgacgatccagaccgccgtcctcattgaaaccctaaccgccctcggcgcggaagtcagatggtgctcctgcaacatcttctcaacccaagaccacgccgccgccgcaatcacccgcgactccgccgccgttttcgcctggaaaggcgagacgctgcaggagtactggtggtgcacggagcgtgctctcgactggggcccaggcggtggtccagatctgatcgtcgatgacggtggcgacgccacgcttttgatcccacgagggagtgaagggccgaggagatctttgagaagacgggtcaggttcctgatcccacttccactgacaacccctgagnttccagatcgtgctggccatcatccggggaggtctcccgtggtgcccc

SEQ ID NO: 7102 - DNA, 631 bp, Zea mays
  misc_feature (606)..(631): n is a, c, g, or t
  Peptide Sequence Number=SeqID_13491
  Probeset Number=SeqID_21505
attttagtgaacatatggcgaatttgggagaagagaagaaggggaagctgaagctctactcttactggagaagctcctgcgctcatcgtgtccgtatcgccctctctcttaaagggcttgaatatgagtatatacctgtgaatctgctcaagggtgaacaatccgatccagatttcaagaagatcaatccaatgggcactgtacctgctcttgttgatggagatgttgtcatatccgattctcttgctatcataatgtatctggatgagaagtatcctgagccaccgctcttacctcctgacctccacaaacgtgctgtcaatttccaggcagcgagtattgtcttgtctggcatacagcctcatcaaaacctgggtgtcattaaattcattgaggaaaagataaattcggaggagaaaacggcttgggttactaatgctatcacaaaaggattcacagctctcgagaaactgttggtgagctgcgctggaaaacacgcaactggtgatgaagtttacttggctgatctctttctagcaccacagatctacggagctatcaacagggtccagattaacatggaaccgtacccgcctctggcaaggnnnnnnnnnnnnnnnnnnnnnnnnnn

SEQ ID NO: 7103 - DNA, 599 bp, Zea mays
  misc_feature (519)..(519): n is a, c, g, or t
  Peptide Sequence Number=SeqID_13492
  Probeset Number=SeqID_21506
aatttcaccaacttcgactcctctagggtgctctctgctcgcgttgcccgggggttttgcgtgtctgagccatggcgtcgaagaggattctgaaagagctcaaggatttgcagaaggatcctccttctaactgcagcgctggtcctgtggctgaggacatgttccattggcaagcaactatcatgggacctcctgatagtccctacgccggaggagtctttttggtttccattcactttcctccggattatcccttcaagccaccaaaggtgtctttcaagacaagggtgtaccacccaaacatcaacagcaacggaagcatctgccttgatatcctgaaagaacagtggagccctgctctcaccgtctccaaggttttgctgtcgatctgctcgttgctgacggacccgaaccctgatgatccgcttgtgccggagattgctcacatgtacaaaacggacaagtccaagtacgagtcaactgcacgaagctggacacagaagtacgccatgggatgantagaagagactcgagtgatctagagaagcgaaaggggttgtgttattctgcatccaaatatcttaaacctttaatatgaa

SEQ ID NO: 7104 - DNA, 619 bp, Zea mays
  misc_feature (618)..(619): n is a, c, g, or t
  Peptide Sequence Number=SeqID_13493
  Probeset Number=SeqID_21507
atcaagaaaagcaaataaaaaaacctctctcttaataaagtgctctaacctctctcttaccaaactaggtcaagccgccgtcaagcttcgtttccggcggtcgctgtgccggctaaggcgaccgccgggcctccccttttcatttgcgtttctctgctcctccctctccgtcggtcctcgacgttctgcggcttctaaggcgtgtccaagcttctcatccggagtagatctggagcgttctcttcaccggagccaggccgtgggtctttgcagcgctcgaggacggcgttcgcgtctcaccggctctgtttcttcgactggaggaaggctctttccagatgaggttttcccagtttggacgtggcttgggttgagttatggtgtgtggcggtttggagaagcccgagttgttcgtcttgtgctccaccggttggtttcacggcggtagtgtccggcgaattaggttcgggttgggtttgaggattcacgatctcaagctccttgtctctcccttctgctagtgatctcaggtggacgtgtgtgggtgtgaaccgtgttggtctctccgactccggctttcccggtggccacgggcgtggataccgcccgcgcgtggtnn

SEQ ID NO: 7105 - DNA, 619 bp, Zea mays
  misc_feature (1)..(2): n is a, c, g, or t
  Probeset Number=SeqID_21508
nnaccacgcgcgggcggtatccacgcccgtggccaccgggaaagccggagtcggagagaccaacacggttcacacccacacacgtccacctgagatcactagcagaagggagagacaaggagcttgagatcgtgaatcctcaaacccaacccgaacctaattcgccggacactaccgccgtgaaaccaaccggtggagcacaagacgaacaactcgggcttctccaaaccgccacacaccataactcaacccaagccacgtccaaactgggaaaacctcatctggaaagagccttcctccagtcgaagaaacagagccggtgagacgcgaacgccgtcctcgagcgctgcaaagacccacggcctggctccggtgaagagaacgctccagatctactccggatgagaagcttggacacgccttagaagccgcagaacgtcgaggaccgacggagagggaggagcagagaaacgcaaatgaaaaggggaggcccggcggtcgccttagccggcacagcgaccgccggaaacgaagcttgacggcggcttgacctagtttggtaagagagaggttagagcactttattaagagagaggtttttttatttgcttttcttgat

SEQ ID NO: 7106 - DNA, 625 bp, Zea mays
  misc_feature (615)..(625): n is a, c, g, or t
  Peptide Sequence Number=SeqID_13494
  Probeset Number=SeqID_21509
atcacaaagctaaatacgaaagaaacatggggttcttgggtaagagtatattgtcgagtctccttgcaatatggttcttcacttcctgtgctttcactgaagaagtgaaccatgttaaccaaacgccttcctctgctcctgctccatctccttaccaccacggccaccaccacccacatcctccccatcaccaccaccctcaccctcacccaccggcaaaagcccctgtcaagccgccggtttctccaccttctaaacctccggttaagcctccagtttaccccccaaccaaatccccggttaagcccccaactaaacctccggttaagccaccagtttccccaccagcaaaacctcctgttaaacctccggtttaccctccgaccaaagctccagttaagcccccagtcaaacctccggttaagccaccagtttcaccaccggccaaacctccaataaagccaccagtttcaccaccggccaaacctccggttaagcccccggtttaccctccgaccaaagcccctgttaagcccccgaccaaagccccggctaagcctccggtctctcctccagccaaaccccagtatcccctcagctaagccccggtgaagnnnnnnnnnnn

SEQ ID NO: 7107 - DNA, 625 bp, Zea mays
  misc_feature (1)..(11): n is a, c, g, or t
  Probeset Number=SeqID_21510
nnnnnnnnnnncttcaccggggcttagctgaggggatactggggtttggctggaggagagaccggaggcttagccggggctttggtcgggggcttaacaggggctttggtcggagggtaaaccgggggcttaaccggaggtttggccggtggtgaaactggtggctttattggaggtttggccggtggtgaaactggtggcttaaccggaggtttgactgggggcttaactggagctttggtcggagggtaaaccggaggtttaacaggaggttttgctggtggggaaactggtggcttaaccggaggtttagttgggggcttaaccggggatttggttggggggtaaactggaggcttaaccggaggtttagaaggtggagaaaccggcggcttgacaggggcttttgccggtgggtgagggtgagggtggtggtgatggggaggatgtgggtggtggtggccgtggtggtaaggagatggagcaggagcagaggaaggcgtttggttaacatggttcacttcttcagtgaaagcacaggaagtgaagaaccatattgcaaggagactcgacaatatactcttacccaagaaccccatgtttctttcgtatttagctttgtgat

SEQ ID NO: 7108 - DNA, 631 bp, Zea mays
  misc_feature (620)..(631): n is a, c, g, or t
  Peptide Sequence Number=SeqID_13495
  Probeset Number=SeqID_21511
actactatctttcccacaatggcttccgcaagatttttatctctcctctccaccgtcactctctctcttctcctcaccacgaccgatgcttcctctcgctccctaccaacatcacacgaaacgaccgtactcgacgtcgtttcatctctccagcaaacacaacacatcctctcaatcgacccgactcgctcctcactcaccaccaccaccagcgcacccgaatccgtcccggtcttcctcaactcctcctctccactctctctagagctccactcccgagacaccctcgtcgcgtcacagcacaaggactacaagaacctagtactgagtcgactcgagcgagactcatcccgagtcgccgcaatcatcgctaaagtcaacctcgccgtcgagggcgccgacagcgagacccgataccaacccgaggagctaacgacacctgtcatctccggagctagccaaggaagcggcgagtacttctcccggctcggcgtcggaactccggcgaaggagatgtacatggtgctcgacaccggaagcgacatcaactggatccagtgcaagccttgctcctcctgctaccaacaatccgacccgatattcgacccgaggtctccctnnnnnnnnnnnn

SEQ ID NO: 7109 - DNA, 724 bp, Zea mays
  Peptide Sequence Number=SeqID_13496
  Probeset Number=SeqID_21512
tcaagtggtgaactgcaacctccctccctccctcccattcatccaagtcggacaaaacgacgtcacctccacttgcgctcccctttctctccgccggcgggagtatattctcacggaatattccccttctcgtgcttagtattattagggtatggaaaatgacgtcaaggtcgcggagaaagtggaggaagctgaccgccttcttcctccccagtctcttccctctaattccgacgaggaagaacccgaatccgaatccgaagcagaggccgcggtcgaatctcgtgacaagatcgtgatcgtcgatttcgaatcagccggcgatcccgcggcagtacctcctttctcgtggcggaaactgtggctgttcacgggtccaggtttcctgatgagcatagccttcttagatccagggaatctagaaggagatctacaagctggtgccatcgctggctattctctcctatggctcctaatgggggccaccgctatggggttactgattcagatgctcttccgctagagtcggtggtcgccaccgggccgacatctgggttgaactctggccgcgacgagtaatcccgctttggggcgaagggaatttggcttttgggcctaatgggcccgagcctccggctcctccggtccgaagctggaataattccaaagaaggggtttattcggggaaagggggggcaaaaaaagcggaattccagagagatcc

SEQ ID NO: 7110 - DNA, 648 bp, Zea mays
  misc_feature (466)..(466): n is a, c, g, or t
  misc_feature (587)..(587): n is a, c, g, or t
  Peptide Sequence Number=SeqID_13497
  Probeset Number=SeqID_21513
tcgctttatcgcctccaaagacttcaacgcagaccaatctccttgtaaccgtttatccttcgctgagatctaaaacatggcggatgtggaaccagaggttgctgcggcaggagtcccgaagaagaggacgttcaagaagtttgccttcaaaggagtcgatctcgatgctcttctcgatatgtctactgacgacctcgtcaagctcttcccttctcgtattcgcagaaggttctctagaggtttgaccaggaagcctatggctctcattaagaagctccgtaaggctaaaagggaggcaccgcaaggtgagaagccagagccagtgagaacccacctgaggaacatgatcattgtcccagagatgatcggaagcatcattggagtgtacaacgggaagacctttaacccggtcgagatcaagcccgagatgattggtcactacctggctgagttctccatctcgtancagccggttaagcacggtaggccctggtggtggtgctacccactccccccaggtcattcccctccagtgaggaagagcttggtatactctgggggaaacgcgtccatctttttacatggtnctctttgccttgggtttctcaaagtttgtttgacccctttttggtgttgcttttatgagga

SEQ ID NO: 7111 - DNA, 639 bp, Zea mays
  misc_feature (635)..(639): n is a, c, g, or t
  Peptide Sequence Number=SeqID_13498
  Probeset Number=SeqID_21514
gtattagaaaaagatttgaacatgagtgagcatcatcattttgcgtttgtgcacggtgcagggcatggaggatggtgttggtacaagctcgccaattcactgagagagaatggacataaggccacctgcatcgacctcaagggcgctgggatcaacctaactgatccaaacactgtctcctctcttgatgactacaaccagcctctctatgacttcctctcccaacttcccctcgaccaaaaggtcattctggtgagcccacagcgttggaggagggagcatgacggctgccatgtgccagtatccttccaaagtctccatggctgtttacgtcgcagcagccatggtcaaacctggtaccataattcccccaattctcaaggaagtactaaagatatgttcagggatgatagagacggaagctgagaagatatgggacttcacttttggaaatggacccgagaatctccccacaagtatgatgatgaaacctgagtatgtccgggacaagtattacaacgagagccccatggaggattacacactggctaccacacttctgcgtccagcccctgtcatggcattttgcaggcatagtggatatccctgcagcaccagaggctgaccaaatcccnnnnn

SEQ ID NO: 7112 - DNA, 637 bp, Zea mays
  misc_feature (634)..(637): n is a, c, g, or t
  Peptide Sequence Number=SeqID_13499
  Probeset Number=SeqID_21515
atcgtctgagcttacctaactccagttaatggcgatgtcgacgactacactcttccatgcacttgttccttccaacacttacaaatccagagctgtctcctcttccttcgtctcagttcctcgctcctcaactccaccttcttcgccgtctctccagttccgctcgcttgtttcagacacgacgtcgatctacggtcggaggaaatttaccggcaatctcagaagagtatccttaaccgtctccgccgccgcagcagctgagcctctcaccgtcctcgtcaccggtgccggtggcagaacagggcaaatcgtgtacaagaagttgaaggagaggtcggatcagttcgtggcgagaggcttggtgaggacgaaagagagcaaggagaagatcggtggagaggacgaagtgttcgtcggtgatattcgagaccctgaatccattgctcctgctgtgcaagggattgatgctttggtcattcttacgagcgctgtaccgaagatgaaaccctggttttgatcctagcaaaggagagagacctgagtctactttgaaggaggagctaatccctgaacaggtttggattggattggtcagaagaatcagatagatgctgctaagcagccgggtattagnnnn

SEQ ID NO: 7113 - DNA, 574 bp, Zea mays
  Peptide Sequence Number=SeqID_13500
  Probeset Number=SeqID_21516
aagttttagtttcagcttcactgtcttttttaacgactctgttccttctccgaccaaaagcgagaaaaaaaatggcgtctcttggccaaatcaccctcccgcgagcgccatcgttgcagaaaggcctcctacgccgtccgatcagaaccccaatcagattcaacggccggatcgcgagtgtattgactaacgcgggttcggtgaaagcaagtgtgagccagaaggtgattgaagaggaggcgaaagttctggtgggtacctacgcgcgtgctccagtggtgctctcgagtgggaaaggttgtaaattgatggacgcagaagggaaagagtatcttgattgtgcatctggaatcgctgtgaatgctctgggccatggagatcctgattggcttcaagctgtcactgaccaagcttctgttctttcccacgtcagcaatgtctattacaccattcctcagatagaactagcgaaacgccttgtggcaagttctttcgcagaccgtgtattcttctgtaactctggaacagaagccaacgaagcagccatcaagttttctagaaagttccagagatt

SEQ ID NO: 7114 - DNA, 646 bp, Zea mays
  misc_feature (1)..(9): n is a, c, g, or t
  misc_feature (646)..(646): n is a, c, g, or t
  Peptide Sequence Number=SeqID_13501
  Probeset Number=SeqID_21517
nnnnnnnnnaagaacaataaccaaaaacacattttcttgatatattaaaatattaaatggcgaaagaggtggaaggagcagagggattcgcttcgagggactacgaagacccgccgccaactccgtttttcgatgcggaggagctgaccaagtggtctttgtacagagccgtcatcgccgagttcgtagccactctcctcttcttgtatgtcactgttttgactgtcatcggctacaagatttcctccgacactaaggccggaggtgatgagtgcggaggcgtcggaatcctcggcatctcatgggccttcggtggcatgattttcatccttgtctactgcaccgccggtatctcaggtggtcacataaaccctgcggtgacgttcggcttgttcttggcaaggaaggtatcgttggttagagcggtgctatacatggtggctcagtgtttgggtgcgatttgtggaggtggtttcgtcaaagcgttccaaagcgcttacctacgtacgttacgggggaggagcaaactccctagccgatggatacagcacaggggactggactcgcggcagagatcattggagacattcgtcctgggctacactggttttctccgctacagatcccaaaagaaacgcacgagacn

SEQ ID NO: 7115 - DNA, 645 bp, Zea mays
  misc_feature (623)..(645): n is a, c, g, or t
  Peptide Sequence Number=SeqID_13502
  Probeset Number=SeqID_21518
acaaatcaagagctaactctatataaagaaccatttgctctagcttattctcacaaccggaagcaaaagtaaaacagttcctaagaagaaacatccattacatataataatactacatggctaaagacgtggaaggagcagaggggttcgcggcgagggactacgaagatccgccgccaacaccgttcttcgatgcggaggagctgaccaagtggtctttgtacagagccgtcatagccgagttcgtagccactctcctcttcttgtatgtcactgttttgactgtcatcggctacaagatttcgtccgacactaaggccggaggcgacgagtgcggaggcgtcggaatccttggcatctcatgggccttcggcggcatgatcttcatccttgtctactgcaccgccggtatctcaggtggtcacataaaccctgcggtgacgttcggcttgttcttggcaaggaaggtatcgttgggttagagcggtgctatacctggtggcctcaagtgtttgggtgcgatttgtggggaagttgggtttcgtcaaagccttccaaagcttttaactacgtccggtaaggtgggggggcgaactctctcgcccgggggggctgcgggaagnnnnnnnnnnnnnnnnnnnnnnn

SEQ ID NO: 7116 - DNA, 656 bp, Zea mays
  misc_feature (1)..(55): n is a, c, g, or t
  misc_feature (656)..(656): n is a, c, g, or t
  Peptide Sequence Number=SeqID_13503
  Probeset Number=SeqID_21519
nnnnnnnnnnnnnnnnnnnnnnnnnnnnnnnnnnnnnnnnnnnnnnnnnnnnnnntctcacgcgcagctttcttcttcctctgttcttggcgcagcagacttcctcctctccttccatggcgcctccacctccctgttccctctctcccagggcgagcaggcactctccttccccatgggcacgcccccttcaggcttggcggcagggacagcgccctccgttccctctgctgtccaagcgtggatgcccatttccatggccgagctcaagctaccgggacccgacgcggcgccccgtgttgtagatcgagcttcctccctgctcctcctcctggtgagcggctgcagcagggagcctttctcccctgcgcgcagaagctccctggcccgctctcggcatgctccatgtccatggcgctgcagcagctcgggtttctcccatggatgcccctctgcagctcgccccaccttccctcgctgcgcagctcctcggcgaaacgccgctgttcctgcagccatggcgtccctttttttcttctctgcgcagcgacgccggtccaaaaaacagcagcagcgcccctcccctctccacggcgagcagcagctcgtccactcttccctcccatgggggcccagaaattccccagcagggactn

SEQ ID NO: 7117 - DNA, 580 bp, Zea mays
  Probeset Number=SeqID_21520
aatcgggagtccacgtcgatgccgggaggacttctgcttctcccgaggttcgattgttcgttgtgatctgtttcatggatcaaatcggaacaagaggctgaagatatgggagtcaaagaatcagtgaaggttgctactagtactagcaatggcttcttctccatctggtttcttatgttccttgtgctctctgttacgccactcgtgttttcgcgcacgctcccggaggatccggatccggatccgtgtgatgcaatgaaactgagagactttgagaaactcagatcggatcagatcgccgtcctaatcaacggttactctgagtcccgtattcctcttctgcaatccatcgtagccgcgtattcaggatcctcaatcgtctcatcaatcttagtcctctggggaaaccctaccacacctgctcagctacttgaccacttataccacaatctgacccgttactcgcttggcaccgcttccatctctcttatccagcaatcgtctagcagcctcaacgccaggttcctccctcgcccttccgtagacactcgtgctgttttgataggcgatgatgacgtgg

SEQ ID NO: 7118 - DNA, 651 bp, Zea mays
  misc_feature (567)..(567): n is a, c, g, or t
  misc_feature (625)..(651): n is a, c, g, or t
  Peptide Sequence Number=SeqID_13504
  Probeset Number=SeqID_21521
gcaaatcagaaggaaacgaataatcctccaaaaatattttctctcctcccaaagaaacaacagcaaaaatgtggccactctccatatcagttgtcttcctcccatgcttcgccgcttttctactcaccgctctttcttcggcttatggctatggcgactcggaggcgacatgttcaggaatagttcccttaaagtaccggaacgataagatctcgataacagactttggcggcgtcggggacggaaggacggtgaacactaaggcgtttagggcggcgatatataggattcagcatctgaggagaagaggaggcacggttctgtatatacctccgggagtgtttctcacggagagcttcagtctcactagccatatgactctcttcttggctagaggcgctgttatcaaagctgttcaggatacatggaactggccgttgattgatccgttgccattccttatggaagaaggaagggagttaccaggggctcggtatattagcttcattcatggtgatggccttcgtgatgtagtcatcactggacaaaacgggacaatagacggtncaaggacagtgatggtgcaccattggggcgcagtataaacactaagttcactagaccnnnnnnnnnnnnnnnnnnnnnnnnnnn

SEQ ID NO: 7119 - DNA, 562 bp, Zea mays
  misc_feature (47)..(47): n is a, c, g, or t
  misc_feature (115)..(115): n is a, c, g, or t
  misc_feature (222)..(222): n is a, c, g, or t
  misc_feature (248)..(248): n is a, c, g, or t
  misc_feature (275)..(275): n is a, c, g, or t
  misc_feature (278)..(278): n is a, c, g, or t
  misc_feature (295)..(295): n is a, c, g, or t
  misc_feature (310)..(310): n is a, c, g, or t
  misc_feature (350)..(350): n is a, c, g, or t
  misc_feature (362)..(362): n is a, c, g, or t
  misc_feature (377)..(377): n is a, c, g, or t
  misc_feature (407)..(407): n is a, c, g, or t
  misc_feature (417)..(417): n is a, c, g, or t
  misc_feature (424)..(425): n is a, c, g, or t
  misc_feature (453)..(454): n is a, c, g, or t
  misc_feature (456)..(456): n is a, c, g, or t
  misc_feature (467)..(467): n is a, c, g, or t
  misc_feature (469)..(469): n is a, c, g, or t
  misc_feature (491)..(491): n is a, c, g, or t
  misc_feature (503)..(503): n is a, c, g, or t
  misc_feature (510)..(510): n is a, c, g, or t
  misc_feature (528)..(528): n is a, c, g, or t
  misc_feature (532)..(532): n is a, c, g, or t
  misc_feature (535)..(535): n is a, c, g, or t
  misc_feature (538)..(538): n is a, c, g, or t
  misc_feature (540)..(540): n is a, c, g, or t
  misc_feature (543)..(543): n is a, c, g, or t
  misc_feature (546)..(546): n is a, c, g, or t
  misc_feature (549)..(550): n is a, c, g, or t
  misc_feature (554)..(554): n is a, c, g, or t
  misc_feature (562)..(562): n is a, c, g, or t
  Peptide Sequence Number=SeqID_13505
  Probeset Number=SeqID_21522
ttagtactgttatttctcatgatgagtggactccattatctgtcagnggtctccgtccgaaagcctcgttatgagcatggagcaactggggtgcaaaataagatggatatatttngggggaaaccataatggacgttaccttaggggccttccaggctttggatctgaagagatttgatctgggtccaagggttgtaaaccaaattttcaagaaaaaacccnggtggtttccacctttaaaaaccccnaaaaattgcccccccgggggggggggncantttttttgtttttcttngggggaaaaaaaaantttttttttttttgtgggggggcaaaaaaaaaaaaacccncccttggggggntttttatgggggggngattttgtttttccccccaaatttttttcnccgggggttntttttgnnaaatttttttggggaaaaccccccccgnntnctcgggggggngnacaaaaaaagagttttcttttnggaaaaaaaaanaaaaacnttttattggggggtgaanaaanccnaantntcnctnctnncctnttccaccn

SEQ ID NO: 7120 - DNA, 562 bp, Zea mays
  misc_feature (1)..(1): n is a, c, g, or t
  misc_feature (9)..(9): n is a, c, g, or t
  misc_feature (13)..(14): n is a, c, g, or t
  misc_feature (17)..(17): n is a, c, g, or t
  misc_feature (20)..(20): n is a, c, g, or t
  misc_feature (23)..(23): n is a, c, g, or t
  misc_feature (25)..(25): n is a, c, g, or t
  misc_feature (28)..(28): n is a, c, g, or t
  misc_feature (31)..(31): n is a, c, g, or t
  misc_feature (35)..(35): n is a, c, g, or t
  misc_feature (53)..(53): n is a, c, g, or t
  misc_feature (60)..(60): n is a, c, g, or t
  misc_feature (72)..(72): n is a, c, g, or t
  misc_feature (94)..(94): n is a, c, g, or t
  misc_feature (96)..(96): n is a, c, g, or t
  misc_feature (107)..(107): n is a, c, g, or t
  misc_feature (109)..(110): n is a, c, g, or t
  misc_feature (138)..(139): n is a, c, g, or t
  misc_feature (146)..(146): n is a, c, g, or t
  misc_feature (156)..(156): n is a, c, g, or t
  misc_feature (186)..(186): n is a, c, g, or t
  misc_feature (201)..(201): n is a, c, g, or t
  misc_feature (213)..(213): n is a, c, g, or t
  misc_feature (253)..(253): n is a, c, g, or t
  misc_feature (268)..(268): n is a, c, g, or t
  misc_feature (285)..(285): n is a, c, g, or t
  misc_feature (288)..(288): n is a, c, g, or t
  misc_feature (315)..(315): n is a, c, g, or t
  misc_feature (341)..(341): n is a, c, g, or t
  misc_feature (448)..(448): n is a, c, g, or t
  misc_feature (516)..(516): n is a, c, g, or t
  Peptide Sequence Number=SeqID_13506
  Probeset Number=SeqID_21523
nggtggaanaggnnagnagngananttnggntttnttcaccccccaataaaangtttttntttttttttccnaaaagaaaactctttttttgtncncccccccgagnanncggggggggttttccccaaaaaaatttnncaaaaanaacccccggngaaaaaaatttggggggaaaaacaaaatcncccccccataaaaanccccccaagggngggtttttttttttttgcccccccacaaaaaaaaaaaaantttttttttcccccnaagaaaaacaaaaaaantgncccccccccccgggggggcaatttttnggggtttttaaaggtggaaaccaccngggttttttcttgaaaatttggtttacaacccttggacccagatcaaatctcttcagatccaaagcctggaaggcccctaaggtaacgtccattatggtttcccccnaaatatatccatcttattttgcaccccagttgctccatgctcataacgaggctttcggacggagaccnctgacagataatggagtccactcatcatgagaaataacagtactaa

SEQ ID NO: 7121 - DNA, 637 bp, Zea mays
  Peptide Sequence Number=SeqID_13507
  Probeset Number=SeqID_21524
agacattttgaaaaacccaattcataggcacccttttcagagagcctctttgtcctcttcttcgtctatacgtaaattcatcagctaaatatatttgaaaatggcggatggtgaagatattcagcccctcgtttgcgataacgggaccggaatggtcaaggccggttttgctggtgatgatgctccaagagctgtattcccaagtatcgttggccgtccacgtcacacgggagtgatgggtggaatgggacaaagggatgcttacgttggagacgaggctcagtccaaacgtggtatcttacctctcaaatatccaatcgagcatggtattgtcaaccactgggatgacatggagaagatttgccatcacactttctacaatgagctccgtgtcgctcctgaagaaacacccgggtctgcttaccgaagccccgcttaatccaaaggtaaatcgtgagaagatcactcagatcatgtttgagaacgtcaacgctcctgctatgtattgtgcgattctcagccgttctatccctctatgccaggggccgtactactggtattgttttggactccgggagaggggtgtgagcacaccggttcccatctacgagggttatgctctgccacatgcatcctg

SEQ ID NO: 7122 - DNA, 688 bp, Zea mays
  misc_feature (544)..(544): n is a, c, g, or t
  misc_feature (652)..(688): n is a, c, g, or t
  Peptide Sequence Number=SeqID_13508
  Probeset Number=SeqID_21525
ctctttcgtgttttagcttgcagagatcgtcacttcttgaaggcggcttctcctcacgcatctcatctccgctaatcacaatgtctctggtcgcgaatgaggagtttcagcacattctccgtgtgcttaacacaaatgtcgatgggaagcagaagatcatgttcgcccttacctcaatcaagggtattgggaggcgtttggcaaacatcgtctgcaagaaagcagatgtcgacatgaacaagagggctggtgagctatctgcagctgagatcgacaacctgatgacgattgttgccaacccgaagcagtacaagatcccagactggttcttgaacaggcagaaggactacaaggacggcaagtactcccaagttgtctccaatgcccttgacatgaagctcagggacgatctcgagcgtctcaagaagatcaggaaccaccgtgggctgagacactactggggtctccgtgtccgcggacagcacaccaagacaaccggtcgcagaggaaagaacgttggtgtctcaaagaaagcgtaagcaangccacatgggtttgctagttactgctgcttttattggatatgcttcatatgacccgccttttgattttatgtttctgctccgaactaagttatggggtgcccttggannnnnnnnnnnnnnnnnnnnnnnnnnnnnnnnnnnnn

SEQ ID NO: 7123 - DNA, 629 bp, Zea mays
  misc_feature (1)..(17): n is a, c, g, or t
  misc_feature (629)..(629): n is a, c, g, or t
  Peptide Sequence Number=SeqID_13509
  Probeset Number=SeqID_21526
nnnnnnnnnnnnnnnnnayaaagcgccctatcgggcgctaaaccgtttgcgcacgcagggaacaaattaaaaccaattaaaaccatgtgctatagcttataggaaatacactttaaatcaatattctctaataaactgcataggtagagtatatggtttcgaggctgtcctccatatcaacataaaagctccacagttccaaayatttgtgcactttcatttgaacaggctcatcccctcagcagcagctcaatayagggcagggctctgctgttgcttgcctcatcagttcaatagccttgtcaaaattgttgmggcacagctccatctrtgtccactcacaccagatactggctaaatggtcaatcgtattataattaacttgagtagcgcatttgaagatatcatcaacactatctagactattgmgtttctcatacatctttgcaaatgccacccatagagtatgggatttcccaactgcattcattggatctacaattttcacagcctcaacatatgtcgctatttgccttgcaggatccttttcaaagagtttcaccctcctgcaatccactattgccatcaggtgcatgaagttgcttcctctatctagcttcagcttcctn

SEQ ID NO: 7124 - DNA, 573 bp, Zea mays
  Peptide Sequence Number=SeqID_13510
  Probeset Number=SeqID_21527
gctatcctcgctgctgttgagtccattgcacaagccaacaatgtcgtcagaccagactggaacggtcttaactatctcctcctgtacgctgctcaagcagctgcccttgatcttggtctaattcaacagtctgctaaagcccttgagtctgcgaaattcgtctacttgatgggagcagacgatgtagatgtctgacaagattcctaaagatgcctttgtggtttaccaaggtcaccatggagacaaagcggtttaccgtgcaaacgtaatcctccctgcttcggccttcaccgagaaagagggaacctatgagaacacagaaggattcacccaacagactgttcccgctgtcccgacggttggtgatgcaagagatgactggcagattgtgagagctttgtccgaggtatcgggtgtgaatcttccatacacactcaatcgaaggtgttaggtctaggatcaagagcgtcgctcccaatctagtccacacagatgaacgagagccagctgcttttgggccatcattgaagcctgagtgcaagggagacatgagcacaacgtcggtcaaaacag

SEQ ID NO: 7125 - DNA, 575 bp, Zea mays
  Peptide Sequence Number=SeqID_13511
  Probeset Number=SeqID_21528
atcaccagaagccacaatcgtcgatctcagcacaaagaagacgaatacagagagagagatggcgaccactacagcagaggccacaaagacatctagtactactgtagaagacgagcaatcacagaatctccgacgtcaagaactcggccacaagagtgctcttacagagcgacgatctctaccaggatattctggagacaagtgtgtatccgagagaaccagaatcaatgaaggaactcagggaagtgacagcaagacacccttggaacataatgaccacgtcagcagacgaaggacagtttctgaacatgctcatcaagctcgttaacgcctacaacacgatgggagatcggcgtttacgctggctactctctcctcgccaccgctcttgctctccccgaacacggcaagattctgggctatgcatggtaacagagagaattaccaattgggtttgccgatcatgcgagaaagccggcgttgctcacaagatcgatttcaggggagggcccctgctctacctggttccttgagcaacttggggccggcgcgaacaaccacccttcggaacatat

SEQ ID NO: 7126 - DNA, 575 bp, Zea mays
  Peptide Sequence Number=SeqID_13512
  Probeset Number=SeqID_21529
atatgttccgaagggtggttgttcgcgccggccccaagttgctcaaggaaccaggtagagcaggggccctcccctgaaatcgatcttgtgagcaacgccggctttctcgcatgatcggcaaacccaattggtaattctctctgttaccatgcatagcccagaatcttgccgtgttcggggagagcaagagcggtggcgaggagagagtagccagcgtaaacgccgatctcccatcgtgttgtaggcgttaacgagcttgatgagcatgttcagaaactgtccttcgtctgctgacgtggtcattatgttccaagggtgtcttgctgtcacttccctgagttccttcattgattctggttctctcggatacacacttgtctccagaatatcctggtagagatcgtcgctctgtaagagcactcttgtggccgagttcttgacgtcggagattctgtgattgctcgtcttctacagtagtactagatgtctttgtggcctctgctgtagtggtcgccatctctctctctgtattcgtcttctttgtgctgagatcgacgattgtggcttctggtgat

SEQ ID NO: 7127 - DNA, 636 bp, Zea mays
  misc_feature (617)..(636): n is a, c, g, or t
  Peptide Sequence Number=SeqID_13513
  Probeset Number=SeqID_21530
ctgtggtatccgtatctcccccttttactcatctaggaaatggctctccggcgagtatccgccaccgtaatcctcttcctctacttactattttccgctcactctctcgattccaaacaccacaagatcgaaggaccgatcaagaccatagtcgttgtagtcatggagaatcgctccttcgaccacatcctcggctggctcaaaccaacccgacccgaaatcgacggattaaccgggaaagagtcaaaccccctcaacgcctccgatccaaactccaaaaagatctacgtctcgaacgacgccgttttcgtcgacatggatcctggccattccttccaagccatccgagagcagatattcgggtccaacgacacctccggcgacccgaaaatgaacggattcgcgcaggaggcggagagcatggagccagggatggccaagaacgtgatgtccgggttcaaacccgaggtcctgcccgtttacaccgagctagcaaacgagttcgggatattcgaccggtggttcgcgtcggttccgacttccactcagccaaaccgggttctacgtccactcggccacctcccacgggggcccccgcaacggggagaaggatctcnnnnnnnnnnnnnnnnnnnn

SEQ ID NO: 7128 - DNA, 626 bp, Zea mays
  misc_feature (601)..(626): n is a, c, g, or t
  Peptide Sequence Number=SeqID_13514
  Probeset Number=SeqID_21531
acgcgctttactgttctttcttcttacttttcgcaagattgttctgttctttacacgattccaagatgagtgaagaggtcaaagagaatcagtctgggaagcttcagaagccaactccacgtttaaacgagaggatcctctcatctttatctaagagatcggttgctgctcatccatggcatgatcttgaaatcggacctggagctccagtgattttcaatgtggttgttgagatctcaaagggtagcaaggtcaaatatgaacttgacaaaaagacaggactaatcaaggttgatcggatcctttattcatcggttgtgtatccgcataactacggttttattccccgcacattatgcgaagacaatgatccgttggatgtgctagtcatcatgcaggagcctgtacttccaggttgttttctgcgcgcccgagctattggattaatgcccatgattgatcagggcgaaaaagatgacaagatcatttgcggtattgtgttgatgatcctgagtataagcattacactgacatcaaagaacttcctcctcatcgtcttactgaaatccggcgattctttgaagattacaagaagaatgannnnnnnnnnnnnnnnnnnnnnnnnn

SEQ ID NO: 7129 - DNA, 560 bp, Zea mays
  Peptide Sequence Number=SeqID_13515
  Probeset Number=SeqID_21532
atcttttgaatcttcttatgcttctccaagagccatggctttgtgctcgatcttctgccctcgcatccctgttcgattcagacccaaacccatttctcctctcctctcataacctttgtttcccctctcttatagggtttactcttccctgcaacctactccctctaccaaagatgaacttggaagtgtaagcattgggtttctgggtatgggaatcatgggttctcctatggcacaaaacctcctcaaagctggccgtgatgtgactgcgtggaaccgaactaagagcaaatgtgatcctctcgtcggattaggagcaaaatacaagtcttctcctgaagaagtgactgcaacttgtgatctcacatttgcaatgctagcagatcctgagagtgcaatccatgttgcctgtggaaagaatggagccgtatctggaattagctcacgaaaagggtatgttgatgtctcaaccgttgatgctgcctcatccatctgaatcagcaagcagataaaggatactggagctgtgtttttagaggcaccatttctgagtacagaaa

SEQ ID NO: 7130 - DNA, 548 bp, Zea mays
  Peptide Sequence Number=SeqID_13516
  Probeset Number=SeqID_21533
acccaaaacaaaagattcaaaagtcgccgagagcacaaaccctcctctaatggcgtctctctccatggcttccgtcaaccttagcttctctcccttacgctcgcctccaaaggtctccactcacgcttccgttcaattcgctcggttcagctcgtcgagtcttgcctcagctcactgcatttctgggcttcgcgcggttcttcctcagaagatatccaccgtcgtctctcagagttctcagaggcttcagactcttaccgttttcgctcataagggctacaagatgaagacccacaaggcctcggcgaagaggttcagggtgacgggtagagggaagatagtgaggaggagatccgggaagcagcatttgttagctaagaagaacaacaagaggaagctgcgtctttccaaaatgcatgaagtgagccggagtgactatgacaatgtgataggcgctcttccctacctgaaagtcaaccgaaaggcgacttaagcagagccggcttgatcattttcttacctgcatttctcattttgtaatctaagtg

SEQ ID NO: 7131 - DNA, 639 bp, Zea mays
  misc_feature (622)..(639): n is a, c, g, or t
  Peptide Sequence Number=SeqID_13517
  Probeset Number=SeqID_21534
cttatgtttatgtcttcttcttctctccatctccttccaaagtctctctctctctctatcgcctttctctctctctctctctccacttccgaccacatcgggtctcagaaacccattgatgcggacctcgatctttctccactagctacagatctacacccttacacaaaccgtatatacatacacactttgtatctctctgtaaaatctatggccgccgtctcctctaaccctcgcaccgtcgaagagatcttcaaggattacaccgctcgtcgctccgccctcctccgtgctctaactaaagatgttgatgatttctactctcaatgcgatccggagaaggagaatttgtgtttgtatggacatccgaatgagtcgtgggaagtgaatctaccggcggaggaagttcctcctgagcttccggagcctgcgcttggtattaatttcgctagagatggtatgcagaggaaggattggctctcgcttgttgctgttcatagtgattgttgggtgctctctgtttctttctactttggtgctcgccttaaccgcaacgagaggaagcggttgttcagtctgatcaaggatcgcccaactctccccgaggccgggactggaagannnnnnnnnnnnnnnnnn

SEQ ID NO: 7132 - DNA, 699 bp, Zea mays
  misc_feature (666)..(699): n is a, c, g, or t
  Peptide Sequence Number=SeqID_13518
  Probeset Number=SeqID_21535
atttctcgtcgcagtaaagctttagccgcagcttcaggttcttccctcttcttcgtccttcaccttctctcatttgattcctcctctttgtctctaaccttatcttataggaaggggagaatgtctcacaggaagtttgagcacccaaggcacgggtcacttggtttccttccaaggaagagagctaaccgtcacagaggaaaagtgaaggcattccctaaggatgaccaaaccaagccttgcaagttcacagccttcatgggatacaaggctggtatgacccacattgttagagatgtcgagaagcccggatccaagcttcacaagaaggagacctgtgaggctgtcaccatcatcgagacacccgccatggtggtcgttggtgttgttgcctacgtcaagactccccgtgggcctgaggtctctcaacaccgtctgggcacagcacttgagcgaggaggtcaggagaaggttctacaagaactgggccaagtccaagaagaaggcgcttcaccggctacgccaagcagtacgaaaccgaggaaggcaagaagagtatccagtctcagctcgagaaaatgaagaaatacggaaccgtcatacgtgtcttggccccccctcagatcaggaaaatgaaggggttgaacaaaaaaaagggtcactggnnnnnnnnnnnnnnnnnnnnnnnnnnnnnnnnnn

SEQ ID NO: 7133 - DNA, 2790 bp, Zea mays
  misc_feature (1)..(125): n is a, c, g, or t
  misc_feature (127)..(159): n is a, c, g, or t
  misc_feature (161)..(197): n is a, c, g, or t
  misc_feature (199)..(229): n is a, c, g, or t
  misc_feature (232)..(249): n is a, c, g, or t
  misc_feature (252)..(321): n is a, c, g, or t
  misc_feature (324)..(331): n is a, c, g, or t
  misc_feature (333)..(377): n is a, c, g, or t
  misc_feature (383)..(413): n is a, c, g, or t
  misc_feature (415)..(418): n is a, c, g, or t
  misc_feature (420)..(423): n is a, c, g, or t
  misc_feature (425)..(427): n is a, c, g, or t
  misc_feature (430)..(436): n is a, c, g, or t
  misc_feature (438)..(438): n is a, c, g, or t
  misc_feature (442)..(451): n is a, c, g, or t
  misc_feature (453)..(457): n is a, c, g, or t
  misc_feature (460)..(487): n is a, c, g, or t
  misc_feature (489)..(491): n is a, c, g, or t
  misc_feature (493)..(495): n is a, c, g, or t
  misc_feature (497)..(497): n is a, c, g, or t
  misc_feature (500)..(500): n is a, c, g, or t
  misc_feature (503)..(513): n is a, c, g, or t
  misc_feature (515)..(543): n is a, c, g, or t
  misc_feature (545)..(552): n is a, c, g, or t
  misc_feature (555)..(557): n is a, c, g, or t
  misc_feature (560)..(565): n is a, c, g, or t
  misc_feature (568)..(570): n is a, c, g, or t
  misc_feature (575)..(582): n is a, c, g, or t
  misc_feature (588)..(588): n is a, c, g, or t
  misc_feature (590)..(590): n is a, c, g, or t
  misc_feature (597)..(597): n is a, c, g, or t
  misc_feature (603)..(603): n is a, c, g, or t
  misc_feature (605)..(607): n is a, c, g, or t
  misc_feature (611)..(612): n is a, c, g, or t
  misc_feature (615)..(619): n is a, c, g, or t
  misc_feature (621)..(622): n is a, c, g, or t
  misc_feature (625)..(625): n is a, c, g, or t
  misc_feature (628)..(629): n is a, c, g, or t
  misc_feature (632)..(634): n is a, c, g, or t
  misc_feature (639)..(641): n is a, c, g, or t
  misc_feature (646)..(646): n is a, c, g, or t
  misc_feature (650)..(656): n is a, c, g, or t
  misc_feature (660)..(666): n is a, c, g, or t
  misc_feature (669)..(670): n is a, c, g, or t
  misc_feature (673)..(676): n is a, c, g, or t
  misc_feature (680)..(685): n is a, c, g, or t
  misc_feature (688)..(696): n is a, c, g, or t
  misc_feature (702)..(702): n is a, c, g, or t
  misc_feature (704)..(705): n is a, c, g, or t
  misc_feature (709)..(715): n is a, c, g, or t
  misc_feature (720)..(728): n is a, c, g, or t
  misc_feature (730)..(734): n is a, c, g, or t
  misc_feature (737)..(744): n is a, c, g, or t
  misc_feature (746)..(751): n is a, c, g, or t
  misc_feature (755)..(757): n is a, c, g, or t
  misc_feature (760)..(779): n is a, c, g, or t
  misc_feature (781)..(783): n is a, c, g, or t
  misc_feature (786)..(790): n is a, c, g, or t
  misc_feature (795)..(808): n is a, c, g, or t
  misc_feature (811)..(816): n is a, c, g, or t
  misc_feature (818)..(818): n is a, c, g, or t
  misc_feature (820)..(826): n is a, c, g, or t
  misc_feature (831)..(832): n is a, c, g, or t
  misc_feature (836)..(845): n is a, c, g, or t
  misc_feature (857)..(859): n is a, c, g, or t
  misc_feature (866)..(867): n is a, c, g, or t
  misc_feature (2756)..(2756): n is a, c, g, or t
  misc_feature (2764)..(2764): n is a, c, g, or t
  Peptide Sequence Number=SeqID_13519
  Probeset Number=SeqID_21536
nnnnnnnnnnnnnnnnnnnnnnnnnnnnnnnnnnnnnnnnnnnnnnnnnnnnnnnnnnnnnnnnnnnnnnnnnnnnnnnnnnnnnnnnnnnnnnnnnnnnnnnnnnnnnnnnnnnnnnnnnnnnntnnnnnnnnnnnnnnnnnnnnnnnnnnnnnnnnngnnnnnnnnnnnnnnnnnnnnnnnnnnnnnnnnnnnnngnnnnnnnnnnnnnnnnnnnnnnnnnnnnnnnggnnnnnnnnnnnnnnnnnnggnnnnnnnnnnnnnnnnnnnnnnnnnnnnnnnnnnnnnnnnnnnnnnnnnnnnnnnnnnnnnnnnnnnnnnggnnnnnnnngnnnnnnnnnnnnnnnnnnnnnnnnnnnnnnnnnnnnnnnnnnnnngggggnnnnnnnnnnnnnnnnnnnnnnnnnnnnnnncnnnntnnnngnnngcnnnnnnngngggnnnnnnnnnncnnnnnaannnnnnnnnnnnnnnnnnnnnnnnnnnngnnngnnncnggnggnnnnnnnnnnntnnnnnnnnnnnnnnnnnnnnnnnnnnnnngnnnnnnnnccnnnggnnnnnnggnnnaatgnnnnnnnnggggcnancttttgngtttgnannntttnncannnnngnnggngcnnggnnnccccnnnggggnaaannnnnnngaannnnnnncannccnnnntaannnnnnaannnnnnnnnatttgntnnttcnnnnnnncagcnnnnnnnnnannnnnaannnnnnnnannnnnnaatnnngannnnnnnnnnnnnnnnnnnnannnaannnnnggccnnnnnnnnnnnnnnttnnnnnntngnnnnnnngggcnncccnnnnnnnnnngagagagagagnnngctctcnngtcccccccccccccccctgttggctatcagatattcagatagtgtatgtgacacctgttttgcttccggtagaagctacggcagacccacttttacagagttttgataaacttgagaggaaaagggtcatagtttattcaacaaaggtacctggtccgatttctctgttccattgatgcagaatgatgggtgcatacgagacactgatgatcctaaaaaaggggacagcctgtgtatgtattctgaaggcagggatgaaccacatggtgaggagatgttagagcagatcactgatagtagcctttaccaacacatgggatccacatgtcagaatggaggatgtgtgagaaaaaaaggtgacagttgctgtggtcccctttatttgaggggagatgggaggttttttggtgacaaaaaagaaaaaaagagcaatctgggaactgctggagcgtctccaccaatatataacagttttatgagcatgagggatgatattgccgagctgctggtgatgctttaatgatcgatgtcaaggagttgtagtgacgcaacaggagatgatagagtgctgtcggatggatggagtgaaactgcctgctgccgaggtggccgacggagagcatgctgagttgaaaaggggtgttggccacgctccacgataaaaaaaatcattcccgtatgcccttgactaggaaaacatatgtcggcccatcatctcagaaaattctcatcctggaagtgatgtcctaaggattgagattcagattctcatcctgtcggagcatcgccaaatgtagcggtggcctgggcatcgcaaattctgtaggtactactagaatggtgaatggaggcgccgcaccacgcgggttatggcgccgaggtaacacagaacggcggcgacgcggcgggaagaggataacggcggtgtggcgtgagaagatctatggtgccgagctaggggtcacgtcggcttgcacgtcaaccctagccgccgtcgccacgtaagagctcgacgtcataggccatgacgccgagctaggggtctaaaaactgaagttatccagggatcttagtgtaagttttgttcaaaaaaaaaggttaaaaaacaaaaaaaaatcggcacaggtgggctctgccattggtggtcgtattagatcagagccggactttgtcaggacgtgagcagaaaatgcttaaattgacattattgcccacagctcagctcagctcagacaaccatcggctccgtccgtcctgtactagcaagaaacaattcaaaccgaccgtttctatccattcctgactccttttggccttgttactttgacgataaagaaaaaaaaacaaacaaaaaaaaaaagtaaaaaataaagccaaaaggaaaaaagcaaaaaaatggatgttctgtgtgtgtccgcgaagatgccccgcggaatcccctttcttatagaggttacagctgcggttggtgttcctggtgtgaaatgtgcagtcaaaactccaaatagagagatggttcctctcttctttgaagctatggaggctctcaccaagtgacgccaaagttaatggatatgtggttctacaaaaatttatcagtcgatgagctgctataggtgtttggatgcggcattttttttttcacggaagcttgtgtgaattgtagtttttgtattagattacagtatttaaactgatagtttcctggttccaaagtttttcgccagaaatactggagatgttcttgcctcacataatctgtacatcttaccctgttggacctggaaattttcatcttgttatgcataacatatgaaatatgactagttttctacaagaaaaaaataaaaaaaaaaaaaaaaaaataacaaaaaaaaccggaaataancaaaatanttcagctagaaaaaaaaaaaaaaggc

SEQ ID NO: 7134 - DNA, 721 bp, Zea mays
  misc_feature (601)..(721): n is a, c, g, or t
  Peptide Sequence Number=SeqID_13520
  Probeset Number=SeqID_21537
taaatcaacctccatgtccgatatatatctagcagagaagcaactcaaagttttaattttctagtagactagttttttttttttctcgtggatcattatctaagaagagaggaaatgttgggaatttttagcggagctatagtatcattgccggaagagctggtggccgccggcagcagaactccgtcgccgaagacaaccggagcggctctagtcaacaagtttgtcgagcaaaacccatccgctgtgacccgtacaagtcggagactatgtgcagcttgcctacacccaccaccaagagagtcctctccggccaaggtcatttggggctaaggatgagatattctgcttgttcccaggctcacttgaccacctagggagcttggagcagcaatacgggcctggctaagaatgcaaacggaggtcctcttggtcattgaggcctaccaagactcctccgggacggagctccataccctgccaaccatggtaggggctcccctaaggggcgactttccccctttgggggccctccaaaaaccaccttcccccccggtttggaacttcgggccaaaaaagaaaaggtcccttgggtttgggnnnnnnnnnnnnnnnnnnnnnnnnnnnnnnnnnnnnnnnnnnnnnnnnnnnnnnnnnnnnnnnnnnnnnnnnnnnnnnnnnnnnnnnnnnnnnnnnnnnnnnnnnnnnnnnnnnnnnnnnn

SEQ ID NO: 7135 - DNA, 583 bp, Zea mays
  misc_feature (541)..(541): n is a, c, g, or t
  Peptide Sequence Number=SeqID_13521
  Probeset Number=SeqID_21538
atccgatccctcgcttcgcttgctcatcgtttgccgtttcagaatcgaggggaatgaaccaaatcgagaacatggcgacgcagaaagctattgtgctatggaacatcagcagctgcccgattccagatggtcatgatcctcttatggtggttcagagaatacaagcggcggtggagaagtccggctacgtccgccgcaacggtgagatctcgatcactgccattggcgacaaactaacagaggtccctggcgaagacgtcatgaggaggctctcttccatcggaatcgctcttaaaaacggggacgaatatcaaatggatttgtataattgggccgacgagaacgctcctccgggtactatgatgctcatagacggtcatgagcaaactgggatggttagcagaaacactttccgagtttgaagatatggggattcagaattcttcttgcatatcctcaccgtgacccagcagccacaccctttccgtgtaaacaggtggggattggggctgccttgttctcagatgaacaggagacgacnacaccaaggccttgttggtaattccaggtaaaaacttccccg

SEQ ID NO: 7136 - DNA, 583 bp, Zea mays
  misc_feature (43)..(43): n is a, c, g, or t
  Peptide Sequence Number=SeqID_13522
  Probeset Number=SeqID_21539
cggggaagtttttacctggaattaccaacaaggccttggtgtngtcgtctcctgttcatctgagaacaaggcagccccaatccccacctgtttacacggaaagggtgtggctgctgggtcacggtgaggatatgcaagaagaattctgaatccccatatcttcaaactcggaaagtgtttctgctaaccatcccagtttgctcatgaccgtctatgagcatcatagtacccggaggagcgttctcgtcggcccaattatacaaatccatttgatattcgtccccgtttttaagagcgattccgatggaagagagcctcctcatgacgtcttcgccagggacctctgttagtttgtcgccaatggcagtgatcgagatctcaccgttgcggcggacgtagccggacttctccaccgccgcttgtattctctgaaccaccataagaggatcatgaccatctggaatcgggcagctgctgatgttccatagcacaatagctttctgcgtcgccatgttctcgatttggttcattcccctcgattctgaaacggcaaacgatgagcaagcgaagcgagggatcggat

SEQ ID NO: 7137 - DNA, 626 bp, Zea mays
  misc_feature (626)..(626): n is a, c, g, or t
  Peptide Sequence Number=SeqID_13523
  Probeset Number=SeqID_21540
agtcgctctcctctgccttatctcccacgcgtaggcttcttctccagccgcctgctcccttgcgccgctgctctcgtcggcgttcctctcctctcccttttccatggccagcgccccctttagctcctctgctcgacctctgcagctccctgctccagcttcagccatggggctcgctgtccgctctctgtccggtctccagcccagcgtttctggcgccgcaagcttgctgcgccctgggtcgcctcccagcagtccatctcactcggcgcccatctccctaccatggcgtgccctccctgcgcagctccctcgctgtccgctgccggcgcccagtccatggccgtgcccagctccctcctccaagctcccacggcgcccctgctttgtgctggccacgtcttctcgctcggtctccaacttcggcgcccggctgagttccatggcgtgcgcccctgttcttcgttcccacgcgcgcatctctcttggccaccgagctccctttgcttgggggtggctgggcttcctccgagctcgcccccgacctctgctccttcttcggcgtagagtttccttggcgcgtccctactcctcgctcctctgcaggcgttctcctgtggggggcn

SEQ ID NO: 7138 - DNA, 626 bp, Zea mays
  misc_feature (1)..(1): n is a, c, g, or t
  Probeset Number=SeqID_21541
ngccccccacaggagaacgcctgcagaggagcgaggagtagggacgcgccaaggaaactctacgccgaagaaggagcagaggtcgggggcgagctcggaggaagcccagccacccccaagcaaagggagctcggtggccaagagagatgcgcgcgtgggaacgaagaacaggggcgcacgccatggaactcagccgggcgccgaagttggagaccgagcgagaagacgtggccagcacaaagcaggggcgccgtgggagcttggaggagggagctgggcacggccatggactgggcgccggcagcggacagcgagggagctgcgcagggagggcacgccatggtagggagatgggcgccgagtgagatggactgctgggaggcgacccagggcgcagcaagcttgcggcgccagaaacgctgggctggagaccggacagagagcggacagcgagccccatggctgaagctggagcagggagctgcagaggtcgagcagaggagctaaagggggcgctggccatggaaaagggagaggagaggaacgccgacgagagcagcggcgcaagggagcaggcggctggagaagaagcctacgcgtgggagataaggcagaggagagcgact

SEQ ID NO: 7139 - DNA, 620 bp, Zea mays
  misc_feature (620)..(620): n is a, c, g, or t
  Peptide Sequence Number=SeqID_13524
  Probeset Number=SeqID_21542
aggcgctctcctctgccttatctcccacgcgtaggcttcttctccagccgcctgctcccttgcgccgctgctctcgtcggcgttcctctcctctcccttttccatggccagcgccccctttagctcctctgctcgacctctgcagctccctgctccagcttcagccatggggctcgctggccgctctctgtccggtctccagcccagcgtttctggcgccgcaagcttgctgcgccctgggtcgcctcccagcaggccatctcactcggcgcccgtctccctaccatggcgtgccctccctgcgcagctccctcgctgtccgctgcccgcgcccagtccattggccggggccaagctcccctcctccaagctcccacggcgccccttgctttgggctggccacgtcttctcgctcgggctccaacttccggcgcccggctgaggtccatgggggggcgccccctggttccttcgggccccacgcggcgcatctcctcttgggccaccggggctccccttttggctgcggggggggtggccttcccccccgagcctcgcccccccgaccctgttgcttcctttccctcggccgggaagaaggtttccctttggcccggccn

SEQ ID NO: 7140 - DNA, 620 bp, Zea mays
  misc_feature (1)..(1): n is a, c, g, or t
  Probeset Number=SeqID_21543
nggccgggccaaagggaaaccttcttcccggccgagggaaaggaagcaacagggtcgggggggcgaggctcgggggggaaggccaccccccccgcagccaaaaggggagccccggtggcccaagaggagatgcgccgcgtggggcccgaaggaaccagggggcgcccccccatggacctcagccgggcgccggaagttggagcccgagcgagaagacgtggccagcccaaagcaaggggcgccgtgggagcttggaggaggggagcttggccccggccaatggactgggcgcgggcagcggacagcgagggagctgcgcagggagggcacgccatggtagggagacgggcgccgagtgagatggcctgctgggaggcgacccagggcgcagcaagcttgcggcgccagaaacgctgggctggagaccggacagagagcggccagcgagccccatggctgaagctggagcagggagctgcagaggtcgagcagaggagctaaagggggcgctggccatggaaaagggagaggagaggaacgccgacgagagcagcggcgcaagggagcaggcggctggagaagaagcctacgcgtgggagataaggcagaggagagcgcct

SEQ ID NO: 7141 - DNA, 620 bp, Zea mays
  misc_feature (601)..(620): n is a, c, g, or t
  Peptide Sequence Number=SeqID_13525
  Probeset Number=SeqID_21544
atcccaaaacctaaatcccctcttcgtttccgagaaaaccaaagaaaaagagagagagactcacgatggcaccaaaggcaggaaagaaaccagcagagaagaaacccgccgccgcagagaagccagtggaggaagagaaggtagcggagaaagcaccagctgagaagaagcccaaggccggaaagaagctacctaaggaagccatcggcgcgaccgacaagaagaagaagcgcagcaagaagaacatcgagacgtacaagatatacatcttcaaggttcttaagcaagtccacccagacatcggaatctcgagtaaggccatggggatcatgaacagcttcatcaacgacatcttcgagaagcttgctcaggaagcgtcgaaactcgcaaggtacaacaagaagccgaccattacttctcgcgagatccagacagctgttagacttgttcttcctggtgagcttgctaagcacgccgtgtctgaaggaaccaaggctgtgactaagtttactagctcttgaatgaaatcacttgttaggattctagatctgagcgcttttgggtttgtcttttggtttggattatgctcatcttagctttnnnnnnnnnnnnnnnnnnnn

SEQ ID NO: 7142 - DNA, 577 bp, Zea mays
  misc_feature (413)..(413): n is a, c, g, or t
  Peptide Sequence Number=SeqID_13526
  Probeset Number=SeqID_21545
aaaaactctcttcttctcgcttcagccatggcaaccctatctctctcatcctctctcaaaccttccctcgtttcgtcaagactcagctcatcttcctccgcctcttactcttctttcccgaaacccagcaacctctccctcaaacccgccaagctcatttcacctcccttgagaacttccccgtcgccactgagattcgcgaacgcttcaatcgagatgtcgcagacacaggagtcagctattcgcggcgccgaatccgacgtcatgggtcttctccttagggaacgaatcgtctttctcggtagcagtatcgacgatttcgtcgccgacgccataatgagcccagttgctgctcctagatgctaaagatcctaagaaagacatcaaactcttcatcaattcctcccgtggtntccctcagggccacgatcgctaatatacgaggggggtcaactggggagaggctgacgtttccacaattgctctcggcatggctggatcaacagcttccatcattctcgggggcgggaaactaagggcaagcggcttttgctatcccccaacaccgaggaataat

SEQ ID NO: 7143 - DNA, 577 bp, Zea mays
  misc_feature (165)..(165): n is a, c, g, or t
  Peptide Sequence Number=SeqID_13527
  Probeset Number=SeqID_21546
attattcctcggtgttgggggatagcaaaagccgcttgcccttagtttcccgcccccgagaatgatggaagctgttgatccagccatgccgagagcaattgtggaaacgtcagcctctccccagttgacccccctcgtatattagcgatcgtggccctgaggganaccacgggaggaattgatgaagagtttgatgtctttcttaggatctttagcatctaggagcagcaactgggctcattatggcgtcggcgacgaaatcgtcgatactgctaccgagaaagacgattcgttccctaaggagaagacccatgacgtcggattcggcgccgcgaatagctgactcctgtgtctgcgacatctcgattgaagcgttcgcgaatctcagtggcgacggggaagttctcaagggaggtgaaatgagcttggcgggtttgagggagaggttgctgggtttcgggaaagaagagtaagaggcggaggaagatgagctgagtcttgacgaaacgagggaaggtttgagagaggatgagagagatagggttgccatggctgaagcgagaagaagagagttttt

SEQ ID NO: 7144 - DNA, 633 bp, Zea mays
  misc_feature (633)..(633): n is a, c, g, or t
  Peptide Sequence Number=SeqID_13528
  Probeset Number=SeqID_21547
attgagtctaagacgtcgtctgcgtttggtaccaaaatatttgtgtgttaattcgctcccttcaaaactcaaaatgaagttccagtacaaggaagagcacgcgtttgagaagaggaagagcgagggcgagaagatcaggaggaaataccccgacagagtgcctgtcattgtagagaaggcacctaaagcaaggattggggatcttgacaagaagaaatatttagtgccgtctgacttgactgttggtcagttctacttcttgatccgcaagcgtatccatcttcgacctgaggatgcccttttcttcctcgtaaacagtgtagttccacccagcagtgccaccatgggttcactctatcaggagcaccatgaagaggactttttcttgtacattgcttacagtgatgagaatgtttatggaaaattataacttaaacacctaaactacagccaggaatttcgaagcagaatcaacaaaatgaaaaaatcaacaaaaagcttaaaacctacttagaaaccttacaaaaaaaaattaaaaaccctctgaggcatctgctttttagaatggatcttattttaattgggaggagggtttatcttcactctttggccttgggcccgtggggtggtttn

SEQ ID NO: 7145 - DNA, 640 bp, Zea mays
  misc_feature (617)..(640): n is a, c, g, or t
  Peptide Sequence Number=SeqID_13529
  Probeset Number=SeqID_21548
aaaaaatgaatttttattctctctccttatcctaatcctctcgcttctctctacaacctcaagaactccaccgcgtttccaccggcgttggcggctcgccgctggtgccggtgcctccttctcccctctcgttttccctttgcttcgttacttagcctctccccctagccgatatgctgaagcactgatgtcgttggttgatgattgattcggggtccgaccatggcggttcttccagatctgtcgtcaccggtggccttggttggacagcgaggttcgtggaggtgcggctagttgcggagtcggattttaaggtggctagggttttggatctgccgattttcagatctctttggtgtgattctcccttagccagttctggaggcgcgtgagtcacggagatggctcaatcggttcagatctgtcagcggtctgtgttgatgtgggggtggctctctgccttggtgtctcggcgacagcgacttgccattcatacccaggtagggcttcgtgggctttgctcaccaaggtggtggcgcgtgttgctcaaaggatagtgtctggtactcaggcgtcgggtgtctgggcaagcttcccctgtcttggctccctcgggnnnnnnnnnnnnnnnnnnnnnnnn

SEQ ID NO: 7146 - DNA, 640 bp, Zea mays
  misc_feature (1)..(24): n is a, c, g, or t
  Peptide Sequence Number=SeqID_13543
  Probeset Number=SeqID_21549
nnnnnnnnnnnnnnnnnnnnnnnncccgagggagccaagacaggggaagcttgcccagacacccgacgcctgagtaccagacactatcctttgagcaacacgcgccaccaccttggtgagcaaagcccacgaagccctacctgggtatgaatggcaagtcgctgtcgccgagacaccaaggcagagagccacccccacatcaacacagaccgctgacagatctgaaccgattgagccatctccgtgactcacgcgcctccagaactggctaagggagaatcacaccaaagagatctgaaaatcggcagatccaaaaccctagccaccttaaaatccgactccgcaactagccgcacctccacgaacctcgctgtccaaccaaggccaccggtgacgacagatctggaagaaccgccatggtcggaccccgaatcaatcatcaaccaacgacatcagtgcttcagcatatcggctagggggagaggctaagtaacgaagcaaagggaaaacgagaggggagaaggaggcaccggcaccagcggcgagccgccaacgccggtggaaacgcggtggagttcttgaggttgtagagagaagcgagaggattaggataaggagagagaataaaaattcatttttt

SEQ ID NO: 7147 - DNA, 568 bp, Zea mays
  misc_feature (1)..(52): n is a, c, g, or t
  misc_feature (540)..(541): n is a, c, g, or t
  Probeset Number=SeqID_21550
nnnnnnnnnnnnnnnnnnnnnnnnnnnnnnnnnnnnnnnnnnnnnnnnnnnntcccaggtcgaggtggtgtaggcgctcgcggagcagccggggcgttggagtttgaggaggaggagaagatggtcgtgctggtggtggccacgacgtcggacccggcgtccattgggcccgccgccgccttcctcgccatgcccggatggtcccccggcccgcccatcgccgaggggatggaaagttttactaatgggaatgttcgattattgaagcatgagcatagcattatcgcagaggatgatcttgaccagcgatggcaggaagccactggagagtctgtttctgaggtcatatttctcagcaaacacactgcagtctccaaacgtccagcactcacagtgcatccaattggtctgttcttctctcatatgtgatcccatttatcccaatggcaaggtcaaatgcttgatttttttttggtttcttgctgaacaccatttgattcatgagatatatcatagatatgcgttcgataaattcgaaannatattggaccatgttagttatattagt

SEQ ID NO: 7148 - DNA, 565 bp, Zea mays
  Peptide Sequence Number=SeqID_13544
  Probeset Number=SeqID_21551
ctgtttccatcttctttctctttcttctcccttcccgatttcatcgttaattggtaaagaaaaaaagtcagtgaatcatctctcttcttcttcttcttctctcaagaacaggttttcggtttaaagcctcgaaattctctatggcggaagagcatcgatgtcagacgccggaaggccaccgtctctgtgctaacaactgcggcttcctcggcagctccgccaccatgaatctatgctccaactgctacggcgatctctgccttaagcaacagcaagcttccatgaaatccaccgtcgaatcctctctctccgccgtatctcctccgtcgtcagagatcggttctatgcaatccaccgttgaatcctctctctccgacgtatctcctccatcatcggagaccatttccatctcttctccaatgatccagcctctcgttcgaaacccatcagctgaactggaggtaacggcgaagaacgttccgaagacggtgactccgccgccggagcagcagcagaaacggccgaatcggtgcacgacgtgtaggaaaacgggtcgggttgactg

SEQ ID NO: 7149 - DNA, 565 bp, Zea mays
  Peptide Sequence Number=SeqID_13545
  Probeset Number=SeqID_21552
cagtcaacccgacccgttttcctacacgtcgtgcaccgattcggccgtttctgctgctgctccggcggcggagtcaccgtcttcggaacgttcttcgccgttacctccagttcagctgatgggtttcgaacgagaggctggatcattggagaagagatggaaatggtctccgatgatggaggagatacgtcggagagagaggattcaacggtggattgcatagaaccgatctctgacgacggaggagatacggcggagagagaggattcgacggtggatttcatggaagcttgctgttgcttaaggcagagatcgccgtagcagttggagcatagattcatggtggcggagctgccgaggaagccgcagttgttagcacagagacggtggccttccggcgtctgacatcgatgctcttccgccatagagaatttcgaggctttaaaccgaaaacctgttcttgagagaagaagaagaagaagagagatgattcactgactttttttctttaccaattaacgatgaaatcgggaagggagaagaaagagaaagaagatggaaacag

SEQ ID NO: 7150 - DNA, 636 bp, Zea mays
  misc_feature (622)..(636): n is a, c, g, or t
  Peptide Sequence Number=SeqID_13546
  Probeset Number=SeqID_21553
attcaaacatttttgtctcagacaaaagcatctgaacacactcaagaacatatatacatccccaccaaacaaacaaaaataaccatggaagtaaatcaagaagcttcatcaatgccagtagttcccatagatagtttctcttacagttgggtagttaactgtccttctttagaagattccattgatgattatcatcaaacctacgaagattcttcttcttccttcatagagatggatccaagattgcctccttcgagaagattcttcatcaacaaatcccatgaaagtagcttcaagttcgataacttcgtctctttctccgacgaagatcactctttagttcacgccgacgagcttttccgcgacggctacgtcatgccttatctatcaaaagccacgtcagcagctacggaagaagaatatgagccgttggacaagaaaacggagaagaagatggagacacgtgacattaagagcaagtctccttcttcttgtagaaagttgagaagagtttcgaaatgggttttgttgttattgacgccactgtgtaagagattaaggagatgtagaaccgctggatcatccgggggtatcggtatcgactctaggatccgtgtaacgnnnnnnnnnnnnnnn

SEQ ID NO: 7151 - DNA, 738 bp, Zea mays
  misc_feature (1)..(1): n is a, c, g, or t
  Peptide Sequence Number=SeqID_13547
  Probeset Number=SeqID_21554
ngaatgctctgcttggggattatgtggccccttcacacacaaaccaactgggactgcatcatgttcgttctttgaacatttttcttctagaactgatgggctgcagttggaatcaatttctcctccaatcactctcaaagtctgagtagcgctcctttgctgcttgcgttttggctgtgaaatttcggagtcaccatgagagagtgcattattaagcctctttttcccaactttcagaccatcgatagcttgtggtacctgcccgggcggccgcccgggcaggtactttgagacgtctgctaaggacggaacgaacgtggaagacgccttccagtgtatcgtgaagaacgctctgaagaatgagccagaggaagaactgtatgtgccagataccgtgaacgtggtgggtggcaaccgggcccagagatcatccgggtgctgttaaggcacgaggcatcacgaggcgttgtgaccatcatcgtcggttatgcagtgaccaaacaataccttagccattgctgggtttccgtggttatctacgtatccgtattccatttgttacctttccagtctcactgctatgtacccaagggcgcctgtcaattcggtggactttgtgcagtttcatcagtagcgtcataccttgtgaatacaattggccaaaataagaggaagtgtaaactaaagttcatgctttatggttttgtgttgtattaactcgtccgccttttcctcgct

SEQ ID NO: 7152 - DNA, 570 bp, Zea mays
  Peptide Sequence Number=SeqID_13548
  Probeset Number=SeqID_21555
aaaaaaagacctcagctttgagatctttagctagtttcaaaacagataagttctctctgatgatgtctggctcaagattaataatcttcgcaataatctccacaaccgtcttcaccgttggatcaatccgattactcccagaggatgcatcttcagacttcatggaggctccagcatacataaacggaccagaatgctctgttttaccccaaaacagactcctcttagcttgtgatccttcagctgttcacatagctatgacccttgacccggcttacttgcgtggcacggtctccgcagtccactccatcctcaaacacacctcttgccctcaaaacatcttcttccacttcattgcttcagggtcaagccacgtaaagactctctcctctgtttttccttctctgagtttcaaagtctacaccttcgatgaaacccttgttaaagatctcatctcttcttccataagacaagctctcgatagccccttgaactacgcgagaagctacttgtcagagattctttcatcgtgcgttcaccgagtgatttacctagactcagatgtgatcg

SEQ ID NO: 7153 - DNA, 693 bp, Zea mays
  misc_feature (601)..(693): n is a, c, g, or t
  Peptide Sequence Number=SeqID_13549
  Probeset Number=SeqID_21556
aacaaaatatcttcatcgcctctcgaaaaacctagctcagcagtcgccatgtacgaatccgcgaacagacgttaggagaactcgcgagagatctaaggcagtcgccatggacgaatccgcgatcaaaggtttggaagttctggaattgaaaggaagtgatgcagggattcgaaatagcagcattattacgaggatggtggtcaagggatacgacacctcccctcctactcctcctaaggaggttgtcgtagaggctatgataaaacacttgggatacgacaccttcactcctactcctagggaggttgtcgaagaggctctgagaaaacacttcgcatcacgtggaataacgttaatacatgttgctgttcccgaagaaaacagtcatattctctgcagtcacggcttaatctatgttaatgaagaatgtgaagcagaggcgttgaagcttgatggaagtgacatgggaggaggacgtattttagaagttgcggcttacccttttgccgaccatcaccttgaccatatctttgctcctaccaaagccacagaatgcctagagcgcacgttgtatggtacaggatttgatacttgccttgcnnnnnnnnnnnnnnnnnnnnnnnnnnnnnnnnnnnnnnnnnnnnnnnnnnnnnnnnnnnnnnnnnnnnnnnnnnnnnnnnnnnnnnnnnnnnn

SEQ ID NO: 7154 - DNA, 693 bp, Zea mays
  misc_feature (1)..(93): n is a, c, g, or t
  Probeset Number=SeqID_21557
nnnnnnnnnnnnnnnnnnnnnnnnnnnnnnnnnnnnnnnnnnnnnnnnnnnnnnnnnnnnnnnnnnnnnnnnnnnnnnnnnnnnnnnnnnnnngcaaggcaagtatcaaatcctgtaccatacaacgtgcgctctaggcattctgtggctttggtaggagcaaagatatggtcaaggtgatggtcggcaaaagggtaagccgcaacttctaaaatacgtcctcctcccatgtcacttccatcaagcttcaacgcctctgcttcacattcttcattaacatagattaagccgtgactgcagagaatatgactgttttcttcgggaacagcaacatgtattaacgttattccacgtgatgcgaagtgttttctcagagcctcttcgacaacctccctaggagtaggagtgaaggtgtcgtatcccaagtgttttatcatagcctctacgacaacctccttaggaggagtaggaggggaggtgtcgtatcccttgaccaccatcctcgtaataatgctgctatttcgaatccctgcatcacttcctttcaattccagaacttccaaacctttgatcgcggattcgtccatggcgactgccttagatctctcgcgagttctcctaacgtctgttcgcggattcgtacatggcgactgctgagctaggtttttcgagaggcgatgaagatattttgtt

SEQ ID NO: 7155 - DNA, 700 bp, Zea mays
  Peptide Sequence Number=SeqID_13550
  Probeset Number=SeqID_21558
atgtctgaggattgggatctcttcgccgttgtccgaagctgcagctcttctgtttccacggctactataaacaccaactctcgtggtggtgacgagggaagagcgaactgcaagcaacacgatcttcctcctctgttccaacacatccatggagacataagcagagagtcttcttcttgcaacgagctacaagattcttgcaaaccctttttacccgttacaactacttggtcttctcctcttcctcctcctcctgtagtttcatcagctcctaatatcttaatgaaacaagaacaagggctcatcgaatcacaagatcagaaacctcctcttggtgttagggttttcccgcctcccacaaccatttcttcttcctcttctgtctttgttttcagaggtcaacgtgaccaccttcttcaacaacaaccccaagctcctcttcgatctagaaaaagaaaaaatcagcaaaagagaaccatatgtcatgtaactcaagaaaatctctcttcggatatgtgggcatggcgtaaatacggtcaaaaaccaatcagaggctctcctttatccaaggaattattacagatgcagtagctcaaaagggatgtttagctcgaaagcaaggtgagagaagcattttggacccgaacatcttcatcgttacttacaccggagaaacactcatcctcgccctactcaccgg

SEQ ID NO: 7156 - DNA, 643 bp, Zea mays
  misc_feature (512)..(512): n is a, c, g, or t
  misc_feature (601)..(643): n is a, c, g, or t
  Peptide Sequence Number=SeqID_13551
  Probeset Number=SeqID_21559
gactatgtattgcactcaatgatacgatttaacggaaagatcactccgtcatctttcttccaccaccaccgtcctctaaacaaattacacatggcgagtctctgcatctcatcgtccaggatcgtctccctccaccaccagaaaccgtttctctctcttaaactccggccttgttcgtcaggtctctccggtccaactcaccgcacgagtgccgtttgcttcaatccgctacgagcatcgttagatcgccagcgaaccgccgctgccgtatctacgaatgctgagaagcagcgaaagagaggatcgagtgtggtctgttatgctgctccgatgtctgttcataatctacaatgggtctcggcaatctcttgcgttgcattgatggttgcaaagggtacaggtatccacaagtcctttgttgttccgctacttgctctaactgcaccatcagacattatctcctgggcaaaggggtgaaatatggaaaatctggacagcattcatagcactcntttgctcgacggggtcttcgctttttccaaggggaacttgaactggcattcattgcattatccttgggggatggtgggcggcataatcnnnnnnnnnnnnnnnnnnnnnnnnnnnnnnnnnnnnnnnnnnn

SEQ ID NO: 7157 - DNA, 634 bp, Zea mays
  misc_feature (618)..(634): n is a, c, g, or t
  Peptide Sequence Number=SeqID_13552
  Probeset Number=SeqID_21560
atctcatcacttgtttgtgtctcagaatctctcccgttaactcgcatcttacttttgttttttatttcactggagcagctcctctgagatccattcgttaccgattggcttctctctaatcaatctctgatggcggatgcggcgaaagatttagcttcagggactgttggaggagcggctcagctaatcgtaggccacccatttgacacaatcaaggtcaagcttcagagccagcctgctccatcaccgggacaaccaccgaggtacacgggagcaatcgatgcggttaagcagaccgttgcttctgaaggacctaaaggtttgtacaaaggtatgggagctcctcttgctaccgttgctgccttcaacgcggttctgttcaccgtgagaggtcagatggaaggtctgcttaggtctgaacctggtgtgccgttgaccattagtcaacagtttgtgtgcggtgcaggcgctggtttcgctgtctcgttccttgcttgtcctaccgagttgattaaatgcaggttgcaagcacaaggtgctggagggggagcctctaccacaggctcagtggttgcagctgtgaaaatacggtggacctatggacgtggcccgtcacgnnnnnnnnnnnnnnnnn

SEQ ID NO: 7158 - DNA, 643 bp, Zea mays
  Peptide Sequence Number=SeqID_13553
  Probeset Number=SeqID_21561
gacttcgacagtcttcttcttcaatcgatcttgatatctgtcttttttcctcccaaaatggcccttcaagctgcttctttggtctcctctgctttttctgtccgaaaagatggaaaactgaatgcttcttcatcatccttcaaggaatcgagtctttttggtgcctccattacagaacatggctctttctcatttagattcaagagagaacatagctcgaggaatgtgctcgcagttcgtgcccaaacagccgcaacttcaagcccctcggtcacaaaatcttcatctggcggcaagaaaacgttgaggaaaggtaccgtggtggtcacgggagcctcgtcagggttaggtttagccacggctaaagctcttgcggagacaggtaaatggcacgtgataatggcgtgcagggactttcttaaagccgagagagccgctaaatccgcagggatgcctaaagacagctacacggtgatgcatttggacttagcctcgttggacagcgtgagacagttcgttgatagcttcaggagatcggagatgcctctcgatgttttggtctgcaacgctgcggtttatttccctacagctaaagaacctacttacagtgcagaagggtttgagcttagtgttgccacgaatc

SEQ ID NO: 7159 - DNA, 607 bp, Zea mays
  misc_feature (601)..(607): n is a, c, g, or t
  Peptide Sequence Number=SeqID_13554
  Probeset Number=SeqID_21562
acatctctacctctctctcaatcagcttctctcctcctgttcttatggaagcttcacccaatgatcgccttcactttggcaaaatgggtttcgggtgtcagcactacaggaggagatgccagatcagagctccatgttgcaacgaaatcttcgattgtcgccattgtcacaacgagttcactagtactctgcgcaatatctacgaccgtcatgagcttgttcgtcaagacgttaaacaagtgatttgttcggtttgcgacacagagcagccggttgctcaagtatgctccaactgtggtgtcaacatgggagaatacttttgcaatatctgcaagttctatgatgataatactgagaaacaacagtttcattgtgatgactgtggaatctgcagagttggtgggcgtgagaacttctttcattgcaagaagtgtggatcttgttatgcgactggtctgcgcaacaaccatcgctgcgttgaggattcatgcgacatcactgtcccatttgtttccaggatctctttgactctctaaaaaaaacagcagtgatgaagggggaacacactatgcactgtgaatgctaccatgagatgatcaannnnnnn

SEQ ID NO: 7160 - DNA, 626 bp, Zea mays
  misc_feature (547)..(547): n is a, c, g, or t
  misc_feature (549)..(549): n is a, c, g, or t
  Peptide Sequence Number=SeqID_13555
  Probeset Number=SeqID_21563
aaaaagaatctgccatctgaattaaacaaagcgagaggagggcgatacactcgagtttcgaatgcttcattgaatccacaatgcttgaaatggatctccgtcttctcctaccatctctcattccctcatcgcaatccgtttacgtgctggtgttctacttcgtctacttagccgtcgcgggagaaatccttcccggaaaagttatccgcggcgtcgttttatcagatggctctcagcttcggtaccgatgcaatggtctattcgcactgtcattgctggttgctattttgggaatctctgcaaaactcggcgatttgtcacctcttgtgggtgctgatagagggcttgagttgctctcagctacttttatcttctgtggtttggtgacactggtattgtacattactgggcgcacttcttcggataaagagttcttccctaaaacctcacgtctcaggaaatcttttaccccgactggtggtttggaatacagctggatccctcagtttattgggcattgatctcaaggttttctttgtaaaagccngnaatggatgggatggctgcttatcaatctcccatcctggaaaaaggtttttcagatggttccccttgagcagccatgg

SEQ ID NO: 7161 - DNA, 623 bp, Zea mays
  Peptide Sequence Number=SeqID_13556
  Probeset Number=SeqID_21564
attcgtttctctttcgtgttcctccctcatcatttcaccttgtggcctgccgcgatcaaaagaaattagaaaatggctgacggtgaagacattcaaccccttgtctgcgacaatggaaccggaatggttaaggctggttttgctggggatgatgcaccgagggctgtgttcccaagtatcgtaggccgtcctcgtcacaccggagtcatggttgggatgggtcagaaggatgcatacgttggcgacgaagctcaatccaagcgtggtattctaactctcaagtaccctattgagcacggtatcgtcaacaactggggatgacatggagaaaatatggcatcacactttctaccatgagctccgtgttgctctccgaggagcatcccattctcctcactgaagctcctctcaacccaaaggctaaccgtgagaagatgactcagatcatggttgagactttcaacgctcccgccatgtatggtgccatccaagctgtcctgtctctttacgctagtggtcgtcccactggtattgtgcttgacctccggagatggtgtgagccacacggtacctaatctacgagggtacgctcttccaacgcatcctgggttttaaatttccgg

SEQ ID NO: 7162 - DNA, 597 bp, Zea mays
  misc_feature (475)..(477): n is a, c, g, or t
  misc_feature (479)..(481): n is a, c, g, or t
  misc_feature (504)..(505): n is a, c, g, or t
  misc_feature (551)..(554): n is a, c, g, or t
  misc_feature (561)..(567): n is a, c, g, or t
  misc_feature (570)..(570): n is a, c, g, or t
  misc_feature (573)..(577): n is a, c, g, or t
  misc_feature (579)..(581): n is a, c, g, or t
  misc_feature (587)..(589): n is a, c, g, or t
  misc_feature (591)..(597): n is a, c, g, or t
  Peptide Sequence Number=SeqID_13557
  Probeset Number=SeqID_21565
gtcgctacagcgaagtaactcggattcggctcattcgagcgaatcggctcgagcttccaaaaccggatttgcgaacagtcacctagcagccgatgttagcacgcggcgcgtcctgcgaccatggaggacgaggagcacgaggtgtacggccaggagattcccgttgacggcgaggacgtcgacatggctgccggcgacgatgccaccaagctgcaggaacttgacgatatgaagcgccggctcaaggaaatggaggaggaggccgccgcgctccgcgagatgcaggccaaggttgccaaggagatgcaaggtgtagatcccaatgcaaccacatctgaaaacaaagaggagatggattctcggtcagtattcattggaaatgtaagttttatctcttctctttatgtaaattaagaggactcgtgtacagttcaatggctatataatattatctgggggttttaatataatattnnntnnnattttcccactttcagtagattnnatgtttattctgtgctccactagaaatctaatttctatgaggattnnnntagtttnnnnnnnatntgnnnnnannncatttnnngnnnnnnn

SEQ ID NO: 7163 - DNA, 587 bp, Zea mays
  Peptide Sequence Number=SeqID_13558
  Probeset Number=SeqID_21566
aacggatctcgatctcgccgaggaagaagaagaagaagaacaatgtcgtcttcctcctcatcaaagaagcaaaccctcttcatatcgacactcatcatctcatggtactcctccaacatcggcgtcctcctcctcaacaagttcctcctctccaactacggcttcaagttccccatcttcctcaccatgtgccacatgtccgcctgcgccttcctcagctacatctccatcgtcttcctcaagctcgtccctctccagcacctcaaatctcgctcccagttcctcaaggtcgccactctcagcgtcgtcttctgcgcctccgtcgtcggcggtaacatctcgctccgttacctccccgtctctttcaatcaagccgtcggtgctacgacgccgtttttcaccgcgctcttcgcgtatctcatgactcttaagagagaggcttgggttacctatggtgctcttgtccctgtcgttgctggtgtcgtcattgctaggggggtgagccagggtttcactggttcggtttcataatgtgcattagtgctacagctggcagaagcctttaaaatctgttccttcaaggcatt

SEQ ID NO: 7164 - DNA, 605 bp, Zea mays
  misc_feature (458)..(458): n is a, c, g, or t
  Peptide Sequence Number=SeqID_13559
  Probeset Number=SeqID_21567
attatacaaaaaaaaaaaaactttttaacgttggatcattcattcttcttcaccgagccgcagaaatatcgaagatgcagaggcttttcgcagcgagatcggttcttggtaacgccgtcaagacgcggaggaggcagcacttgtcgtctctctcttcttctctcctcttcgacgaaactcagcttcaggttaaagaaagtgtgtccaagtttgcacaagatgttatcgctcctcatgccgaaagaatagataaaacaaattcatttccaaaggatgtaaacttatggaagctaatgggtgagttcaatctccatggaatcacagcgccagaggaatacggaggtcttggtctcggttacttgtatcattgtatagcaatggaggaaataagtcgggcctcggcctcagttgctctctcttacggtgcccattcccaacctttgcatccatcaattggntgcggaatggaaatacttcacaaaagcacaaatatttgccccagctgatcagtggagagcatggtggggctcttgcgatgagtgaaccccatgggcgggtcgatggtgtcagcatgaaatgcaggcctgataaagttgatggtgctt

SEQ ID NO: 7165 - DNA, 631 bp, Zea mays
  misc_feature (601)..(631): n is a, c, g, or t
  Peptide Sequence Number=SeqID_13560
  Probeset Number=SeqID_21568
ttcaaaaaccctaaaatctcatttcacttcactgcgcctcccacactcaacaaaacaagagccgaaaccacaaactctaacaaccatgccgcccaagttggacccgagccagatcgtcgacgtctacgtccgcgtgaccggaggagaagtcggagccgccagttccctcgcccccaagatcggtcccctcggtctcgccccaaagaagatcggagaagacatcgccaaggagacagccaaagagtggaaaggactccgcgtcaccgtcaagctcaccgttcagaaccgtcaggcgaaagtcacggtggttccgtccgccgctgctctcgtcatcaaggccttgaaggagccggagagagacaggaagaaggtgaagaacatcaagcacaatggcaacatttcgtttgatgacgtgatcgagatcgctaggatcatgaggcctaggtcgattgcgaaggagctgagcgggactgtgagggagattctggggacgtgtgtctctgttgggtgcactgttgatgggaaggaccccaggatcttcagcaggagattcaagagggtgagattgagatccctgagaactaaggaaatcaaagaaaannnnnnnnnnnnnnnnnnnnnnnnnnnnnnn

SEQ ID NO: 7166 - DNA, 561 bp, Zea mays
  Peptide Sequence Number=SeqID_13561
  Probeset Number=SeqID_21569
gcgagccgcttctttgcttacaacacacacacagacagaaggtcagaagcgaaaatggtgtcgggatcaggtatatgctcgaagcgcgttgtcgtcgacgcgcgacaccacatgctggggcgtctggcgtcgatcgtggccaaggagctgctcaatgggcagaaggtcgtcatcgttcggtgcgaggagatttgcctctccggtggactcgtccgccagaaaatgaagtacatgaggttccttcgcaaacgtatgaacactaagccttctcatggacccattcacttccgtgctccttccaaaatcttctggcgtactgttcgcggtatgattccacacaaaacgaagcgtggagctgctgcacttgcacgcatgaaggtgtttgaaggtgtgcctccaccatacgacaaggtcaagaggatggttatccccgatgctctcaagggcttgaggcttcaagctggtcacaagtactgtctgttgggtcgtctctcctctgaagcggggggacccctcccccccttcaggggctggaaaccaaagggagggaaaatcccaggg

SEQ ID NO: 7167 - DNA, 556 bp, Zea mays
  Peptide Sequence Number=SeqID_13562
  Probeset Number=SeqID_21570
atttcatcgataagcacgagaatggcttgttttcgttcgatagggtctctagcttctctcactcattctcctcgagatgtttcacgctcctcaggcattgtcttaacttcatgctctgttcatcccatcacgcgctcctccttcactggctctcccatctccatcccgccagtccatctaccatctcaaacacctacaagaccccggaacctcctcccaatcacgtcgatggtgaaaccaacgctccagttcatccaaggaacagacgagatgaccatccctgacgtcaagctgactcggtcaagagacgggtccaacggaatggcactcttcagtttcgaccagccatcggttttcgactcgagcggcgaggtcggggagataaccggactgtacatgatcgacgaggaaggtgtgattcagtccaccgacgtgaacgccagattcgttaacgggaaacctgaaggcattgtggccaagcacgtgatgcgcacgcccagggaatggggataggttcatgagggtcatggaacggtactctgaccaaaacgtttaa

SEQ ID NO: 7168 - DNA, 631 bp, Zea mays
  misc_feature (222)..(222): n is a, c, g, or t
  misc_feature (332)..(332): n is a, c, g, or t
  misc_feature (394)..(394): n is a, c, g, or t
  Peptide Sequence Number=SeqID_13563
  Probeset Number=SeqID_21571
atttgattcagatcatccttccttcctcttctcctcattgagatgtggagatacgtatggtcactgctcctactcttcgtcgtgtgcaaagataccatcttcatggcgaagtctgcggcgattctccttcctagtcaaaccggagttgacgattctgtatgctccgcgccggatccgagcctgaactacaagccggtcatcgggattctgacccatcctggnagacggcgcgacgggtaggttgaaccacgatacgaacgcgtcgtacatcgcagcgtcgtatgtgaaattggctgaagctggtggagctcgtgtggttcctctcatctatnacgaacccgaagagcttctctttcagaagcttgatttggtgaatggggggatattcactggntggccgggctaaaaaaggattgtattttggatggggccaaaaagatcttccctagagctttggaaagaaatggatgggggagagcccttttccggtatatgccattttgcctaggattccagctcctttccatgggccttagccccaacccccgaatttttttaaaaaatgtgtggttaaaaaaggggtcaaaagttttcctgtggttgaaaatgtaaacccccaggggaacggtgt

SEQ ID NO: 7169 - DNA, 640 bp, Zea mays
  misc_feature (585)..(585): n is a, c, g, or t
  misc_feature (601)..(640): n is a, c, g, or t
  Peptide Sequence Number=SeqID_13564
  Probeset Number=SeqID_21572
ctagccgaattgcgccgcgagatatatatctttcaccttctctcgcaggaagctctgtagtggcagtttcaatcgaagacgatgaagttcaacgtcgcgaatcctaccactggttgccagaagaagctcgagatcgatgacgaccaaaagctccgtgctttttacgacaagaggctctctcaggaagttagcggtgatgctttgggcgaggagttcaaggggtacgttttcaagatcatgggaggttgcgacaagcaaggtttcccaatgaaacagggagttctcacccctggtcgtgtccgccttttgcttcaccgaggtactccttgtttcagaggacacggaaggaggactggtgagaggagaagaaagtctgtccgtggttgcattgtcagccaagatctctcggttcttaaccttgtcattgtcaagaagggtgagaaggatcttcccgggcttaccgacaccgagaagccaagggatgagaggtcccaagagagcttccaagatccgcaagctggtcaaccttgggaaggatgatgatgtcaggaagtatgtccacacttaccgcccgcaatcactaancagaaaggtaaggagnnnnnnnnnnnnnnnnnnnnnnnnnnnnnnnnnnnnnnnn

SEQ ID NO: 7170 - DNA, 646 bp, Zea mays
  misc_feature (583)..(583): n is a, c, g, or t
  misc_feature (601)..(646): n is a, c, g, or t
  Peptide Sequence Number=SeqID_13565
  Probeset Number=SeqID_21573
aagaagaaaacatttttctcacactactattcccctctctccccctctctcctccctctctcttctccaaccttcacgtaacaaagctctcttgcttttccggtggccgctctgccgttcgcggtcgctggatctcctcttttctccccctctttcctctcgtgtgtttcatatgtccttgtttccttcgtattctcttctctttgcggcagggggagctccacctttgctcagatccggaatctgggtttcagatctagggtctccggcggcgagtccatgcgagtgaggacagcgtctgtctttcctatggcttagacctttggtttcgtccttggagttccggtgattttgtgttgcttggtgtgtgctctcgggtgagtagtggcgcgtgtgacgtcggttctctcggatttcgtccggggattggttcgtggtaggctttgactaggagctttgtggcgggattcttgtttctggtcactctcgagttattgggtgtccttttggtaacggcgcgggagagctagtccggagctatggccggtaagcttggtctccggtgtctctggtggccgcgccntagtcagaacttttgttnnnnnnnnnnnnnnnnnnnnnnnnnnnnnnnnnnnnnnnnnnnnnn

SEQ ID NO: 7171 - DNA, 646 bp, Zea mays
  misc_feature (1)..(46): n is a, c, g, or t
  misc_feature (64)..(64): n is a, c, g, or t
  Probeset Number=SeqID_21574
nnnnnnnnnnnnnnnnnnnnnnnnnnnnnnnnnnnnnnnnnnnnnnaacaaaagttctgactanggcgcggccaccagagacaccggagaccaagcttaccggccatagctccggactagctctcccgcgccgttaccaaaaggacacccaataactcgagagtgaccagaaacaagaatcccgccacaaagctcctagtcaaagcctaccacgaaccaatccccggacgaaatccgagagaaccgacgtcacacgcgccactactcacccgagagcacacaccaagcaacacaaaatcaccggaactccaaggacgaaaccaaaggtctaagccataggaaagacagacgctgtcctcactcgcatggactcgccgccggagaccctagatctgaaacccagattccggatctgagcaaaggtggagctccccctgccgcaaagagaagagaatacgaaggaaacaaggacatatgaaacacacgagaggaaagagggggagaaaagaggagatccagcgaccgcgaacggcagagcggccaccggaaaagcaagagagctttgttacgtgaaggttggagaagagagagggaggagagagggggagagaggggaatagtagtgtgagaaaaatgttttcttctt

SEQ ID NO: 7172 - DNA, 619 bp, Zea mays
  misc_feature (601)..(619): n is a, c, g, or t
  Peptide Sequence Number=SeqID_13566
  Probeset Number=SeqID_21575
atttcgcgtctcaagacttcgaactcgacaatccctaattcccaaactccctctcggatctataacaaagagtgtgatacgaaacgatgtcgtctcctcgtgaagagaatgtgtacttagccaagttagccgagcaagccgagcgttacgaggagatggtggagttcatggagaaagtcgccaagaccgttgactccgaggagctcaccgtcgaagagaggaacctcttgtccgtcgcttacaagaacgtgattggtgctaggagagcttcgtggaggatcatctcttctattgagcagaaggaagagagcagaggaaacgaggatcacgttgctattatcaaggactacagagggaagatcgagacagagcttagcaagatctgcgatgggattttgaatcttttggattctcaccttgttcccgctgcgtctttggcggagtctaaggtcttttatctgaagatgaaggggggattaccatagggaacccttggtgaaatttaaaaactgggggcttaaaaagaaaggattcttccttaaaaaaacctttccgggggggaaaaaaaaattcggcccaaggaaattttggcccttttctnnnnnnnnnnnnnnnnnnn

SEQ ID NO: 7173 - DNA, 574 bp, Zea mays
  misc_feature (574)..(574): n is a, c, g, or t
  Peptide Sequence Number=SeqID_13567
  Probeset Number=SeqID_21576
acctcatcatttcttcaaaaccaatggcttcacttctccttctccttctttcactctcacttgtcagtttcactctacctaccggagacacccacatcaccaagagaaaatccttcgaaatcatcattgggaggcggtggcaatccaccgccgtcaccttcaccagaaccggaacctgaaccagaagattgctctccaccacctcctcctcctccatgccctccaccaccacaacttccaccgccgcagcggcaacgtgcaccgccaaaaccgccgccaaagtcgcgggggcagccaccgttgccgctacttggctttgagagcccactactaaagaaagtgttcccagtcctcaaagctttccagaaactagttacacgcgatccaatgcatattcttaagacttggggagggcaccgacatttgcaacaaatacaaatacctggggacttgaatgcgcaatcttcccgaatacaactgataaggcactcgcgagcatcccagtttaacgggttttaacttcggtggcgataaactcgtgttacataacttcctcgacaagctagacacagtn

SEQ ID NO: 7174 - DNA, 574 bp, Zea mays
  misc_feature (1)..(1): n is a, c, g, or t
  Peptide Sequence Number=SeqID_13568
  Probeset Number=SeqID_21577
nactgtgtctagcttgtcgaggaagttatgtaacacgagtttatcgccaccgaagttaaaacccgttaaactgggatgctcgcgagtgccttatcagttgtattcgggaagattgcgcattcaagtccccaggtatttgtatttgttgcaaatgtcggtgccctccccaagtcttaagaatatgcattggatcgcgtgtaactagtttctggaaagctttgaggactgggaacactttctttagtagtgggctctcaaagccaagtagcggcaacggtggctgcccccgcgactttggcggcggttttggcggtgcacgttgccgctgcggcggtggaagttgtggtggtggagggcatggaggaggaggaggtggtggagagcaatcttctggttcaggttccggttctggtgaaggtgacggcggtggattgccaccgcctcccaatgatgatttcgaaggattttctcttggtgatgtgggtgtctccggtaggtagagtgaaactgacaagtgagagtgaaagaaggagaaggagaagtgaagccattggttttgaagaaatgatgaggt

SEQ ID NO: 7175 - DNA, 728 bp, Zea mays
  misc_feature (601)..(728): n is a, c, g, or t
  Peptide Sequence Number=SeqID_13569
  Probeset Number=SeqID_21578
tctctagtcctaaatagatctgtagtttttaacgcgacagcaaccataaaatcctctggtttagtcggtcgatcggatcgagtcgaatcgaggatctagggttcgaaagaaaaaaatggcgcagcaacagtcgctgatctacagcttcgtcgctcgcgggacggcgatcctcgtggagttcaccgatttcaaaggcaacttcacctccgtcgctgcgcagtgcctccagaagctcccctcttccaacaacaagttcacctacaactgcgacggccacaccttcaactacctcgtcgaagatggattcacctattgcgttgttgcggttgattctgcggggaggcagattccgatggcgttcttggagagagtgaaggaggattttaacaagagatatggtggggggaaggctgccactgctcaagcaagcagcttgaataaagagtttgcgtctaagttgaaggagcacatgcagtattgtatggatcatcctgacgagattagcaagcttgctaaggtgcaggcgcaggagtctgaggttaagggcgctatgatgtaggacatcgagcaggttcttgaccgtggtgagatgattgagctnnnnnnnnnnnnnnnnnnnnnnnnnnnnnnnnnnnnnnnnnnnnnnnnnnnnnnnnnnnnnnnnnnnnnnnnnnnnnnnnnnnnnnnnnnnnnnnnnnnnnnnnnnnnnnnnnnnnnnnnnnnnnnnn

SEQ ID NO: 7176 - DNA, 614 bp, Zea mays
  misc_feature (584)..(584): n is a, c, g, or t
  misc_feature (597)..(598): n is a, c, g, or t
  misc_feature (601)..(614): n is a, c, g, or t
  Peptide Sequence Number=SeqID_13570
  Probeset Number=SeqID_21579
gcggaatttgagttctgtggagacgatgggaagaggcaagttcaaggggaaacctacaggccaacgccgattctctagtgctgctgagatacttgctggcacttctgctgcacgtcctcgctcgttcaagcagaaagaagctgagtacgaagaagatatcgaagaggtgtctgaagaggaatctgaagaagaagaatccgaagatgaatctgatgtgaagaagaaaggacacgaagctctaatcgaagttgataaccctaacagagctaagcccaagaccttgaaagcgagagaccttgatgcaagtaaaaccactgaactctcaaggcgtgaaagggaggagctagagaagcagcgagctcatgagcgatacatgaggttgcaggagcaaggcaaaaccgagcaagcaagaaaggatttagatcgtttggctctgattcgccaacagagagaagaagctgccaagaagcgagaagaggaaaaagcagcgagagacgcgaagaaagtcgatgctcgcaaatgagccaagtgttcaagcacatcgaagaactaccctactttataactaaaacaaacaagatcgncgactaggatggnngtnnnnnnnnnnnnnn

SEQ ID NO: 7177 - DNA, 391 bp, Zea mays
  misc_feature (268)..(269): n is a, c, g, or t
  misc_feature (318)..(319): n is a, c, g, or t
  Peptide Sequence Number=SeqID_13571
  Probeset Number=SeqID_21580
gttcccttcgttgcgtcttgaaaggggagagagagagagagaagagagagagaagagagagagagagagaggagtgggagacccgcgtagaggctgccgtgtagggaccgtagactcagcgactgcgaaggaggaaataaggggatgggccgggatcggaccgatcaggcagacttgggaggcccggtcgtttgtggcggaagaaggcacccaccgccgccgccaagaaaggatggagaaggccgtcaacgccggcgccgcgccgggnngcggagatcgatcccatgaagaagtacaacgctggtacgaacaaggcgnnatccagcggtacatccctcaacaccaagcgcctcgacgacgacaccgaaaacctcgccccattgagcgagtt

SEQ ID NO: 7178 - DNA, 569 bp, Zea mays
  misc_feature (569)..(569): n is a, c, g, or t
  Peptide Sequence Number=SeqID_13572
  Probeset Number=SeqID_21581
aaaaaaaaaaaaaaaaatcatcgtggaaacgtttggaaagcgacgagcatcggcatcagatctcgtgcggcggttgtgttcttcgggtttagaataaaaggaaaggataggagatggggctgtcatttgggaagctgttcagcaagctgtttgcgaagaaagagatgcgtattctcatggttggtctcgatgctgctggtaagaccaccatcctctacaagctcaagcttggtgagatcgtcaccaccattcccaccattggtttcaatgttgaaactgtggagtacaagaacattagcttcaccgtgtgggatgtcgggggtcaggacaagatccgtccactgtggagacactacttccagaacacacagggacttatctttgtcgtggacagcaacgatcgtgaccgtgttgttgaagccagggacgagcttcacaggatgctcaacgaggatgaattgagggatgcagttctgcttgtttttgctaacaagcaagatctccccaacgctatgaacgctgctgagattactgaccagcttggccttcactctctccgccaacggcan

SEQ ID NO: 7179 - DNA, 572 bp, Zea mays
  Peptide Sequence Number=SeqID_13573
  Probeset Number=SeqID_21582
tagacgcttacgctgttgctcgtcccacttcgcttctcacctcccaacctaccggcggcgaaaatggttttcaagaggtacgtggagatagggagagttgcccttgtaaactacggaaaagaccatggaaagctcgtcgttatcgtcgacgttgttgaccagaacagggctttggtagacgcccctgatatggagaggatccaaatgaatttcaagagattgtctcttactgatatcgttattgagatcaaccgagtgccgaagaagaaggctttgattgaggccatggagaaggctgacgtgaagaacaagtgggagaagagctcatggggtagaaagctgatcgttcagaagcgtagggctagcctcaatgacttcgaataggtcaggatcatggtggccaaaatcaagaaagggggtgttggccagcaaaaaatttgaaacgtcaaaaaggaaacccctggttgaagtttatataacggggaaacttgttatgggttttggggttttgaattaaaaaggttttggaatttacaagggcgggtagttttcctttttaaacccccctttca

SEQ ID NO: 7180 - DNA, 642 bp, Zea mays
  misc_feature (477)..(477): n is a, c, g, or t
  misc_feature (573)..(573): n is a, c, g, or t
  misc_feature (622)..(622): n is a, c, g, or t
  Peptide Sequence Number=SeqID_13574
  Probeset Number=SeqID_21583
attggagacacaacacaacacaacaatgagtttctcggtggtcttgttccagaaaccctaccctgcaacaccaaccttacccatcactaccaccttcacaatctcatcatcctcatcatctttcagaccaagaagaagactaccttcttcaaccaatcgcatcttccctgtaaaccaaccaaaacccataaccaaaaatcgccaaaccgaaaccctagccgccagagacacaatcatagacttcggcaagcacaagggcaaaatgctcggctctctgccctcctcttacctcagatgggtctccaagaatctacgcgcaggagacaccgagtactgggcgaagctcgcagaccaagtgctcgaggacgatgtttataaagacagaattgagtgggagtttgcagagaaaatcctccacggaagtgacgagagtttaaagaagagcagagaagaaagaggtaagctctgtttcgatgngtgttggagattagcgagaggtttggttgggacaatggagataagattgggtggagcagagtcaacttcgagcttctggggacgagcaggggtggntcgattcctaggttggggaggagatagagagaatggtgagaaagagagnagtcaagaaagagaagggag

SEQ ID NO: 7181 - DNA, 643 bp, Zea mays
  misc_feature (601)..(643): n is a, c, g, or t
  Peptide Sequence Number=SeqID_13575
  Probeset Number=SeqID_21584
ctggttcttcttcctcaaatcaaatccagcttttcgttttctcaaagtcgttgaaaatgctggctagactcgctgcgaagcgtctcctcgagatccgccaagctttccgtcaagcaccatctcaggcgtctcgtagcttctcaacagccttaaactaccacctggattctcctgacaacaaaccggatcttccatgggagttttctgaggctaacaaatccaaggttaaggagatactctcttactatccatcaaactacaagcagtctgcggtgattcctcttcttgatcttgcccaacaacagcatggaggctggctccctgtttcagctatgaatgcggttgctaaagttatagaagttgctcctattcgtgtttatgaggttgcaacgttctactccatgttcaacagggcaaaggtcggaaagtaccacctcctagtttgtggcacaacaccttgcatgatccgtggctcacgagagatcgaatcagctttgctagaccatttgggggtggggcgcccccggccacatcccatggtttgttctctgttggagagatggaatgcatgggatgctgtgttatgcgccaatgatcactnnnnnnnnnnnnnnnnnnnnnnnnnnnnnnnnnnnnnnnnnnn

SEQ ID NO: 7182 - DNA, 511 bp, Zea mays
  Peptide Sequence Number=SeqID_13576
  Probeset Number=SeqID_21585
attctctctcctaaagcaaatatcaaaatctagaagagtaactttgaaaccatagatggctcgtaccaagcaaaccgctagaaaatccaccggaggaaaggctccgaggaagcagctggcgacgaaagcggcgaggaagtcggctccggccaccggaggagtgaagaagccgcacagattccgccccggaacggtggcgctgagagagatcaggaagtaccagaagagcaccgagcttctcatccgcaagcttccgttccagcgtctggttcgtgagatcgctcaggatttcaagacggatctgaggttccagagcagtgccgtcgcggctttacaagaggctgccgaggcttaccttgttgggttgttcgaagacacgaatctgtgtgcgattcacgccaagagagtcacgatcatgccgaaggatatccagctcgctaggagaatcagaggtgaaagagcttgaagacctatctagctttgtctagttcgttaatggggactttgatct

SEQ ID NO: 7183 - DNA, 642 bp, Zea mays
  misc_feature (422)..(422): n is a, c, g, or t
  Peptide Sequence Number=SeqID_13577
  Probeset Number=SeqID_21586
accctatggatccaactgaatctcacctactcagattccgtcacgtggtggccatgccttggcccggaagaggccacatcaacccgatgatgaacctctgcaaacgcctcgtcctccgcgaccccaacctcaccgtcacattcgtggtcaccgaagaatggctcgggctcatcggatccgacccgaaacccgaccggatccacttcgctactctccccaatctcatcccttccgagctcgtccgcgccaacgacttcatcggcttcgtcaacgccgtccacgctacgctggaggagccgttcgaacagcttcttttgaccgcctcgactcgccgcccccgacggcgatcgtcgccgacacttacgtcctatgggcggtgcgtgtccgagaacggaggaatattccggtggcttctctctggnaccatgtccgccacgattctctccctcttccttcaccccgacctgctcataagtcacggacatgctctgttccaacccttcagaatccaaaagaagaggagattggttgcctacctccccggtttacctccaacgaagctccggggatctaccgcccttattcaagggctaccaggctccaagagaatgtgagttgtgtttcgacgagctccggagagct

SEQ ID NO: 7184 - DNA, 847 bp, Zea mays
  misc_feature (1)..(3): n is a, c, g, or t
  misc_feature (807)..(847): n is a, c, g, or t
  Peptide Sequence Number=SeqID_13578
  Probeset Number=SeqID_21587
nnnggccaaagatgttgcatttcccctatattcattttatttcttgtttaggttggttttattctaggctttagcatagttttttataactttattagtatatgcttccttgatattctttcccaatttatctgtttgtgctaatatacatgggtgctatgtttcttctgttcgtaagcattttttatggcctctcttttcatgatctgatcactgcatgtgtgagccatttttgaagatctatgtatatctgttgattgtgttgctaccagcgaagttagtgtttctgtgtcacttgttccatcaaagatctggagtagggaactgatacaacaggcaagtgtttccattccttcattgtattagcaagtagaagcacatgacaaattgtttttggtgacttgatagtgcatttccaagagaaatatttttattccaattctctgcacttccacattgttaacaaatttttaggaacttgacaatgtagttgaagagctagcaagtagaaacacgagagattttttttgcaagtgacttgatagtccatgcctgaactttttacaagaacttttttattgtagttctatgggcttcacaattgttaacaatctttcaggaacttgaccatgtagttaaagagcttaagaaaatagcaatcgttcatctacttcatgtaacacccactttgtaatttgctagaaataataccaatagagaaacattttctctttatgtgagtttgatcttcatgcatcatcatatgtgaacaccatgcctaaaaacaattaataaaaatatatactnnnnnnnnnnnnnnnnnnnnnnnnnnnnnnnnnnnnnnnnn

SEQ ID NO: 7185 - DNA, 661 bp, Zea mays
  Probeset Number=SeqID_21588
agcaatctagcgaaccgcggcagactcctccccgcaaacccccagatcccgacgagaccacgccacaccgcggcgaagccctagcctccggccagtgccgccgcagcgatggtgtacttcgattcatgggacgagttcgtcgaccggtccgtgcagctcttccgcgccgaccccatcaccactcgctattgtatgaagtaccggcactgcgacgggaagctcgtgctcaaggtcaccgacgaccgcgagtgcctgaagtttaagactgatcaagctcaggacgcaaagaagatggagaagcttaacaacatctttttcgctctcatgactcgtggacctgatgctgatataagcgaggtttcagggaaggaacaggcggagcagcagcaatcaaagaagggacggggcaggaggcagtagtatcatgttctgggtttctttcagaaagatcacaactgggagtggtgggtggatattttgatcgactcctgttagccatgttacaactgtgagtggtgggtggtctaagagtggtgagtagttttctaagacaatgtgcgccatcgttggatcctttttcctggcacaaaaccgcgaagtacacttacccacacaatcatggttgatgagacaaatcaaatctttaaaaaaaaaaaaaaaa

SEQ ID NO: 7186 - DNA, 762 bp, Zea mays
  misc_feature (1)..(350): n is a, c, g, or t
  misc_feature (354)..(373): n is a, c, g, or t
  misc_feature (376)..(382): n is a, c, g, or t
  misc_feature (755)..(762): n is a, c, g, or t
  Peptide Sequence Number=SeqID_13579
  Probeset Number=SeqID_21589
nnnnnnnnnnnnnnnnnnnnnnnnnnnnnnnnnnnnnnnnnnnnnnnnnnnnnnnnnnnnnnnnnnnnnnnnnnnnnnnnnnnnnnnnnnnnnnnnnnnnnnnnnnnnnnnnnnnnnnnnnnnnnnnnnnnnnnnnnnnnnnnnnnnnnnnnnnnnnnnnnnnnnnnnnnnnnnnnnnnnnnnnnnnnnnnnnnnnnnnnnnnnnnnnnnnnnnnnnnnnnnnnnnnnnnnnnnnnnnnnnnnnnnnnnnnnnnnnnnnnnnnnnnnnnnnnnnnnnnnnnnnnnnnnnnnnnnnnnnnnnnnnnnnnnnnnnnnnnnnnnnnnnnnnnnnnnnnnnnnnnnnnnnnnnngggnnnnnnnnnnnnnnnnnnnncgnnnnnnnagaagaatgaagcaagtacaatgaagaaagaggtaaaaaactgaaaccactaactacagctcagagaacttgttctatagcatggctcgtttctaaccgacttatataatatgatagattttagctgtgtagtaagcctttggagtagttatgaagtctctctttactttggtatgcagtcttcttacgacagaatacggactccattgtatgcttttggcaagcttgttagctaagatgatgtttctgtcattgagctcgaatagtttgaaattagaaagctcgcaattgaggtctacaggccaaattcgctcttagccgtacaatattactcaccggtgcgatgccccccatcgtaggtgaaggtgaaatnnnnnnnn

SEQ ID NO: 7187 - DNA, 781 bp, Zea mays
  misc_feature (36)..(37): n is a, c, g, or t
  misc_feature (44)..(44): n is a, c, g, or t
  misc_feature (46)..(46): n is a, c, g, or t
  misc_feature (82)..(85): n is a, c, g, or t
  misc_feature (126)..(127): n is a, c, g, or t
  misc_feature (130)..(130): n is a, c, g, or t
  misc_feature (132)..(133): n is a, c, g, or t
  misc_feature (297)..(299): n is a, c, g, or t
  misc_feature (336)..(338): n is a, c, g, or t
  misc_feature (340)..(340): n is a, c, g, or t
  misc_feature (342)..(345): n is a, c, g, or t
  misc_feature (348)..(365): n is a, c, g, or t
  misc_feature (367)..(377): n is a, c, g, or t
  misc_feature (384)..(387): n is a, c, g, or t
  misc_feature (389)..(391): n is a, c, g, or t
  misc_feature (394)..(397): n is a, c, g, or t
  misc_feature (399)..(399): n is a, c, g, or t
  misc_feature (405)..(408): n is a, c, g, or t
  misc_feature (412)..(412): n is a, c, g, or t
  misc_feature (417)..(430): n is a, c, g, or t
  misc_feature (434)..(440): n is a, c, g, or t
  misc_feature (445)..(459): n is a, c, g, or t
  misc_feature (461)..(473): n is a, c, g, or t
  misc_feature (475)..(492): n is a, c, g, or t
  misc_feature (502)..(566): n is a, c, g, or t
  misc_feature (568)..(568): n is a, c, g, or t
  misc_feature (572)..(632): n is a, c, g, or t
  misc_feature (634)..(781): n is a, c, g, or t
  Probeset Number=SeqID_21590
tcgataagcttttttttttttttttttgaaaatgannatttccntnaaaatcgatcaaattcatccaaataaaatgataggnnnnaactggaaaaatccctccagcggtactactagttattcttnnaantnncggcatcaatgggcagcttcttgtcgtcatcattatggatccatggcgtcgcgccgtgcggtggtctgaactgcattaaaactcgacgtccttgaagaccttgggcaactgctccagggtgacgaagagaatcacggtgaagggcccctgccgcgacaccgtgnnnatgaaccccttgtagagcgccatcacgccctccgacnnnancnnnntgnnnnnnnnnnnnnnnnnncnnnnnnnnnnntggggcnnnncnnncgnnnncnttcatnnnnatcnccctnnnnnnnnnnnnnnccannnnnnnggaannnnnnnnnnnnnnnannnnnnnnnnnnnannnnnnnnnnnnnnnnnncccccccccnnnnnnnnnnnnnnnnnnnnnnnnnnnnnnnnnnnnnnnnnnnnnnnnnnnnnnnnnnnnnnnnnanagannnnnnnnnnnnnnnnnnnnnnnnnnnnnnnnnnnnnnnnnnnnnnnnnnnnnnnnnnnnncnnnnnnnnnnnnnnnnnnnnnnnnnnnnnnnnnnnnnnnnnnnnnnnnnnnnnnnnnnnnnnnnnnnnnnnnnnnnnnnnnnnnnnnnnnnnnnnnnnnnnnnnnnnnnnnnnnnnnnnnnnnnnnnnnnnnnnnnnnnnnnnnnnnn

SEQ ID NO: 7188 - DNA, 781 bp, Zea mays
  misc_feature (1)..(148): n is a, c, g, or t
  misc_feature (150)..(210): n is a, c, g, or t
  misc_feature (214)..(214): n is a, c, g, or t
  misc_feature (216)..(280): n is a, c, g, or t
  misc_feature (290)..(307): n is a, c, g, or t
  misc_feature (309)..(321): n is a, c, g, or t
  misc_feature (323)..(337): n is a, c, g, or t
  misc_feature (342)..(348): n is a, c, g, or t
  misc_feature (352)..(365): n is a, c, g, or t
  misc_feature (370)..(370): n is a, c, g, or t
  misc_feature (374)..(377): n is a, c, g, or t
  misc_feature (383)..(383): n is a, c, g, or t
  misc_feature (385)..(388): n is a, c, g, or t
  misc_feature (391)..(393): n is a, c, g, or t
  misc_feature (395)..(398): n is a, c, g, or t
  misc_feature (405)..(415): n is a, c, g, or t
  misc_feature (417)..(434): n is a, c, g, or t
  misc_feature (437)..(440): n is a, c, g, or t
  misc_feature (442)..(442): n is a, c, g, or t
  misc_feature (444)..(446): n is a, c, g, or t
  misc_feature (483)..(485): n is a, c, g, or t
  misc_feature (649)..(650): n is a, c, g, or t
  misc_feature (652)..(652): n is a, c, g, or t
  misc_feature (655)..(656): n is a, c, g, or t
  misc_feature (697)..(700): n is a, c, g, or t
  misc_feature (736)..(736): n is a, c, g, or t
  misc_feature (738)..(738): n is a, c, g, or t
  misc_feature (745)..(746): n is a, c, g, or t
  Peptide Sequence Number=SeqID_13580
  Probeset Number=SeqID_21591
nnnnnnnnnnnnnnnnnnnnnnnnnnnnnnnnnnnnnnnnnnnnnnnnnnnnnnnnnnnnnnnnnnnnnnnnnnnnnnnnnnnnnnnnnnnnnnnnnnnnnnnnnnnnnnnnnnnnnnnnnnnnnnnnnnnnnnnnnnnnnnnnnnnngnnnnnnnnnnnnnnnnnnnnnnnnnnnnnnnnnnnnnnnnnnnnnnnnnnnnnnnnnnnnntctntnnnnnnnnnnnnnnnnnnnnnnnnnnnnnnnnnnnnnnnnnnnnnnnnnnnnnnnnnnnnnnnnngggggggggnnnnnnnnnnnnnnnnnntnnnnnnnnnnnnntnnnnnnnnnnnnnnnttccnnnnnnntggnnnnnnnnnnnnnnagggngatnnnnatgaangnnnncgnnngnnnngccccannnnnnnnnnngnnnnnnnnnnnnnnnnnncannnngntnnngtcggagggcgtgatggcgctctacaaggggttcatnnncacggtgtcgcggcaggggcccttcaccgtgattctcttcgtcaccctggagcagttgcccaaggtcttcaaggacgtcgagttttaatgcagttcagaccaccgcacggcgcgacgccatggatccataatgatgacgacaagaagctgcccattgatgccgnnanttnnaagaataactagtagtaccgctggagggatttttccagttnnnncctatcattttatttggatgaatttgatcgattttnanggaaatnntcattttcaaaaaaaaaaaaaaaaaagcttatcga

SEQ ID NO: 7189 - DNA, 390 bp, Zea mays
  misc_feature (2)..(5): n is a, c, g, or t
  misc_feature (7)..(51): n is a, c, g, or t
  misc_feature (54)..(56): n is a, c, g, or t
  misc_feature (72)..(74): n is a, c, g, or t
  misc_feature (77)..(81): n is a, c, g, or t
  misc_feature (88)..(88): n is a, c, g, or t
  misc_feature (91)..(108): n is a, c, g, or t
  Peptide Sequence Number=SeqID_13581
  Probeset Number=SeqID_21592
cnnnncnnnnnnnnnnnnnnnnnnnnnnnnnnnnnnnnnnnnnnnnnnnnnggnnngggccccccctcgagnnngannnnntcgatangcnnnnnnnnnnnnnnnnnnaggcacacaaggtttttcaatcacataacaaagcacacactaatacggagtactcatcaccatcatcgctaagatagttcataagaagttcagactgaaaatcttttacttcagataatttttcatcatcatcatcggcggcggcggcgccgccgccaccacgggcataaaaccagcaaaacctggcatcctaaaaccccatccaccttctagtgcttgttcttcgccatccacccctctatagcaccagatcgaggaacccaaacgagaaatgaagcaaaa

SEQ ID NO: 7190 - DNA, 1098 bp, Zea mays
  misc_feature (1)..(27): n is a, c, g, or t
  misc_feature (29)..(230): n is a, c, g, or t
  misc_feature (233)..(235): n is a, c, g, or t
  misc_feature (237)..(306): n is a, c, g, or t
  misc_feature (308)..(374): n is a, c, g, or t
  misc_feature (376)..(381): n is a, c, g, or t
  misc_feature (386)..(433): n is a, c, g, or t
  misc_feature (435)..(457): n is a, c, g, or t
  misc_feature (459)..(461): n is a, c, g, or t
  misc_feature (465)..(504): n is a, c, g, or t
  misc_feature (506)..(514): n is a, c, g, or t
  misc_feature (516)..(524): n is a, c, g, or t
  misc_feature (526)..(533): n is a, c, g, or t
  misc_feature (535)..(607): n is a, c, g, or t
  misc_feature (609)..(620): n is a, c, g, or t
  misc_feature (630)..(650): n is a, c, g, or t
  misc_feature (652)..(655): n is a, c, g, or t
  misc_feature (657)..(662): n is a, c, g, or t
  misc_feature (667)..(677): n is a, c, g, or t
  misc_feature (679)..(682): n is a, c, g, or t
  misc_feature (685)..(687): n is a, c, g, or t
  misc_feature (690)..(692): n is a, c, g, or t
  misc_feature (698)..(707): n is a, c, g, or t
  misc_feature (1010)..(1010): n is a, c, g, or t
  misc_feature (1017)..(1021): n is a, c, g, or t
  misc_feature (1024)..(1026): n is a, c, g, or t
  misc_feature (1042)..(1044): n is a, c, g, or t
  misc_feature (1047)..(1054): n is a, c, g, or t
  misc_feature (1057)..(1091): n is a, c, g, or t
  misc_feature (1093)..(1096): n is a, c, g, or t
  misc_feature (1098)..(1098): n is a, c, g, or t
  Probeset Number=SeqID_21593
nnnnnnnnnnnnnnnnnnnnnnnnnnntnnnnnnnnnnnnnnnnnnnnnnnnnnnnnnnnnnnnnnnnnnnnnnnnnnnnnnnnnnnnnnnnnnnnnnnnnnnnnnnnnnnnnnnnnnnnnnnnnnnnnnnnnnnnnnnnnnnnnnnnnnnnnnnnnnnnnnnnnnnnnnnnnnnnnnnnnnnnnnnnnnnnnnnnnnnnnnnnnnnnnnnnnnnnnnnnnnnnnnnnnngannnannnnnnnnnnnnnnnnnnnnnnnnnnnnnnnnnnnnnnnnnnnnnnnnnnnnnnnnnnnnnnnnnnnnnngnnnnnnnnnnnnnnnnnnnnnnnnnnnnnnnnnnnnnnnnnnnnnnnnnnnnnnnnnnnnnnnnnnncnnnnnnccaannnnnnnnnnnnnnnnnnnnnnnnnnnnnnnnnnnnnnnnnnnnnnnngnnnnnnnnnnnnnnnnnnnnnnnannnttcnnnnnnnnnnnnnnnnnnnnnnnnnnnnnnnnnnnnnnnngnnnnnnnnngnnnnnnnnntnnnnnnnnannnnnnnnnnnnnnnnnnnnnnnnnnnnnnnnnnnnnnnnnnnnnnnnnnnnnnnnnnnnnnnnnnnnnnnnngnnnnnnnnnnnnaaggtagccnnnnnnnnnnnnnnnnnnnnnannnnannnnnnggccnnnnnnnnnnngnnnngtnnnttnnncatatnnnnnnnnnnttttgcttcatttctcgtttgggttcctcgatctggtgctatagaggggtggatggcgaagaacaagcactagaaggtggatggggttttaggatgccaggttttgctggttttatgcccgtggtggcggcggcgccgccgccgccgatgatgatgatgaaaaattatctgaagtaaaagattttcagtctgaacttcttatgaactatcttagcgatgatggtgatgagtactccgtattagtgtgtgctttgttatgtgattgaaaaaccttgtgtgcctaaaaaaaaaaaaagaaaagcntatcgannnnntcnnnctcgagggggggcccnnnccnnnnnnnnggnnnnnnnnnnnnnnnnnnnnnnnnnnnnnnnnnnngnnnngn

SEQ ID NO: 7191 - DNA, 594 bp, Zea mays
  misc_feature (1)..(29): n is a, c, g, or t
  Peptide Sequence Number=SeqID_13582
  Probeset Number=SeqID_21594
nnnnnnnnnnnnnnnnnnnnnnnnnnnnnattctctgcctccttgcgccgccgctggattcacttctctaggtgcgcaccggtcagaagagatggcggtccatctgctccttaagaagatcgtgaagaagcgggtcaagcagttcaacaggctccacatcgtccgcttcaagtgccttaagacaagctggcgcaggccaaagggtattgattaccgtgtcaggaggaagttcaagggatgcaccttgatgcccaacattggatatggttctgacaagttgaccaggctctacctcatcagcaagttcaagaagtctgtggtgcacatcgttttttagctggagttgctcattatgcacaacaggacctggtgctctgaaattgctcacagggtgtccaccaagaagcgcaagtagatcgtgtagcgtgttgcccagcttgtcattgtggtccccgttcaagcttgataggctccgcagacaggaggacgagtagtctggtttcttgtcctatagccgaactggtagatagcattccttttgttagggaacgctttagcttgtgtcttgtgagtccgtcgggccggccgccggta

SEQ ID NO: 7192 - DNA, 336 bp, Zea mays
  misc_feature (206)..(206): n is a, c, g, or t
  misc_feature (268)..(268): n is a, c, g, or t
  Peptide Sequence Number=SeqID_13583
  Probeset Number=SeqID_21595
accaaggaaattcacaaagagatactagtccctaccaaagcatacttcctgaaacactcttgcaatccactggagtcctgtttgttgagacttgagacgcatagagctagcgtcgacaatgtcgctcgtgaggcgccagcaacgtgttcgaccccttctccatgggacctctgggacccctttcgacaccatgttccgtcatcgtncccccggggcggggggtctccaccaactccgaggaccgccgccttcgccagcgcccgattcnaactgggaaggagacgcccgagggcgaacggtggttcaaggccaccctcccggcgcagaaaaagaggg

SEQ ID NO: 7193 - DNA, 662 bp, Zea mays
  misc_feature (8)..(11): n is a, c, g, or t
  misc_feature (26)..(28): n is a, c, g, or t
  misc_feature (62)..(74): n is a, c, g, or t
  misc_feature (393)..(395): n is a, c, g, or t
  misc_feature (400)..(404): n is a, c, g, or t
  misc_feature (409)..(420): n is a, c, g, or t
  misc_feature (423)..(424): n is a, c, g, or t
  misc_feature (427)..(429): n is a, c, g, or t
  misc_feature (436)..(438): n is a, c, g, or t
  misc_feature (446)..(448): n is a, c, g, or t
  misc_feature (451)..(461): n is a, c, g, or t
  misc_feature (464)..(475): n is a, c, g, or t
  misc_feature (477)..(492): n is a, c, g, or t
  misc_feature (495)..(518): n is a, c, g, or t
  misc_feature (520)..(534): n is a, c, g, or t
  misc_feature (538)..(538): n is a, c, g, or t
  misc_feature (540)..(599): n is a, c, g, or t
  misc_feature (601)..(606): n is a, c, g, or t
  misc_feature (609)..(614): n is a, c, g, or t
  misc_feature (618)..(639): n is a, c, g, or t
  misc_feature (641)..(662): n is a, c, g, or t
  Probeset Number=SeqID_21596
cgattggnnnngggccccccctcgannngtaagaaacgagcgagtttttgttttctagcgannnnnnnnnnnnntttgttttctgatatgcatccctctcaattctgtcttggatcgctcggcacttggttctgcaccattattcagttcagtacgtatgcacaatggtatttgttacagaatatattttattgtatacctattaagtgtgtgtttgaatgcactatatctaatagctagttggctaaaaaaactactagtaaaattaactaactataaaatatgtagctaattagagcatctccaagagactctttatttttaactctctatttgattctttatttgtctctctggaatattaagctctatatataacacttcattccaaannnctctnnnnnatacnnnnnnnnnnnnctnncgnnngttgctnnncaaatttnnntannnnnnnnnnnaannnnnnnnnnnngnnnnnnnnnnnnnnnnaannnnnnnnnnnnnnnnnnnnnnnntnnnnnnnnnnnnnnnaaanannnnnnnnnnnnnnnnnnnnnnnnnnnnnnnnnnnnnnnnnnnnnnnnnnnnnnnnnnnntnnnnnnaannnnnnaaannnnnnnnnnnnnnnnnnnnnngnnnnnnnnnnnnnnnnnnnnnn

SEQ ID NO: 7194 - DNA, 651 bp, Zea mays
  misc_feature (638)..(651): n is a, c, g, or t
  Peptide Sequence Number=SeqID_13584
  Probeset Number=SeqID_21597
acctttcagctgggcgagagagcagagctgcacccgcgcggaggagccgaggcgacgaaggcgacgcaggtcagcacacgtcttgcattttcattttttcctcccaccttcggtttgaatccgcgtctccctcgggccgctgcatcctagctgcctctctttagggtttagggatttctcatcaagagcagagctgcacccgtgcggaggagtcgaggcgaagaaggcgacgcaggtcagcaggtcgctgatacacttgaaacagacagagcttgcttctgaagtgctataactcctaaaggatcaggtgtttactctcttccatctactggaaaaatcaagtgggaggatatctaatgtaaagttaatttgaaaagactgcatctacttccagaacagaagtacagaacaatggagtatacgctgctaactgacttagaaccgcacaaaaaacatgcgacaattcaagtgtgtgttaccagaaagtggcttttccgaggtgctaatgataacgctccactgcagcatgttgatatgattctatctgatcaaaagggcaatgctatctatgctgaaattccagcaaacttagctaatcaaaaagcaccagacattgaagagggaaggatttattttannnnnnnnnnnnnn

SEQ ID NO: 7195 - DNA, 651 bp, Zea mays
  misc_feature (1)..(14): n is a, c, g, or t
  Peptide Sequence Number=SeqID_13585
  Probeset Number=SeqID_21598
nnnnnnnnnnnnnntaaaataaatccttccctcttcaatgtctggtgctttttgattagctaagtttgctggaatttcagcatagatagcattgcccttttgatcagatagaatcatatcaacatgctgcagtggagcgttatcattagcacctcggaaaagccactttctggtaacacacacttgaattgtcgcatgttttttgtgcggttctaagtcagttagcagcgtatactccattgttctgtacttctgttctggaagtagatgcagtcttttcaaattaactttacattagatatcctcccacttgatttttccagtagatggaagagagtaaacacctgatcctttaggagttatagcacttcagaagcaagctctgtctgtttcaagtgtatcagcgacctgctgacctgcgtcgccttcttcgcctcgactcctccgcacgggtgcagctctgctcttgatgagaaatccctaaaccctaaagagaggcagctaggatgcagcggcccgagggagacgcggattcaaaccgaaggtgggaggaaaaaatgaaaatgcaagacgtgtgctgacctgcgtcgccttcgtcgcctcggctcctccgcgcgggtgcagctctgctctctcgcccagctgaaaggt

SEQ ID NO: 7196 - DNA, 587 bp, Zea mays
  Peptide Sequence Number=SeqID_13586
  Probeset Number=SeqID_21599
aaatcaatggcgtcgttagcctcatctctgcagtctctgaagatctcctcctccccattcacccatggctccactccactctcttctctctccaaacccatttcctttccgaacactaggaagcctggtctagtcccggggataagagccatgaagacgatgcaaggacgcgtcgtgtgcgcaacgaacgacaagacggtggcggtggaagtgacgaggctggctccacacccgaagtacaagaggcgagtgaggatgaagaagaagtatcaggcgcatgaccctgataacgtgttcaaggtgggtgacgttgtgaggcttgaaaagagcagacccatcagtaagactaagtctttcgtcgcacttcctgttctcaagaggaatgatcttgggattccgatggagtctcagcagccgtcgccgccgccaggggaagagtagagattggttgtttatttgtctttgtccaaacttgagttgtaattcagttgaactgttgttgttcttggaatgtgtatttctttttcagttgaactacttgttgtgtgaagactctttttttacctacctccaaaaaaaaaaaaaaa

SEQ ID NO: 7197 - DNA, 611 bp, Zea mays
  misc_feature (427)..(427): n is a, c, g, or t
  misc_feature (457)..(457): n is a, c, g, or t
  misc_feature (565)..(565): n is a, c, g, or t
  Peptide Sequence Number=SeqID_13587
  Probeset Number=SeqID_21600
accgccaccgggtagaccggctttggctgcaaaatgtatccgttgcccctcttccctcctcggcctccgatctccgagatttgaaaccgcctgaaccgccgccgctccgccctaccgtaccgccatgccctccgcagctaccgccatggacaggccgtcatcccgtccatcctgctccaccctccaagccccggaagacctccccgtccccttccccatcaccggtgacggcgcctaagcccaagacccgttggttctagccgccgccgtagcccgctatccgacatcaactcaagggacgcctgggccgcgcgcgagcgccttgggtgcttccgctttttcctcccctccgcctccgcctccgggtccagggccagggccgcgtccaccccgcggaccccgaaggcgcccgactccaggccccggnccgggaccaggaggccgaaccagctcccgngatagggatcgaggactaggggccagaaatgtcccgggaaagcagccgacaatatgtggtcgggaagccaatcggtgcccgtatcaacaaggtcgggccggcccgcgncaacaagcagtggctggcgaaggacgagcagctggatcagttccag

SEQ ID NO: 7198 - DNA, 611 bp, Zea mays
  misc_feature (47)..(47): n is a, c, g, or t
  misc_feature (155)..(155): n is a, c, g, or t
  misc_feature (185)..(185): n is a, c, g, or t
  Probeset Number=SeqID_21601
ctggaactgatccagctgctcgtccttcgccagccactgcttgttgncgcgggccggcccgaccttgttgatacgggcaccgattggcttcccgaccacatattgtcggctgctttcccgggacatttctggcccctagtcctcgatccctatcncgggagctggttcggcctcctggtcccggnccggggcctggagtcgggcgccttcggggtccgcggggtggacgcggccctggccctggacccggaggcggaggcggaggggaggaaaaagcggaagcacccaaggcgctcgcgcgcggcccaggcgtcccttgagttgatgtcggatagcgggctacggcggcggctagaaccaacgggtcttgggcttaggcgccgtcaccggtgatggggaaggggacggggaggtcttccggggcttggagggtggagcaggatggacgggatgacggcctgtccatggcggtagctgcggagggcatggcggtacggtagggcggagcggcggcggttcaggcggtttcaaatctcggagatcggaggccgaggagggaagaggggcaacggatacattttgcagccaaagccggtctacccggtggcggt

SEQ ID NO: 7199 - DNA, 582 bp, Zea mays
  misc_feature (582)..(582): n is a, c, g, or t
  Peptide Sequence Number=SeqID_13588
  Probeset Number=SeqID_21602
aaaagcgtaacatttctcttaattacaaagacacctctaagaatacttctcacaatcacgagactgagatgtcggatgaaatacctccgaaagggatcctcaagagcgaagctctgagacagtacatcttggagacctcagcatatccaagagagcatgagctgctcaaggagcttcggaaagtaacagaagagaaatttgggaacttaatcgagatggtgattccagtggatgagggcatttttctatcgatgcttttaaagatcataaacgctaagaacactcttgagctcggtgttttcactggttactctcttctcaccacggcccttgctttgcctgaagatggtcgcattactgcaattgatattgacaaggaagcctatgaagtgcgattagagtttatgaagaaagcaggtgttgatcacaagatcaatttcatctattgcgatggcatggaggtcttacacaaattggttaacgacaaccaggagtttgatttcatatttgctgatgctgacaagccaaactacctcaacttccttgagagatttctgaaattggagaaggttggaggaatcn

SEQ ID NO: 7200 - DNA, 650 bp, Zea mays
  misc_feature (504)..(504): n is a, c, g, or t
  misc_feature (600)..(600): n is a, c, g, or t
  Peptide Sequence Number=SeqID_13589
  Probeset Number=SeqID_21603
tacactctgttccaaatctcctaaaaccttcttcttcaccatttttgcccacacacacaacaaaaaaaaatctctcggacaaaaatgattcaccactgctccatcacgaaacccactttctcagttccgatcccttcacacaagcatcgtcattccacaaccttctcgaatctgactttcagaatccgatgcgagtccaaggatgtctcgtcgatgcggaccaatgcgttttctttgtcgtcggagatggagtctgaagtgaaaaagagcgatctttacccaggggggatgccaaagatgggtcctttcacagggagggatccgaacgtgaagaagcctgcttggctgagacaaaaggcgccacagggagagaggtttcagagaggtgaaggagtcgttgactcgtctcaagctcaacactgttttgtgaggaagctcagtgtcctaatataggcgagtgttggaatggaaggtggagatggtatagcaactgcgaccatcatnggttctgggtgatacttgtactaccccaggtggggtgtagactacttagttataaccagcgtagaaccgtgacgatctaccggatggtgaaagtgnacattttgcacagactgttaaagctatgaaaagacttaagcccgaaataa

SEQ ID NO: 7201 - DNA, 620 bp, Zea mays
  Peptide Sequence Number=SeqID_13590
  Probeset Number=SeqID_21604
atctgtcgtcatctggtttcgtatcttgctagcaccccgtcgcgtcgagttccaatggcatctcttcactccctcgccgccgtttctgtaatcgctactaaaggaacagcagttacttcgtcttgttcctcaactctacgccctctttcatctctacgatttaaaccacgcgagctctctatattcccaaaccatcgcaaaggcaaagggggagcaataaaggcgcagtcgaaagaagcaagtcttcctcctcctactgtgggagagggagatgcattaactagtatgaagcatcttctcctgcctgtgattgatcgcaatccttatctctctgaaggcacccgacaggctgctgctacaaccactagtttggcaaccaagtatggagctgatatcactggtgtagtcatagacgaagaaaaaagagagtcatcttccgagcacgagacctcaagtatccaacatccggtggcatcttagcagaaggtggtttcgaggagttcaagctgttggagagccttggggaagggaaaaaggcactgccgttataggagggggggcggtaactgggacctgcctggaaggatgaccatgaaaccctcccctcaagtttctcgacc

SEQ ID NO: 7202 - DNA, 585 bp, Zea mays
  misc_feature (1)..(3): n is a, c, g, or t
  Peptide Sequence Number=SeqID_13591
  Probeset Number=SeqID_21605
nnnacgcggggacgtcagaggatctcgttccgagtcctgaccaccgctgtgccgcaatcctaccccttcgccgcaccgcagccacccttttttgtaggtttgattgttcgtccatcgtctgacgggggagctgcacgatggtccatttacggtctcccatccattccttgttttctcgtcggattttgatttcgattctcactttttgtcgcttgatctgactgactgaaggctgtgatgaccaaaaacccctacctattttctgactcctgacgatagaaaccaatggatccttctgagcctttattaagatctcgcttttctgtttgattaatcttcgttttttctctggttctgttgtcatctgatatttttttatccccaaaaaatgcacgagggtaggatttgccttgttgataggatgataagccttgacggaaactttcagtgttgacccaaaatatcagactacaactatctgatcgactccaaattcttaccttttgaacttgttcgtagtatttattttgctctcgaagccgaacgtcgccgtttgtattttcttcaactttgtatgcgttgtgt

SEQ ID NO: 7203 - DNA, 585 bp, Zea mays
  misc_feature (583)..(585): n is a, c, g, or t
  Probeset Number=SeqID_21606
acacaacgcatacaaagttgaagaaaatacaaacggcgacgttcggcttcgagagcaaaataaatactacgaacaagttcaaaaggtaagaatttggagtcgatcagatagttgtagtctgatattttgggtcaacactgaaagtttccgtcaaggcttatcatcctatcaacaaggcaaatcctaccctcgtgcattttttggggataaaaaaatatcagatgacaacagaaccagagaaaaaacgaagattaatcaaacagaaaagcgagatcttaataaaggctcagaaggatccattggtttctatcgtcaggagtcagaaaataggtaggggtttttggtcatcacagccttcagtcagtcagatcaagcgacaaaaagtgagaatcgaaatcaaaatccgacgagaaaacaaggaatggatgggagaccgtaaatggaccatcgtgcagctcccccgtcagacgatggacgaacaatcaaacctacaaaaaagggtggctgcggtgcggcgaaggggtaggattgcggcacagcggtggtcaggactcggaacgagatcctctgacgtccccgcgtnnn

SEQ ID NO: 7204 - DNA, 618 bp, Zea mays
  Peptide Sequence Number=SeqID_13592
  Probeset Number=SeqID_21607
tttttttttttttttttgaaaaagagagaacaatacacataccaaggctcatgcattgatacattatccattatgaaacaaacagcaaaacctattacagatatactagcaggtttgtagctaaggcttaactgtcctctattccaaccccaccaaattaaacacctgaattcattagtatgttgattgaaaggtgaaaaattattattaagtccaatattctcaactggacatttacaagagaaaacattaaagatggcattcaaagcaattacaggttttaggggtgaaggaacaaaagccaaaaggtctattgggaatgttgcaattgatggcatagcaacatggagagggcaagcagatccctttggctccaccacagcagttgcatagtgcacatatctggaagcttcccaatttccttctgctctcattcatcatcatcatcatttgcatggaagttgcaccaccatttgccagattcacattgggtaaaaaaatagacaccaaaatgagagagatgatgatgaggccatgagcatgagcatgagcagaagagggcatcttgacaagtgcttcttcttaggtttgtgtggaaagtggagagtttaatttgtt

SEQ ID NO: 7205 - DNA, 618 bp, Zea mays
  Peptide Sequence Number=SeqID_13593
  Probeset Number=SeqID_21608
aacaaattaaactctccactttccacacaaacctaagaagaagcacttgtcaagatgccctcttctgctcatgctcatgctcatggcctcatcatcatctctctcattttggtgtctatttttttacccaatgtgaatctggcaaatggtggtgcaacttccatgcaaatgatgatgatgatgaatgagagcagaaggaaattgggaagcttccagatatgtgcactatgcaactgctgtggtggagccaaagggatctgcttgccctctccatgttgctatgccatcaattgcaacattcccaatagaccttttggcttttgttccttcacccctaaaacctgtaattgctttgaatgccatctttaatgttttctcttgtaaatgtccagttgagaatattggacttaataataatttttcacctttcaatcaacatactaatgaattcaggtgtttaatttggtggggttggaatagaggacagttaagccttagctacaaacctgctagtatatctgtaataggttttgctgtttgtttcataatggataatgtatcaatgcatgagccttggtatgtgtattgttctctctttttcaaaaaaaaaaaaaaaaa

SEQ ID NO: 7206 - DNA, 747 bp, Zea mays
  misc_feature (414)..(414): n is a, c, g, or t
  Peptide Sequence Number=SeqID_13594
  Probeset Number=SeqID_21609
tcatccttatacatttcttgcttagatttattttttcttttaattttctttagataacaaaaggtgcttctttggattgttacatggagggtcaacctgctaaacgcagacgtgtgtactctcttgaacccaacaaagtggaacaagcagcatttgccagaaactacatgaactatttggtgccagcattgatgaagatcaaggaaagaagcacttcatcagatcaacatagtggctattgtgatgacaatattcagaatgttgtcaagtatgaagtggacatggcaatggtgcactcagcccaaggttttgcatggagtaatgctctaagtgtgaagcttcaaagagatagagtcaatgtagattgtgacaccactagctttggtgaaggttcatcatcatcaagggtttgtngccaaaattgtgaaatggtgccgttggataatttcccttcaaaccctagtttgaaatctaataacaagtgcaaggaaatgcctgaaatgaaaaggggtttgagagaagatgatgatggtgatgaagatgaagtcatcaatggtcaattgaagagcctaagaaggttgatgccgggtggagaagagatgtgtagtgaacaaatggtgacagaactacaaagctatgtaagctgtttgcaaatgcaggtgaacattcttcggtgcctcgcggagacacattgattgattcatatctatctactttaatttgctttttccaaaaaaaaaaaaaaaa

SEQ ID NO: 7207 - DNA, 747 bp, Zea mays
  misc_feature (334)..(334): n is a, c, g, or t
  Peptide Sequence Number=SeqID_13595
  Probeset Number=SeqID_21610
ttttttttttttttttggaaaaagcaaattaaagtagatagatatgaatcaatcaatgtgtctccgcgaggcaccgaagaatgttcacctgcatttgcaaacagcttacatagctttgtagttctgtcaccatttgttcactacacatctcttctccacccggcatcaaccttcttaggctcttcaattgaccattgatgacttcatcttcatcaccatcatcatcttctctcaaaccccttttcatttcaggcatttccttgcacttgttattagatttcaaactagggtttgaagggaaattatccaacggcaccatttcacaattttggcnacaaacccttgatgatgatgaaccttcaccaaagctagtggtgtcacaatctacattgactctatctctttgaagcttcacacttagagcattactccatgcaaaaccttgggctgagtgcaccattgccatgtccacttcatacttgacaacattctgaatattgtcatcacaatagccactatgttgatctgatgaagtgcttctttccttgatcttcatcaatgctggcaccaaatagttcatgtagtttctggcaaatgctgcttgttccactttgttgggttcaagagagtacacacgtctgcgtttagcaggttgaccctccatgtaacaatccaaagaagcaccttttgttatctaaagaaaattaaaagaaaaaataaatctaagcaagaaatgtataaggatga

SEQ ID NO: 7208 - DNA, 624 bp, Zea mays
  misc_feature (39)..(42): n is a, c, g, or t
  misc_feature (369)..(383): n is a, c, g, or t
  misc_feature (389)..(392): n is a, c, g, or t
  misc_feature (394)..(397): n is a, c, g, or t
  misc_feature (401)..(409): n is a, c, g, or t
  misc_feature (414)..(425): n is a, c, g, or t
  misc_feature (428)..(430): n is a, c, g, or t
  misc_feature (432)..(448): n is a, c, g, or t
  misc_feature (454)..(456): n is a, c, g, or t
  misc_feature (458)..(463): n is a, c, g, or t
  misc_feature (465)..(469): n is a, c, g, or t
  misc_feature (472)..(485): n is a, c, g, or t
  misc_feature (487)..(487): n is a, c, g, or t
  misc_feature (489)..(501): n is a, c, g, or t
  misc_feature (503)..(507): n is a, c, g, or t
  misc_feature (509)..(554): n is a, c, g, or t
  misc_feature (556)..(588): n is a, c, g, or t
  misc_feature (590)..(615): n is a, c, g, or t
  misc_feature (617)..(624): n is a, c, g, or t
  Peptide Sequence Number=SeqID_13596
  Probeset Number=SeqID_21611
ttttttttttttttttttcttttttttttttcttccacnnnngaacggaaaatggaactggtgcggattagtattatgaaactgtatcagtataaaaaataacaatgagcaagaacgacatggtgtaggatcaccctggatgttattttcggaaaatctattcccaaggctcaggctcggtattggaattgaatctagagttgtatgcctggaccgggatggagttgtaccgatccctacaatgaatctttgttgtggatctatacacagtaaggggtcacaatgatgtatgaccaggccgccgccaccacccgggggccgaagtgatcccgccatatgaatccacccccacgaatgaaacccccaccnnnnnnnnnnnnnnncaaccnnnncnnnntttnnnnnnnnnatttnnnnnnnnnnnntcnnncnnnnnnnnnnnnnnnnnagtgannntnnnnnnannnnntcnnnnnnnnnnnnnncngnnnnnnnnnnnnntnnnnnannnnnnnnnnnnnnnnnnnnnnnnnnnnnnnnnnnnnnnnnnnnnntnnnnnnnnnnnnnnnnnnnnnnnnnnnnnnnnntnnnnnnnnnnnnnnnnnnnnnnnnnntnnnnnnnn

SEQ ID NO: 7209 - DNA, 624 bp, Zea mays
  misc_feature (1)..(8): n is a, c, g, or t
  misc_feature (10)..(35): n is a, c, g, or t
  misc_feature (37)..(69): n is a, c, g, or t
  misc_feature (71)..(116): n is a, c, g, or t
  misc_feature (118)..(122): n is a, c, g, or t
  misc_feature (124)..(136): n is a, c, g, or t
  misc_feature (138)..(138): n is a, c, g, or t
  misc_feature (140)..(153): n is a, c, g, or t
  misc_feature (156)..(160): n is a, c, g, or t
  misc_feature (162)..(167): n is a, c, g, or t
  misc_feature (169)..(171): n is a, c, g, or t
  misc_feature (177)..(193): n is a, c, g, or t
  misc_feature (195)..(197): n is a, c, g, or t
  misc_feature (200)..(211): n is a, c, g, or t
  misc_feature (216)..(224): n is a, c, g, or t
  misc_feature (228)..(231): n is a, c, g, or t
  misc_feature (233)..(236): n is a, c, g, or t
  misc_feature (242)..(256): n is a, c, g, or t
  misc_feature (583)..(586): n is a, c, g, or t
  Probeset Number=SeqID_21612
nnnnnnnnannnnnnnnnnnnnnnnnnnnnnnnnnannnnnnnnnnnnnnnnnnnnnnnnnnnnnnnnnannnnnnnnnnnnnnnnnnnnnnnnnnnnnnnnnnnnnnnnnnnnnntnnnnnannnnnnnnnnnnncngnnnnnnnnnnnnnngannnnntnnnnnnannntcactnnnnnnnnnnnnnnnnngnnngannnnnnnnnnnnaaatnnnnnnnnnaaannnngnnnnggttgnnnnnnnnnnnnnnnggtgggggtttcattcgtgggggtggattcatatggcgggatcacttcggcccccgggtggtggcggcggcctggtcatacatcattgtgaccccttactgtgtatagatccacaacaaagattcattgtagggatcggtacaactccatcccggtccaggcatacaactctagattcaattccaataccgagcctgagccttgggaatagattttccgaaaataacatccagggtgatcctacaccatgtcgttcttgctcattgttattttttatactgatacagtttcataatactaatccgcaccagttccattttccgttcnnnngtggaagaaaaaaaaaaaagaaaaaaaaaaaaaaaaaa

SEQ ID NO: 7210 - DNA, 635 bp, Zea mays
  misc_feature (142)..(146): n is a, c, g, or t
  misc_feature (279)..(282): n is a, c, g, or t
  misc_feature (475)..(481): n is a, c, g, or t
  misc_feature (485)..(496): n is a, c, g, or t
  misc_feature (506)..(521): n is a, c, g, or t
  misc_feature (523)..(530): n is a, c, g, or t
  misc_feature (533)..(541): n is a, c, g, or t
  misc_feature (547)..(552): n is a, c, g, or t
  misc_feature (558)..(565): n is a, c, g, or t
  misc_feature (572)..(578): n is a, c, g, or t
  misc_feature (580)..(594): n is a, c, g, or t
  misc_feature (596)..(620): n is a, c, g, or t
  misc_feature (622)..(633): n is a, c, g, or t
  misc_feature (635)..(635): n is a, c, g, or t
  Peptide Sequence Number=SeqID_13597
  Probeset Number=SeqID_21613
ttttttttttttttttttattttttttttttttttttttttttttttttaagcaacaaaaatatttttattccctttttaccaacccaaaatctcatgtgtaccctttgtccagtttacaaaacccaggggtatccaaaggnnnnncaagactaaattaagttttaccaaaaattcttacggcaaacacctcagggatgtacggagccccgttttcaccatactggggggggaagaaatttaaagtatcacggaatggctttgcttttctggagggcannnnattttctaatttgttttgtgcgggcgagggggcaatcaaagggatacagcaaaaacttctttgggccgggttgtaacacaaaaaaaataatttggggaggttatttttccagcttcttcaaactagggaattgctctcccaggtgcgcctcaaggaaagtttgagtatcaggggccaaagttttcgcaaaatnnnnnnngagnnnnnnnnnnnncaaaaactcnnnnnnnnnnnnnnnnannnnnnnnacnnnnnnnnnccttgnnnnnnaacttnnnnnnnnagccccnnnnnnntnnnnnnnnnnnnnnngnnnnnnnnnnnnnnnnnnnnnnnnntnnnnnnnnnnnncn

SEQ ID NO: 7211 - DNA, 635 bp, Zea mays
  misc_feature (1)..(1): n is a, c, g, or t
  misc_feature (3)..(14): n is a, c, g, or t
  misc_feature (16)..(40): n is a, c, g, or t
  misc_feature (42)..(56): n is a, c, g, or t
  misc_feature (58)..(64): n is a, c, g, or t
  misc_feature (71)..(78): n is a, c, g, or t
  misc_feature (84)..(89): n is a, c, g, or t
  misc_feature (95)..(103): n is a, c, g, or t
  misc_feature (106)..(113): n is a, c, g, or t
  misc_feature (115)..(130): n is a, c, g, or t
  misc_feature (140)..(151): n is a, c, g, or t
  misc_feature (155)..(161): n is a, c, g, or t
  misc_feature (354)..(357): n is a, c, g, or t
  misc_feature (490)..(494): n is a, c, g, or t
  Probeset Number=SeqID_21614
ngnnnnnnnnnnnnannnnnnnnnnnnnnnnnnnnnnnnncnnnnnnnnnnnnnnnannnnnnnggggctnnnnnnnnaagttnnnnnncaaggnnnnnnnnngtnnnnnnnntnnnnnnnnnnnnnnnngagtttttgnnnnnnnnnnnnctcnnnnnnnattttgcgaaaactttggcccctgatactcaaactttccttgaggcgcacctgggagagcaattccctagtttgaagaagctggaaaaataacctccccaaattattttttttgtgttacaacccggcccaaagaagtttttgctgtatccctttgattgccccctcgcccgcacaaaacaaattagaaaatnnnntgccctccagaaaagcaaagccattccgtgatactttaaatttcttccccccccagtatggtgaaaacggggctccgtacatccctgaggtgtttgccgtaagaatttttggtaaaacttaatttagtcttgnnnnncctttggatacccctgggttttgtaaactggacaaagggtacacatgagattttgggttggtaaaaagggaataaaaatatttttgttgcttaaaaaaaaaaaaaaaaaaaaaaaaaaaaaataaaaaaaaaaaaaaaaaa

SEQ ID NO: 7212 - DNA, 609 bp, Zea mays
  misc_feature (606)..(609): n is a, c, g, or t
  Peptide Sequence Number=SeqID_13598
  Probeset Number=SeqID_21615
cccccgcttttgctgaacaattgcgactcaaagatgagaaattagaggcatttcggtggcagttgttgagaacagaattagaaatgaaacagatgcgggcacatgtggaggggcaggtaaaggatgtgacacagcttagacatgacaagatgagactggagaccttactgttggagagagaagatgaactgacttccctgaaagagcaatttgtatcaaaattgaggcccttaaaaaataactcaaatttgcctccacaatcatcagaactagcacaatatgctgtctggtcaagagtcaaggttgtcaagagaaaaccaggtgaaaaagtgctagaaacaatggaaactttggttgaggaagattgtgagaaggaagtacagtgtctgccccatgaccagcttaacagtgctaatttactagttcaatctcaagaaaatgagattgaagaagaaaagggtgtttctagggaggatagtcctactcctatgcaaaatcaaagtccaaacaaagtagaagctgatgcttctgaaaagatagcatctaccagccagacccttagtacaacaaaacagtccctatggaagatggatcttcatgctcttnnnn

SEQ ID NO: 7213 - DNA, 609 bp, Zea mays
  misc_feature (1)..(4): n is a, c, g, or t
  Peptide Sequence Number=SeqID_13599
  Probeset Number=SeqID_21616
nnnnaagagcatgaagatccatcttccatagggactgttttgttgtactaagggtctggctggtagatgctatcttttcagaagcatcagcttctactttgtttggactttgattttgcataggagtaggactatcctccctagaaacacccttttcttcttcaatctcattttcttgagattgaactagtaaattagcactgttaagctggtcatggggcagacactgtacttccttctcacaatcttcctcaaccaaagtttccattgtttctagcactttttcacctggttttctcttgacaaccttgactcttgaccagacagcatattgtgctagttctgatgattgtggaggcaaatttgagttattttttaagggcctcaattttgatacaaattgctctttcagggaagtcagttcatcttctctctccaacagtaaggtctccagtctcatcttgtcatgtctaagctgtgtcacatcctttacctgcccctccacatgtgcccgcatctgtttcatttctaattctgttctcaacaactgccaccgaaatgcctctaatttctcatctttgagtcgcaattgttcagcaaaagcggggg

SEQ ID NO: 7214 - DNA, 593 bp, Zea mays
  Peptide Sequence Number=SeqID_13600
  Probeset Number=SeqID_21617
ttttttttttttttttattatattttaaaatattcccaaccaactttaaaataaaataaaaataacaaaacttgagcatatgacactaataatactattacaaaaaaaaaaaaaggatagggaccaagccgcaaggaactcggtcgtcattaatttcaataaatactattaagtcacctgccttgtctacaacctaaggcaacatgaaagtactacaaacactattgatcttatcaggaatttaacagtgtcagcactagtacaaagattgtcctagtttgggttcttctgcagattctccacataacaatctgcatgtttagattgcattggtgtgtaatgaaaaccacaatttgccacataactctcatttgaggttggcgtgtcctgtaaaccagggtaatcctacttgaggacactgttttgtgtctgctatcggaacaataggacccagaaagatgcgccacaaatcaagtattattgtgaccagcattgcagctcccaaagcatcaacagccactctaggcaagtcccatttatcgccaggtttctcatctatccttaaaaacattgggaagctcacaataaagtaa

SEQ ID NO: 7215 - DNA, 593 bp, Zea mays
  Peptide Sequence Number=SeqID_13601
  Probeset Number=SeqID_21618
ttactttattgtgagcttcccaatgtttttaaggatagatgagaaacctggcgataaatgggacttgcctagagtggctgttgatgctttgggagctgcaatgctggtcacaataatacttgatttgtggcgcatctttctgggtcctattgttccgatagcagacacaaaacagtgtcctcaagtaggattaccctggtttacaggacacgccaacctcaaatgagagttatgtggcaaattgtggttttcattacacaccaatgcaatctaaacatgcagattgttatgtggagaatctgcagaagaacccaaactaggacaatctttgtactagtgctgacactgttaaattcctgataagatcaatagtgtttgtagtactttcatgttgccttaggttgtagacaaggcaggtgacttaatagtatttattgaaattaatgacgaccgagttccttgcggcttggtccctatcctttttttttttttgtaatagtattattagtgtcatatgctcaagttttgttatttttattttattttaaagttggttgggaatattttaaaatataataaaaaaaaaaaaaaaa

SEQ ID NO: 7216 - DNA, 716 bp, Zea mays
  misc_feature (1)..(6): n is a, c, g, or t
  misc_feature (10)..(12): n is a, c, g, or t
  misc_feature (14)..(65): n is a, c, g, or t
  misc_feature (68)..(99): n is a, c, g, or t
  misc_feature (102)..(105): n is a, c, g, or t
  misc_feature (117)..(121): n is a, c, g, or t
  misc_feature (126)..(132): n is a, c, g, or t
  Peptide Sequence Number=SeqID_13602
  Probeset Number=SeqID_21619
nnnnnncccnnnannnnnnnnnnnnnnnnnnnnnnnnnnnnnnnnnnnnnnnnnnnnnnnnnnnnggnnnnnnnnnnnnnnnnnnnnnnnnnnnnnnnnggnnnngggccccccctnnnnncagcnnnnnnngccccccccctaacaacaacattaatgagaaaacaaaccataataatggcaagttcagtgaagaagaaagtaaccctaatgagaacaaccctgccggtggcaaagaggtggatagtgggcactccaaactttgtgcaagagggcattggagacctgctgaagattccaagctcaaggagcttgtggctcttcatggccctcagaattggaacctcatagctgaaaaactagaaggaagatcagggaagagttgtaggctgaggtggttcaaccagttggatccaaggatcaacagaagagcattcagtgaagaagaagaagagaggctaatgcaggcacatagaatttatgggaacaaatgggccatgattgcaaggctttttcctgggagaacagataatgcagtgaagaatcactggcatgttataatggccaggaagtacagggaacaatccagtgcttacaggaggaggagaatgagccaacctgtgtacagaagagtggatcaaaatccaacctttgtttgcagcagcagagataataatgcctcaaccacagaaccagaaccagaatcatcaccttcc

SEQ ID NO: 7217 - DNA, 645 bp, Zea mays
  Peptide Sequence Number=SeqID_13603
  Probeset Number=SeqID_21620
gttccccaaggatttcaatctcaaagtctctctctccctcttaagacccaaaaaaaatcatcatctttctaatacggaattatttagggtttattgtcgtttgaatcttcttctactattgccatggatatagaagaaactaatataattgaagttgaaacgaaggtgatgaatctagcgctaaacatggagtctatgaacattctctcaatccgtgtacacaatctgattgaagattttaccgaagacgtgattttacatataagatcacgttacatccgcttggagccacacggcttcacgccaagtcatatctctgaactccttcgtggccaccaagttgatgaatctcaccacataggtggaaaagatcgctaatgaaatcaatcgttcacttagcaatgattaaaactctccgagagcctgtcttcgggaaacggtcgaagttggattcgccaaagagaggcggtttgggttgggcccgccggatgtccctgcttccattgaagttttaacggaggggggggggaagaacttttagggggtttgaacggaaataaagaagctttgtgttcaatttgcatcgaggatttgtccaagagtcaacaaagcatcattgagatgcctaactgtttgcatatgttt

SEQ ID NO: 7218 - DNA, 645 bp, Zea mays
  Probeset Number=SeqID_21621
aaacatatgcaaacagttaggcatctcaatgatgctttgttgactcttggacaaatcctcgatgcaaattgaacacaaagcttctttatttccgttcaaaccccctaaaagttcttcccccccccctccgttaaaacttcaatggaagcagggacatccggcgggcccaacccaaaccgcctctctttggcgaatccaacttcgaccgtttcccgaagacaggctctcggagagttttaatcattgctaagtgaacgattgatttcattagcgatcttttccacctatgtggtgagattcatcaacttggtggccacgaaggagttcagagatatgacttggcgtgaagccgtgtggctccaagcggatgtaacgtgatcttatatgtaaaatcacgtcttcggtaaaatcttcaatcagattgtgtacacggattgagagaatgttcatagactccatgtttagcgctagattcatcaccttcgtttcaacttcaattatattagtttcttctatatccatggcaatagtagaagaagattcaaacgacaataaaccctaaataattccgtattagaaagatgatgattttttttgggtcttaagagggagagagagactttgagattgaaatccttggggaac

SEQ ID NO: 7219 - DNA, 658 bp, Zea mays
  misc_feature (290)..(290): n is a, c, g, or t
  Peptide Sequence Number=SeqID_13604
  Probeset Number=SeqID_21622
acaaattcacacattttttgttgcattatcacaaacacctcgtccctcacaatgcagctagcaatggcggccaacgctgtcgtttcaccgtcgccgttccgacctcagccctttctccggtcatccttctccggcgtctccgtcaagctcactccccaatccataacgctttcacgctccaagcccctcaccgtcttcgccgccaccaagagggccgtcgccgtcctcaaggggacctcccgccgtcgaaggcgtcgccactctcatccaagaagacgatggcccgacgnacagtttctgttcgcatcactggccttactccggggccttcatgggttttcacctaacatgagtatggtgatacgaccaaatggggtgttatttctacggggagcacatttttaatcctaataaatttgacacatggtgctcctggagggatgaagtcccgccatggcgggtgacctgggaaacatagttgctatggcgaagggggggtttgcagagggctacaattggtggataatcagataccactctcctggccccaattcagtaagttggaagaacccttgggggcccatgaccttggggatgacccttggaaaaggggggcatggactcagtttgaaactggaaaaggtggggaaaaaaacgg

SEQ ID NO: 7220 - DNA, 658 bp, Zea mays
  misc_feature (369)..(369): n is a, c, g, or t
  Peptide Sequence Number=SeqID_13605
  Probeset Number=SeqID_21623
ccgtttttttccccaccttttccagtttcaaactgagtccatgccccccttttccaagggtcatccccaaggtcatgggcccccaagggttcttccaacttactgaattggggccaggagagtggtatctgattatccaccaattgtagccctctgcaaacccccccttcgccatagcaactatgtttcccaggtcacccgccatggcgggacttcatccctccaggagcaccatgtgtcaaatttattaggattaaaaatgtgctccccgtagaaataacaccccatttggtcgtatcaccatactcatgttaggtgaaaacccatgaaggccccggagtaaggccagtgatgcgaacagaaactgtncgtcgggccatcgtcttcttggatgagagtggcgacgccttcgacggcgggaggtccccttgaggacggcgacggccctcttggtggcggcgaagacggtgaggggcttggagcgtgaaagcgttatggattggggagtgagcttgacggagacgccggagaaggatgaccggagaaagggctgaggtcggaacggcgacggtgaaacgacagcgttggccgccattgctagctgcattgtgagggacgaggtgtttgtgataatgcaacaaaaaatgtgtgaatttgt

SEQ ID NO: 7221 - DNA, 605 bp, Zea mays
  misc_feature (601)..(605): n is a, c, g, or t
  Peptide Sequence Number=SeqID_13606
  Probeset Number=SeqID_21624
aagtttgttcttgtatcatctgtgtgcagcatggcgctgccagttccccgctgctagcctcgtcgccgtcgccatggcaatgggcaccgccacgatctcttgctcttatccacagctccggtatcgcccctctcctccatgccggcgccacggccccgcagcggccaccgtggccgccttggcgacgccgcggtcggagcaggacatcgtcatcgtcggcgcggccgtcgcggggctggcccccgcggtgccgctgcggcggctcggcgtgggcgccgccgtgctggagcagggcgaccccctgcgcgcgggcggcacctccctgacgctggtcaagaacgggtgagcgcgtgctggacgccatccgcgtcgccgacgagctccgccccaagtacctccgcatcccggggtgcgtccctcttccccctggtgcgtcccccttccagcaagatgccgctcgcggatcatccctgtgtggtctgagctgcaccgtgaggttccagctggcccccgcaggatgatggtgaggtccccggggcggaatctgcccgagttctccttcgacgaggaacctcccggggactgcagcttccctccccgnnnnn

SEQ ID NO: 7222 - DNA, 605 bp, Zea mays
  misc_feature (1)..(5): n is a, c, g, or t
  Peptide Sequence Number=SeqID_13607
  Probeset Number=SeqID_21625
nnnnncggggagggaagctgcagtccccgggaggttcctcgtcgaaggagaactcgggcagattccgccccggggacctcaccatcatcctgcgggggccagctggaacctcacggtgcagctcagaccacacagggatgatccgcgagcggcatcttgctggaagggggacgcaccagggggaagagggacgcaccccgggatgcggaggtacttggggcggagctcgtcggcgacgcggatggcgtccagcacgcgctcacccgttcttgaccagcgtcagggaggtgccgcccgcgcgcagggggtcgccctgctccagcacggcggcgcccacgccgagccgccgcagcggcaccgcgggggccagccccgcgacggccgcgccgacgatgacgatgtcctgctccgaccgcggcgtcgccaaggcggccacggtggccgctgcggggccgtggcgccggcatggaggagaggggcgataccggagctgtggataagagcaagagatcgtggcggtgcccattgccatggcgacggcgacgaggctagcagcggggaactggcagcgccatgctgcacacagatgatacaagaacaaactt

SEQ ID NO: 7223 - DNA, 1399 bp, Zea mays
  misc_feature (611)..(613): n is a, c, g, or t
  misc_feature (1399)..(1399): n is a, c, g, or t
  Peptide Sequence Number=SeqID_13608
  Probeset Number=SeqID_21626
gaatcccacacgcgtccagcagcaactgactgctcgtccgttctacgtttcttggccaccatggacctggaacgcggcgacaagaagccgccgccgccgccgccgcccgctccacggaccgctgctgcgaccactacgacgacgacgacgccggcctgcagcggtaagaagcggccgccgctcagggacagcctcgtggcgctgcagccggtgctgctgcgcgcggcggcggccctagccgcggccgccgccgccgcggtgatggcgctcgacgcccagtcctacaccgcggtggtcgccatcgtcggcacccgcccgctcacgcagaccttcactgccaagttcagcgacacgccggcgttcgtgtacttcgtcatagccaacgccatcgctgccgcgtacaacctcctggtgctgctcgtccggcgccggcggaggactacggcgggcttggtcgtgcgcatgcttgacatggtggtcatggcgctgctggcggaccggcgccgccgcggcgtgcatctatcagtgcacgtgtgcattatccttgcttcctagagatgacttgccattgccactgtccaaagaagctagccactgtccaaagaagctannngcctgactgaaagcctgctgtagtgctcgcgcgcataggcctgcaccgttaggtcgcctgatgagtgatgacagatgccaagccatcaccagtcgattcatacggatacacacgcacggcactaccgtaccgtcgtcatctccttgtcgttgctctggtccgcaggtggtcatggcgctgctggcgaccggcgccgcggcggcggcgtcgatggccgagctaggcaggaacggcaacgcgcgcgcgcggtggaacccggtgtgcgacaggttcggctccttctgccgccgcggcggcgccgcgctggcgtcgtcgttcgtcggcgtcgcgctcatgctggcgctcaacctgctctcagccgcgtccggtgccgggtgctagctccgcgggccagtgagtggcccgtgccgtcccagacagctctgtactcatgaggggccgtgggggagctgaatcgcggcgtgaaactggagttctgccggtgcacgtttggtgtagaattatttgcatttcttcaacatgtgagtttgaaatgggtttcttggttcttacaaaaaaaaaacataatgaaccatgtcatacctctgcatctgaatgtaagtcaacacaaatgttgccttatccgctcagaagcaagaggtgtcgtggtgtagttggttatcacgtcagtctaacacactgaaggtctccggttcgaacccgggcgacgccatgttttgtttgtttatttttttgtgccctgttttgcgttgtcggctgatttttttcccccgaaaaaaaaaaaan

SEQ ID NO: 7224 - DNA, 701 bp, Zea mays
  misc_feature (375)..(375): n is a, c, g, or t
  misc_feature (453)..(453): n is a, c, g, or t
  Peptide Sequence Number=SeqID_13609
  Probeset Number=SeqID_21627
ttttcccctccgtggacagagaaccgcggcggcgcgcgtcactccgcggcggaggacatcgccggagtgagacggctagcggatttgtgcgctaagcgaccccctagcggtgctacacgtggggaaagagatggcggagatgatggggtattactcaccgacggtcgagcggtgaagaggcccatccacgaggtagtgcggcccgacggtgaaattgttgtgctgacgagcaattaccggttcccggatcgccaccagagcccggagaccccacgcagaccaccagtgcacccaaatgattccccagaagcgcccggcgaggccccgtcggtggtggttgtgtgttgccgcgttggcggaacaagtggcaatggnccgcggccgaagtcttctccgaggcggctatggagggcacgactgcttggctagtgctaaacgagagggcaagggaanggagggtggtgacgtcaattcttcccatataagggccgaggcgatagggaaccggtttggtcagctccgcccgggaaggacctccgcgtgaaccgcgcgggtttgggtagaccggcgtaaacccgttgaggaacgcgatgggcacccgggagatccgctattgaaaaattccgccccatcccggaagtcccaggaaaggaaggggggttcttggggttaccgggcagaccggggaaaggggatcccat

SEQ ID NO: 7225 - DNA, 701 bp, Zea mays
  misc_feature (249)..(249): n is a, c, g, or t
  misc_feature (327)..(327): n is a, c, g, or t
  Probeset Number=SeqID_21628
atgggatcccctttccccggtctgcccggtaaccccaagaaccccccttcctttcctgggacttccgggatggggcggaatttttcaatagcggatctcccgggtgcccatcgcgttcctcaacgggtttacgccggtctacccaaacccgcgcggttcacgcggaggtccttcccgggcggagctgaccaaaccggttccctatcgcctcggcccttatatgggaagaattgacgtcaccaccctccnttcccttgccctctcgtttagcactagccaagcagtcgtgccctccatagccgcctcggagaagacttcggccgcggnccattgccacttgttccgccaacgcggcaacacacaaccaccaccgacggggcctcgccgggcgcttctggggaatcatttgggtgcactggtggtctgcgtggggtctccgggctctggtggcgatccgggaaccggtaattgctcgtcagcacaacaatttcaccgtcgggccgcactacctcgtggatgggcctcttcaccgctcgaccgtcggtgagtaataccccatcatctccgccatctctttccccacgtgtagcaccgctagggggtcgcttagcgcacaaatccgctagccgtctcactccggcgatgtcctccgccgcggagtgacgcgcgccgccgcggttctctgtccacggaggggaaaa

SEQ ID NO: 7226 - DNA, 605 bp, Zea mays
  misc_feature (592)..(592): n is a, c, g, or t
  Peptide Sequence Number=SeqID_13610
  Probeset Number=SeqID_21629
aaactcgaaagggaccaaatcggaaagaggaaaatgggagaggggaaggagagtgtgccacaggagcacgatgtgaatgcgaagtgggacgcatgtatcgatctcacgacccgccgtttcgtctactcctcactcggcggcgccttcgccggtcttctcttcttcaggagtcctgtaacaagatgggcatcgattgcttttggtgctggacttggtattggttctgcatacactgactgctctcgtgcttttgatgctccgccttcattcacagagacttcttctgtatctcagactgtatctcagtctgcagacgaatagacgaacgatgaaagtaagtgaatccatgcggaaaacagagccatcacaccaatgatttggtgaattcgtttcctaaaacctgtaaggaacaagtcttttgagattaacgctgaattgtaaaacctggttttccttctggtaaatccttttagaaccgctggacttcagtcccgccttcttagttccaaaaattaacaaacctcagaagaaaggttcccttgaagattgtcccccttttctttagcccaaataccaaaccgtggcgcgcttnatgacggatgtgc

SEQ ID NO: 7227 - DNA, 613 bp, Zea mays
  misc_feature (354)..(355): n is a, c, g, or t
  misc_feature (360)..(360): n is a, c, g, or t
  misc_feature (364)..(364): n is a, c, g, or t
  misc_feature (601)..(613): n is a, c, g, or t
  Peptide Sequence Number=SeqID_13611
  Probeset Number=SeqID_21630
aatccctaaccttcccccgcacgttcctctctctaccgtgttgcccgtcccgtgcccctgtcgcgatagatggctcgcggcccccaacgacgacgaccgcgccgccatgaccaccaccaccacgcccacggcggtggcggtcgtgaacgtggtcgcagttgcgcagctctacgtcgggcctccacctgcgcgcgtccctccacctcgcccgtggccacgaaatcctcttccatggaatcgtcgcgcatcctcctccacctcgaccgccgcggccgattcccaccgccaccacgccgcgcacgccccgtccctcggtcccccgtccgcctcttccctgcccctaccccccgcgtnnaccgngctnctcggccctcctaacatcgtcgtctccatctagggcgacaagcgatgcacggtttcaaggtcaaccgggccacgcccgtgggaaggggaatggggccacgaatttcttttcaaatggaaaatcttgaggaaccgccttgaaagggggaacctttcctgggaggggcccccttccagggaagccaaaattggggccagggaaaggcgcccccttctccatttagggcccaaaaaaggnnnnnnnnnnnnn

SEQ ID NO: 7228 - DNA, 643 bp, Zea mays
  misc_feature (357)..(357): n is a, c, g, or t
  misc_feature (641)..(643): n is a, c, g, or t
  Probeset Number=SeqID_21631
actcttcctcaacccgccgccagtcccaaatacgcaaacggcaaatcagccgccgccccctcccgacctgcaggctgcacgcagcggctgcagcagctcccatctccggctccggtgaccggcgtcccccctcctcgcccagggccagagccgccccttctcgacctgcaggctgcaagcagcggagccagggccagagccgcgacccccggtgaccggcgccccgcgcccccagtcccccacggctgacggccccactgccacctgccaggcgctcccgccgcctccctttcccggctcatccaccgttaaccggcgtccggcggtccgccgggacctggacgtgccgcgtgcggncccaacgccctaagcccccaatccaggaatcagcgaccagccgaccacagcagccagcagagaagggaagacgaagaaccaaagaagtgaagaacagatcgagaaactgataaaaagaaaggtagatagatggggaagcgcaagcccatgccttccgcccgcgctcgaggaccgaagaaccgcccaaagaggcaaagtctgggaagcagggagctgagctacgggaacaaaatctccactgccggaacatgaatacgaattatagactggatcgggaggagggnnn

SEQ ID NO: 7229 - DNA, 643 bp, Zea mays
  misc_feature (1)..(3): n is a, c, g, or t
  misc_feature (287)..(287): n is a, c, g, or t
  Peptide Sequence Number=SeqID_13612
  Probeset Number=SeqID_21632
nnnccctcctcccgatccagtctataattcgtattcatgttccggcagtggagattttgttcccgtagctcagctccctgcttcccagactttgcctctttgggcggttcttcggtcctcgagcgcgggcggaaggcatgggcttgcgcttccccatctatctacctttctttttatcagtttctcgatctgttcttcacttctttggttcttcgtcttcccttctctgctggctgctgtggtcggctggtcgctgattcctggattgggggcttagggcgttgggnccgcacgcggcacgtccaggtcccggcggaccgccggacgccggttaacggtggatgagccgggaaagggaggcggcgggagcgcctggcaggtggcagtggggccgtcagccgtgggggactgggggcgcggggcgccggtcaccgggggtcgcggctctggccctggctccgctgcttgcagcctgcaggtcgagaaggggcggctctggccctgggcgaggaggggggacgccggtcaccggagccggagatgggagctgctgcagccgctgcgtgcagcctgcaggtcgggagggggcggcggctgatttgccgtttgcgtatttgggactggcggcgggttgaggaagagt

SEQ ID NO: 7230 - DNA, 736 bp, Zea mays
  misc_feature (4)..(6): n is a, c, g, or t
  misc_feature (123)..(124): n is a, c, g, or t
  misc_feature (127)..(128): n is a, c, g, or t
  misc_feature (131)..(133): n is a, c, g, or t
  misc_feature (135)..(137): n is a, c, g, or t
  misc_feature (256)..(256): n is a, c, g, or t
  misc_feature (258)..(258): n is a, c, g, or t
  misc_feature (324)..(324): n is a, c, g, or t
  misc_feature (382)..(382): n is a, c, g, or t
  misc_feature (434)..(434): n is a, c, g, or t
  misc_feature (444)..(444): n is a, c, g, or t
  misc_feature (461)..(461): n is a, c, g, or t
  misc_feature (465)..(465): n is a, c, g, or t
  misc_feature (472)..(472): n is a, c, g, or t
  misc_feature (481)..(481): n is a, c, g, or t
  misc_feature (485)..(485): n is a, c, g, or t
  misc_feature (506)..(506): n is a, c, g, or t
  misc_feature (509)..(509): n is a, c, g, or t
  misc_feature (516)..(516): n is a, c, g, or t
  misc_feature (524)..(524): n is a, c, g, or t
  misc_feature (546)..(546): n is a, c, g, or t
  misc_feature (563)..(563): n is a, c, g, or t
  misc_feature (571)..(571): n is a, c, g, or t
  misc_feature (579)..(579): n is a, c, g, or t
  misc_feature (581)..(581): n is a, c, g, or t
  misc_feature (584)..(584): n is a, c, g, or t
  misc_feature (601)..(736): n is a, c, g, or t
  Probeset Number=SeqID_21633
agcnnngacgtcgcatgcacgcgtacgtaagctcggaattcggctcgagggaagagagaggaggctgaaaggaaagctaaacttgatgccatcgctgaaaagcagcgattgagagagataganntgnnggnnnannnaaaggcaacaagggagaagctcttaaagggatccgaggctgtgcgcgctccagattctgcacctgttgcacagccacctcgagagtcagcagcagcgcctgcagctgctgcggcggcgntntttcttcttttccttttgcagctatattgaccatatcttcgatcatgagtaggcctccaaaggagncctttcatgtgcttcccaagaagtgggagatttggactaccttttggaacatgagttnctaccacgggatcatgcaatcaaaagtgcagctactgatcttttgaagattnctaagattgnagggaagctttcatcancttnttctgtncctgagganaagntatctcaggacatttcagcantgnagaagcngacaacantgagagtgctgcaacaggcctnttgtatttttaaatccntaaagatngatatgcncnaangactgagtccattcttnnnnnnnnnnnnnnnnnnnnnnnnnnnnnnnnnnnnnnnnnnnnnnnnnnnnnnnnnnnnnnnnnnnnnnnnnnnnnnnnnnnnnnnnnnnnnnnnnnnnnnnnnnnnnnnnnnnnnnnnnnnnnnnnnnnnnnnn

SEQ ID NO: 7231 - DNA, 591 bp, Zea mays
  misc_feature (578)..(578): n is a, c, g, or t
  Peptide Sequence Number=SeqID_13613
  Probeset Number=SeqID_21634
atcaaacaacaccctccaagtgctctctcagatagggatctcaacgcagcagcagcacaaaccctaatttcgagaaagaggagattcgatttctaaaaaaatggcgtacgcttctcgtttcctctccagatctaagcagctacgagggagtttagtcattttgcagcagcaccatgctattcccgtccgcgcttttgccaaggaagctgctcgtcctacttttaaaggagatgagatgttgaagggtgtctttacggagatcaagaacaactttctggctgcagtggatattctccgtaaggagaagatcacccttgatcctgaagaccctgctgcggtcaaacagtatgctaatgtcatgaagaccatcaggcagaaggcagacatgttctccgaatctcagcgcatcacatatgatattgagaacgagactaaggagatcccagatgctcgtgcttccctcttggaagttgaaggatatccgcacccaggagggggcttactggatgagcttggggctgaggggccatgaatggttcgaggctttttgggagaaaaggttgaaaagggatataaangaagccctctctt

SEQ ID NO: 7232 - DNA, 677 bp, Zea mays
  misc_feature (579)..(581): n is a, c, g, or t
  misc_feature (674)..(677): n is a, c, g, or t
  Peptide Sequence Number=SeqID_13614
  Probeset Number=SeqID_21635
cgctagactcggcgggatggcgccaagcaagaacaaaaagatgcagctcgcacacgccaaaaagaaaggataagcagacagcggcgctttgctgtccacttgcagtcttgcaggacgccatggcggtgatgttcctggacgcttcatcttttgttattctagacatttttcttgcatcgattgatggcgtgtcttgtccacatctagcactatgagtccacaacaattctctgcaggcatcggcatcggggctgctggtcgttgggccgcgcccgcgcgacacgctgtagcagcgcgctgctagggccgcgccaccgagggaggccgcgcgcctataccgcgccatggccgcctgccagcgagcagaggctgcgcgcccacgccgccagggggccgcgccctgcgctgccatggtcgtgccgcgcccgagccgttgaggccgggggccgccgcgccacggggaggtgcgctgggacgggagccgctggggccgggggccgcgccaggcccgcgcgcccgcgtcgcgcgtcgcgcacccgcgccgaggccgcccgcctggccgaggctgcatgtcgtctnnncgcgagccgtgctcgagccgccagtgccccgctacccgcacgcgccgttgaggccgcgcctatcgtagccggccagggctgagtgccgttggnnnn

SEQ ID NO: 7233 - DNA, 629 bp, Zea mays
  misc_feature (116)..(116): n is a, c, g, or t
  Probeset Number=SeqID_21636
cccaccgaaaaacccccggccgcaatatcagccctctgattctttcacgggcggagaagatcgctcgccgttgtcggtcgcgcgtagacccgcgaagtattgggcgattgtggccnccgcacttgcctccccaagagatagcaattagacatgtcggcgtgtttggtcaaccattcttctttcctcgctgctgtctcggataaactccaaggccttccgccgcgtcgtcatacgccgccgggagacggtgctccggcgcgaggcggtattcgacagaggccaccacggcgggggacggcggcggaccaggcggcgcagaagtcgtggaacatagtggaggcggcgctggttacgatgaagccgctgccgtggaagaaaacgatgagaggtagcttctcagggtttggggatagtgctattcgggggaggaataagcggagctatgtgttgttttgttggttgatggtgatgtctttggtgagaactgggagagtggggtcggaagagggtgcggtgctgggaatatggcgcaagcgatttagggttccgttagggttgagaactatgttgatgtggcgaaagggatcaatgggttgtttagacatggtggaatgcaactttgaggtttt

SEQ ID NO: 7234 - DNA, 646 bp, Zea mays
  misc_feature (602)..(602): n is a, c, g, or t
  Peptide Sequence Number=SeqID_13615
  Probeset Number=SeqID_21637
atccattacatcgaaagagcacagaagaacaacaatggcgattctctgttcgtcttcggcagttatactcccttcttcttcttcggtgaaaacctccggatgtaacagaaggtcttcgttcttaggcttctctctaaatgctatctcaaagccgccggttcgagtcgccactaacgcgaacacgaagaggggagtgcaggtgaagtgcgaagccgagcagacaactactacttccctcgttcctgcaaaccaacggtggatgttcgacgaagaggaagcaaatggccctgacatctggaacacaacatggtacccaaaggcttcagaccatgtgaacacggacaagccctggtatgtggtcgatgcaaccgacaagattctgggaaggttagcatcaaccattgctaatcacatccgtgggaagaaccttgcctcctacactcccagtgtcgacatgggagcctttgtcattgtggtgaatgctgagaaagtggctgtgtctggaaagaaaggaaccaaaagctgtacaggaggcattcaggacgacctggccgcatgacagtggaaacctttgatcagttgcagcagagaatccctgagangatcattgagcatgctgttcgtggaatggctccaaagggacgct

SEQ ID NO: 7235 - DNA, 644 bp, Zea mays
  misc_feature (615)..(615): n is a, c, g, or t
  Peptide Sequence Number=SeqID_13616
  Probeset Number=SeqID_21638
attaaaaaagaaaatcgtatctctctctctctctctctctacgcttacgccggcatactctccgggcatctcttctccgtcgctcagatccgtcaagtgaaacatgttatttgcagcagaaggtggaggcttcttctcttcatcagcttctgggtacatcaacggtttagcccttcttctactaggccacaaggatgaacccaaacctgtaatagtatccccgtggagacattatcatttggtagtcgaagaaaccgataccaagtttcaattagattcctctaagaaatggctctcacgtgcctgcacttcccttacatgctttggtcgcaaatctgatagacccgaaaatccttctcaaccacaagatttcccttctgacaagagggatgatgcccaacagagtgtggactatgaatgtagtaataggtttgcacttaagagcagcctgaagaaaagatcatttagcgatgctcttcttgctgatgaagaggatgatgatgtgagtagagataatggtgcgttgaatcatgctgacagaagggaagtccagtggcctgacacttgtggtattgagattgctgaggtcagagagtttgagcctagtgaagtggnatgagttggatgatgagttgcatcatgaa

SEQ ID NO: 7236 - DNA, 546 bp, Zea mays
  misc_feature (533)..(533): n is a, c, g, or t
  misc_feature (546)..(546): n is a, c, g, or t
  Peptide Sequence Number=SeqID_13617
  Probeset Number=SeqID_21639
gacctgagattcacgacacacaacaaatcatcatgtggagaagaatacgtatcctctcatctcaaagccctagccgccgatgtcgccgctgcttctcctcgtcgttcgatagccaccaccaccaccgcgagacccgtccacttccatcgcgctgacaatcccgcttcttcttcttccgtcacccctcgctgtttcagctccgaatcagtagagacgatagcgaagaagaaggtggaggatgttatgcccattgcaactgggcacgagaaggaggagcttgaagctgaacttgaggggaggaggctgcttgacattgacttccccgaaggtccttttggaactaaggaagctcctgctatagtaaagtcctactatgacaagagaattgtgggatgccctggtggtgaaggcgaggatgaacacgacgttgtgtgggtctggctggagaaaggaaagtcttttgaatgccccggttgcacacagtactttgagctagaagtggttggcccaggtgggcctcctgatgggcacgntgatgaagacgan

SEQ ID NO: 7237 - DNA, 612 bp, Zea mays
  misc_feature (1)..(1): n is a, c, g, or t
  Peptide Sequence Number=SeqID_13618
  Probeset Number=SeqID_21640
nattggcgtgccgacctgatgctggtttgctcctttttggttatccagaggcatgtacttaaccatgatggcccggatctttgaatccatgtaactccgcagcctgtatttggacccagcgtatgctccaaccccggcaaaaacaagtccaaaaaaaataacccagaggaagctccagccaacagtaggccggccaagatgaaaccggcggccgctgcctcggcgccgtcgagggggggacggaaggggcgcgcgaagcgagcgaggaaggtggccccggcggccgcgcagccccagccccagccagcccgcgccgccgctttccggtgccggcaagaaggtcaacaaggccagcgcctgattagcggcggccgtcctggtccccccgcgcgcgcctccgtgtattatactagccggtagtagcagtaggagttgcaagtactagcagcgtggtagtcgtgatgatgttgtgtggtcgtcgtctccgccgggccgatcgaccgggcgctctgttccgccgtgtggcagagttttgtaaataactagtctggtgtgatgcgctcatggcaataaagcgcgcgcttctagctaaaaaaaaaaaaaaaaaaaaaa

SEQ ID NO: 7238 - DNA, 258 bp, Zea mays
  Peptide Sequence Number=SeqID_13619
  Probeset Number=SeqID_21641
gtactatgcagctggctatggacagtgattttgaagggaataacgttgaactttacactcgtatatcaatctagctatgattacaacaaacaatagcctctggagcaacaaaatatctagactgccaatccgcatatgcaacatcaaaagtaaagacctttatatgtgtatctatatatcaccgtccgtgcttgccatgcctatggtctcatcaagaacaaccggcttcagaggaattgaagatgaccgttcatagta

SEQ ID NO: 7239 - DNA, 258 bp, Zea mays
  Probeset Number=SeqID_21642
tactatgaacggtcatcttcaattcctctgaagccggttgttcttgatgagaccataggcatggcaagcacggacggtgatatatagatacacatataaaggtctttacttttgatgttgcatatgcggattggcagtctagatattttgttgctccagaggctattgtttgttgtaatcatagctagattgatatacgagtgtaaagttcaacgttattcccttcaaaatcactgtccatagccagctgcatagtac

SEQ ID NO: 7240 - DNA, 485 bp, Zea mays
  misc_feature (4)..(4): n is a, c, g, or t
  Peptide Sequence Number=SeqID_13620
  Probeset Number=SeqID_21643
cttncaaactccgtgacggcgtaagctacaagaacaagaggctctttcatatcctttacttgccctaaaccatgtcgaggagaaagacgagagagcctaaagaggagacagtgacacttggaccagctgttcgtgatggagagcaagtcttcggtgttgtccacatcttcgcttcattcaacgacactttcatccacgttactgatttgtctggacgtgaaacccttgtccgtatcaccggtggaatgaaggtgaaagctgacagggacgagtcgtctccatacgcagctatgcttgctgcacaagacgttgctcagagatgcaaggagcttggaatcactgctatgcacgtgaagctccgtgccactggtggaaacaagaccaagacacctggtcctggtgctcagtctgctctcagagctcttgcccgttctggcatgaaaattggccgcattgaggatgttactccaatcccaactgacagt

SEQ ID NO: 7241 - DNA, 869 bp, Zea mays
  misc_feature (1)..(76): n is a, c, g, or t
  misc_feature (679)..(683): n is a, c, g, or t
  misc_feature (687)..(693): n is a, c, g, or t
  misc_feature (696)..(702): n is a, c, g, or t
  misc_feature (707)..(708): n is a, c, g, or t
  misc_feature (711)..(712): n is a, c, g, or t
  misc_feature (720)..(724): n is a, c, g, or t
  misc_feature (734)..(740): n is a, c, g, or t
  misc_feature (755)..(757): n is a, c, g, or t
  misc_feature (762)..(764): n is a, c, g, or t
  misc_feature (775)..(777): n is a, c, g, or t
  misc_feature (869)..(869): n is a, c, g, or t
  Peptide Sequence Number=SeqID_13621
  Probeset Number=SeqID_21644
nnnnnnnnnnnnnnnnnnnnnnnnnnnnnnnnnnnnnnnnnnnnnnnnnnnnnnnnnnnnnnnnnnnnnnnnnnnncaggaacatggcgcgtttttggtgtacttgctgtttcgcgtgcttttggtgacaaactcttaaagcaatatgtgttggtggatccggagatacgagaggaagttgttgatgacacactcgagtttcttatccttgcaagtgatcccctgtgggatgtggtttttaacgaggaagctgtgggatgactggatccattaaggacccagaagaggctgcaatgatgctcttccttaaggcgcacaagagggagagcaaagacaacataactagcgtcgtcgtaaggttcttgcatgggcaaggtagcaggggatacgctccctgcgtgcatgggcaagttattttacgcagtgttgtactctgatgtacatgcgaaattttttttccccgtgttaaatggagaaacgtaactacgtaaggtaggaaacttgtattatgatgggttaatgtgggaaatgcgtgtaccgtaaggtatatatatatactttagtgtggtggcggacgatgggaaggtctgaagctagtgttgtattgttgtgggaaaaaagataattgcgctttaaaaaaaaaaaaaaaaaaaaaaaaaaaagggctcgagggggggcnnnnnatannnnnnntannnnnnncccgnnccnngtttgggnnnnnaaaaagtgtnnnnnnnttgtgggaaaaaaannnattgnnntttaggttttnnntaaaaaaaaaaaaaaaaaaaaaaaaaaaaaaaaaaaaaaaaaaaaaaaaaaaaaaaaaaaaaaaaaaagaaaaaaaaaaaaaaaaagcggcn

SEQ ID NO: 7242 - DNA, 628 bp, Zea mays
  misc_feature (1)..(2): n is a, c, g, or t
  misc_feature (7)..(7): n is a, c, g, or t
  misc_feature (16)..(38): n is a, c, g, or t
  misc_feature (44)..(47): n is a, c, g, or t
  misc_feature (260)..(260): n is a, c, g, or t
  misc_feature (305)..(305): n is a, c, g, or t
  misc_feature (338)..(338): n is a, c, g, or t
  misc_feature (344)..(344): n is a, c, g, or t
  misc_feature (355)..(356): n is a, c, g, or t
  misc_feature (360)..(360): n is a, c, g, or t
  misc_feature (365)..(365): n is a, c, g, or t
  misc_feature (370)..(370): n is a, c, g, or t
  misc_feature (375)..(375): n is a, c, g, or t
  misc_feature (379)..(379): n is a, c, g, or t
  misc_feature (387)..(387): n is a, c, g, or t
  misc_feature (390)..(390): n is a, c, g, or t
  misc_feature (399)..(399): n is a, c, g, or t
  misc_feature (410)..(410): n is a, c, g, or t
  misc_feature (414)..(414): n is a, c, g, or t
  misc_feature (418)..(418): n is a, c, g, or t
  misc_feature (420)..(420): n is a, c, g, or t
  misc_feature (425)..(425): n is a, c, g, or t
  misc_feature (427)..(427): n is a, c, g, or t
  misc_feature (429)..(430): n is a, c, g, or t
  misc_feature (435)..(435): n is a, c, g, or t
  misc_feature (437)..(437): n is a, c, g, or t
  misc_feature (441)..(442): n is a, c, g, or t
  misc_feature (444)..(447): n is a, c, g, or t
  misc_feature (449)..(452): n is a, c, g, or t
  misc_feature (459)..(459): n is a, c, g, or t
  misc_feature (463)..(463): n is a, c, g, or t
  misc_feature (474)..(475): n is a, c, g, or t
  misc_feature (477)..(477): n is a, c, g, or t
  misc_feature (479)..(479): n is a, c, g, or t
  misc_feature (484)..(484): n is a, c, g, or t
  misc_feature (489)..(489): n is a, c, g, or t
  misc_feature (492)..(492): n is a, c, g, or t
  misc_feature (497)..(497): n is a, c, g, or t
  misc_feature (499)..(499): n is a, c, g, or t
  misc_feature (502)..(503): n is a, c, g, or t
  misc_feature (505)..(507): n is a, c, g, or t
  misc_feature (514)..(514): n is a, c, g, or t
  misc_feature (517)..(517): n is a, c, g, or t
  misc_feature (520)..(521): n is a, c, g, or t
  misc_feature (523)..(525): n is a, c, g, or t
  misc_feature (527)..(528): n is a, c, g, or t
  misc_feature (530)..(530): n is a, c, g, or t
  misc_feature (533)..(533): n is a, c, g, or t
  misc_feature (535)..(535): n is a, c, g, or t
  misc_feature (538)..(538): n is a, c, g, or t
  misc_feature (541)..(541): n is a, c, g, or t
  misc_feature (543)..(543): n is a, c, g, or t
  misc_feature (545)..(545): n is a, c, g, or t
  misc_feature (551)..(551): n is a, c, g, or t
  misc_feature (553)..(554): n is a, c, g, or t
  misc_feature (557)..(558): n is a, c, g, or t
  misc_feature (560)..(560): n is a, c, g, or t
  misc_feature (563)..(564): n is a, c, g, or t
  misc_feature (569)..(569): n is a, c, g, or t
  misc_feature (576)..(576): n is a, c, g, or t
  misc_feature (578)..(578): n is a, c, g, or t
  misc_feature (580)..(580): n is a, c, g, or t
  misc_feature (583)..(583): n is a, c, g, or t
  misc_feature (589)..(590): n is a, c, g, or t
  misc_feature (594)..(594): n is a, c, g, or t
  misc_feature (596)..(596): n is a, c, g, or t
  misc_feature (598)..(598): n is a, c, g, or t
  misc_feature (601)..(628): n is a, c, g, or t
  Peptide Sequence Number=SeqID_13622
  Probeset Number=SeqID_21645
nnaacanccgatccgnnnnnnnnnnnnnnnnnnnnnnngggccnnnnccccggcgtttacgccgtgctgatggtaatcgagatcgcacgcgtccccccccccgccctgtgtcgatggtagtcgccgtcacaagatccgcgtccagcgacgcgtgctcggtggtcgtcggcctcgccacaagcgtctactgcaccaggaagagcttgaagaccgaggcggcattcaagggtcttgaggtggcgatcaagtgcaagaacagnaaaggcgagtaccagagcaaggccatgggcaagcttgatggcttnagcgccttcagcatcccacttagcacggacctncactgngctgactgcgnngganaggtncacanctctncggngaacccgngcncgtttatangaacctttcanaatngccncncagtntntnntaggncnactnnannnncnnnncctttgnacanacagtactttnntntngttangattnttngattntnganntnnntgttttncgnttnncnnntnnantcngnccnttnantncccgcngnnggnncnatnntttcnggttttncngngtnaatcgnncccncncngcnnnnnnnnnnnnnnnnnnnnnnnnnnnn

SEQ ID NO: 7243 - DNA, 464 bp, Zea mays
  Peptide Sequence Number=SeqID_13623
  Probeset Number=SeqID_21646
acaataaagagtaagtaataatattacagactagagtcatttacataatataaatcaaagtacgcagaatcgaaacgtagccaacgtaaacaaccccccacagacagctgactgggggagatcgctagcctaatcctcgaactcatcaacgtcctggaactcctggagatccacctcgacgccttcttctttacctgagcatagattgcaccaaaggcaaccttcaccaaacagatgctcagggtcttcaaccttatagaactcaaagagccagatcacttggtcgccaacccttgatcttcgatccctcgaagctcggaaacggatcgcaaactgcgggaaccgtggtcaagggctgcccgccggaagaactgaaaccgccattgacgtgggcaggaaaaaggggatcgcagattcgtagtgcagatagagggaggagtggaggagatgacgcatggggcccc

SEQ ID NO: 7244 - DNA, 464 bp, Zea mays
  Probeset Number=SeqID_21647
ggggccccatgcgtcatctcctccactcctccctctatctgcactacgaatctgcgatcccctttttcctgcccacgtcaatggcggtttcagttcttccggcgggcagcccttgaccacggttcccgcagtttgcgatccgtttccgagcttcgagggatcgaagatcaagggttggcgaccaagtgatctggctctttgagttctataaggttgaagaccctgagcatctgtttggtgaaggttgcctttggtgcaatctatgctcaggtaaagaagaaggcgtcgaggtggatctccaggagttccaggacgttgatgagttcgaggattaggctagcgatctcccccagtcagctgtctgtggggggttgtttacgttggctacgtttcgattctgcgtactttgatttatattatgtaaatgactctagtctgtaatattattacttactctttattgt

SEQ ID NO: 7245 - DNA, 564 bp, Zea mays
  misc_feature (561)..(564): n is a, c, g, or t
  Peptide Sequence Number=SeqID_13624
  Probeset Number=SeqID_21648
ggcttcttccgctaccagacgtgccgacggcttcggcatctgaccgccctcccaaagcaactcccccacggtcctcgccgctgctgcccagccaccggtgaagcacgccgcctagcccgtctgcccctgcgcctagcgtctcagctcctccttcatccttggtgcgtggtcatggaggccgccggcctcggcatccgatccccggtgtggcgtggccagccagcacggcccaccagcgcagtcttcctccggcgagccttcccctccgactgcgatccgttttcgagcttcgaggaatcgacgatcaagcatggcgaccaagtgatcgaactcttcgagttctacgagatcgaagaccctgagcatctggttgggggagaccaggggtcctctgacctattatgtcccatttaatttataattcatcaacccgcataccatgatcaacttaaggattgaatagaattctgttttcctgtccttgtttaccctttgggaattggttactatgattagtattatgctactgctttactttaatcaatgaacatgatgtgaacnnnn

SEQ ID NO: 7246 - DNA, 532 bp, Zea mays
  misc_feature (517)..(532): n is a, c, g, or t
  Probeset Number=SeqID_21649
cacgaggatccccttcagttaccagcctccccctttctcaatcgcagccaatcttcctttcctctctccctccgctatacccggcaaccagatcgaccaaaaccgccgtcggcaatcaccgtccctgaagcacatagtgacgtcctccgaagccccctggtgcccgttcctgaagcgatgcgcgcgatcgacgattgctcagatatcgggccgttcgtggagtctgagggaattgcaggagaagaccctgagcagcagcagcttggtgaaggttgcctttgatgcaatctgtgcttaggtaaagaaagagaagaaggtgtcgaggtggatctctaggagttccagggcgtcgatgagttcgaggattaggctagcgacctcccccagtcagctgcctgtggtgggttgtttacgttggctacgttttgattctgtgtactttgatttatattatgtaaatggctctagtctgtaatattattacttactatttattgtaattcgaagcattgtgctnnnnnnnnnnnnnnnn

SEQ ID NO: 7247 - DNA, 631 bp, Zea mays
  misc_feature (602)..(631): n is a, c, g, or t
  Peptide Sequence Number=SeqID_13625
  Probeset Number=SeqID_21650
aacagcaaagcccaggctgcccagcacacgcgacgcgaaccagctgccgaggaaccctagcggagcactgtgcaggcgaccgcggcgcgctatcacttacggggggatacggcggcatcgtccccctcggcccctcctccctccctggtgcggcggcgccagcctgcaggtgttgaatgctgatttgttgtggctgattaatggggttgatcgtcgattaatcgtgattaggccgctgatcgcccttctggcgatcagaaacgataagggcatctggaaacatgggcccgccaacccccagagcgactcccgcgagccgggaccaccatagccccaatcaccccccagaagctttcccggagctgcctcctccacggagggtccaggtgacccctatcccctgggaaagggggaatctccggcaaagaggggcggggggggttgcccccccccccccggggggatccgggggttgcccaaaagggggcccccccccccccccccccggagaaggggccccttgggggggcggggggggaaagcggcaccagaggtttttgggagatggcccccccccccggggggggggggtctcagggccnnnnnnnnnnnnnnnnnnnnnnnnnnnnnn

SEQ ID NO: 7248 - DNA, 631 bp, Zea mays
  misc_feature (1)..(30): n is a, c, g, or t
  Probeset Number=SeqID_21651
nnnnnnnnnnnnnnnnnnnnnnnnnnnnnnggccctgagaccccccccccccgggggggggggccatctcccaaaaacctctggtgccgctttccccccccgcccccccaaggggccccttctccgggggggggggggggggggcccccttttgggcaacccccggatccccccgggggggggggggcaaccccccccgcccctctttgccggagattccccctttcccaggggataggggtcacctggaccctccgtggaggaggcagctccgggaaagcttctggggggtgattggggctatggtggtcccggctcgcgggagtcgctctgggggttggcgggcccatgtttccagatgcccttatcgtttctgatcgccagaagggcgatcagcggcctaatcacgattaatcgacgatcaaccccattaatcagccacaacaaatcagcattcaacacctgcaggctggcgccgccgcaccagggagggaggaggggccgagggggacgatgccgccgtatccccccgtaagtgatagcgcgccgcggtcgcctgcacagtgctccgctagggttcctcggcagctggttcgcgtcgcgtgtgctgggcagcctgggctttgctgtt

SEQ ID NO: 7249 - DNA, 655 bp, Zea mays
  misc_feature (18)..(18): n is a, c, g, or t
  misc_feature (32)..(32): n is a, c, g, or t
  misc_feature (443)..(445): n is a, c, g, or t
  misc_feature (552)..(555): n is a, c, g, or t
  misc_feature (558)..(558): n is a, c, g, or t
  misc_feature (562)..(564): n is a, c, g, or t
  misc_feature (572)..(580): n is a, c, g, or t
  misc_feature (584)..(593): n is a, c, g, or t
  misc_feature (601)..(655): n is a, c, g, or t
  Peptide Sequence Number=SeqID_13626
  Probeset Number=SeqID_21652
ttttttttttttttttangaagaaaagatganagaaatgttattcaattcacgcaaagtagtacttcagtacaaatcacaaggtggaaaagtccacgcggtggcgagaggtgtcgtccgcatgccaccttaaataaattcttcttagtgactaggctatgctgaagactcaacattaatcagggtgattgcctctcttcgcctccgcggagatgctcttctccagagtcatctgtcgtggatgaaattatgcagctgcagctccacgtacgaagatcgtttcttttaggaacaacacggcgatctccacgcgcgaagatcattcatcttggcagctacttcttgccggcacttatcttgcacgacgacgatggcgacttgtatgagcgcgcgtaggcgtaggcgtccgggttgaggaacagctcctcgaactgcctgtgcagnnnctccaggctttcgctctacgccgtcttcgtgtgcaggtgtgtgattcatggccttcaggatgtctccgagtatttcgcctggaccctcatcatcgtcatcgctgtcnnnngcnccannnccgtagannnnnnnnnttgnnnnnnnnnnagagaacnnnnnnnnnnnnnnnnnnnnnnnnnnnnnnnnnnnnnnnnnnnnnnnnnnnnnnn

SEQ ID NO: 7250 - DNA, 655 bp, Zea mays
  misc_feature (1)..(55): n is a, c, g, or t
  misc_feature (63)..(72): n is a, c, g, or t
  misc_feature (76)..(84): n is a, c, g, or t
  misc_feature (92)..(94): n is a, c, g, or t
  misc_feature (98)..(98): n is a, c, g, or t
  misc_feature (101)..(104): n is a, c, g, or t
  misc_feature (211)..(213): n is a, c, g, or t
  misc_feature (624)..(624): n is a, c, g, or t
  misc_feature (638)..(638): n is a, c, g, or t
  Probeset Number=SeqID_21653
nnnnnnnnnnnnnnnnnnnnnnnnnnnnnnnnnnnnnnnnnnnnnnnnnnnnnnngttctctnnnnnnnnnncaannnnnnnnntctacggnnntggngcnnnngacagcgatgacgatgatgagggtccaggcgaaatactcggagacatcctgaaggccatgaatcacacacctgcacacgaagacggcgtagagcgaaagcctggagnnnctgcacaggcagttcgaggagctgttcctcaacccggacgcctacgcctacgcgcgctcatacaagtcgccatcgtcgtcgtgcaagataagtgccggcaagaagtagctgccaagatgaatgatcttcgcgcgtggagatcgccgtgttgttcctaaaagaaacgatcttcgtacgtggagctgcagctgcataatttcatccacgacagatgactctggagaagagcatctccgcggaggcgaagagaggcaatcaccctgattaatgttgagtcttcagcatagcctagtcactaagaagaatttatttaaggtggcatgcggacgacacctctcgccaccgcgtggacttttccaccttgtgatttgtactgaagtactactttgcgtgaattgaataacatttctntcatcttttcttcntaaaaaaaaaaaaaaaa

SEQ ID NO: 7251 - DNA, 562 bp, Zea mays
  misc_feature (106)..(106): n is a, c, g, or t
  misc_feature (147)..(149): n is a, c, g, or t
  misc_feature (254)..(256): n is a, c, g, or t
  misc_feature (289)..(291): n is a, c, g, or t
  misc_feature (332)..(332): n is a, c, g, or t
  misc_feature (334)..(334): n is a, c, g, or t
  misc_feature (353)..(353): n is a, c, g, or t
  misc_feature (355)..(357): n is a, c, g, or t
  misc_feature (370)..(371): n is a, c, g, or t
  misc_feature (388)..(388): n is a, c, g, or t
  misc_feature (395)..(398): n is a, c, g, or t
  misc_feature (404)..(406): n is a, c, g, or t
  misc_feature (420)..(420): n is a, c, g, or t
  misc_feature (422)..(422): n is a, c, g, or t
  misc_feature (430)..(443): n is a, c, g, or t
  misc_feature (451)..(455): n is a, c, g, or t
  misc_feature (459)..(463): n is a, c, g, or t
  misc_feature (472)..(475): n is a, c, g, or t
  misc_feature (477)..(477): n is a, c, g, or t
  misc_feature (479)..(479): n is a, c, g, or t
  misc_feature (481)..(488): n is a, c, g, or t
  misc_feature (491)..(494): n is a, c, g, or t
  misc_feature (496)..(505): n is a, c, g, or t
  misc_feature (510)..(551): n is a, c, g, or t
  misc_feature (553)..(560): n is a, c, g, or t
  misc_feature (562)..(562): n is a, c, g, or t
  Peptide Sequence Number=SeqID_13627
  Probeset Number=SeqID_21654
ttttttttttttttttcaaaagtcctgaccacacacgacagcacgcagttgatgacagagataaagagtagcagtacatatttacatgcggaagtagatctcattntgacatgcaaacatttgcacgcaaggatcgatatggaagcnnnaccccaccagctagctgggtacaacgactatcgactacctaattaaacagcatcgttttttagtacacatgatgacgaggtcccgatctaaggaaacgagtacgnnnacccaggaccatgcatgcaccagctagctagcnnnggacgtctttgaggagcttgtacctgcggacggccgccttngncactctccggccgccctcntnnncgccgccgccggnnaccttgactttgccgcngcccatnnnngtcgcnnnaccgcggtgctgcntngccggcgnnnnnnnnnnnnnntgttcttnnnnngggnnnnntcgctgagnnnncngncnnnnnnnncgnnnncnnnnnnnnnnggggnnnnnnnnnnnnnnnnnnnnnnnnnnnnnnnnnnnnnnnnnncnnnnnnnncn

SEQ ID NO: 7252 - DNA, 562 bp, Zea mays
  misc_feature (1)..(1): n is a, c, g, or t
  misc_feature (3)..(10): n is a, c, g, or t
  misc_feature (12)..(53): n is a, c, g, or t
  misc_feature (58)..(67): n is a, c, g, or t
  misc_feature (69)..(72): n is a, c, g, or t
  misc_feature (75)..(82): n is a, c, g, or t
  misc_feature (84)..(84): n is a, c, g, or t
  misc_feature (86)..(86): n is a, c, g, or t
  misc_feature (88)..(91): n is a, c, g, or t
  misc_feature (100)..(104): n is a, c, g, or t
  misc_feature (108)..(112): n is a, c, g, or t
  misc_feature (120)..(133): n is a, c, g, or t
  misc_feature (141)..(141): n is a, c, g, or t
  misc_feature (143)..(143): n is a, c, g, or t
  misc_feature (157)..(159): n is a, c, g, or t
  misc_feature (165)..(168): n is a, c, g, or t
  misc_feature (175)..(175): n is a, c, g, or t
  misc_feature (192)..(193): n is a, c, g, or t
  misc_feature (206)..(208): n is a, c, g, or t
  misc_feature (210)..(210): n is a, c, g, or t
  misc_feature (229)..(229): n is a, c, g, or t
  misc_feature (231)..(231): n is a, c, g, or t
  misc_feature (272)..(274): n is a, c, g, or t
  misc_feature (307)..(309): n is a, c, g, or t
  misc_feature (414)..(416): n is a, c, g, or t
  misc_feature (457)..(457): n is a, c, g, or t
  Probeset Number=SeqID_21655
ngnnnnnnnngnnnnnnnnnnnnnnnnnnnnnnnnnnnnnnnnnnnnnnnnnnccccnnnnnnnnnngnnnncgnnnnnnnngncngnnnnctcagcgannnnncccnnnnnaagaacannnnnnnnnnnnnncgccggcnangcagcaccgcggtnnngcgacnnnnatgggcngcggcaaagtcaaggtnnccggcggcggcgnnnangagggcggccggagagtgncnaaggcggccgtccgcaggtacaagctcctcaaagacgtccnnngctagctagctggtgcatgcatggtcctgggtnnncgtactcgtttccttagatcgggacctcgtcatcatgtgtactaaaaaacgatgctgtttaattaggtagtcgatagtcgttgtacccagctagctggtggggtnnngcttccatatcgatccttgcgtgcaaatgtttgcatgtcanaatgagatctacttccgcatgtaaatatgtactgctactctttatctctgtcatcaactgcgtgctgtcgtgtgtggtcaggacttttgaaaaaaaaaaaaaaaa

SEQ ID NO: 7253 - DNA, 1023 bp, Zea mays
  misc_feature (1)..(1): n is a, c, g, or t
  misc_feature (3)..(3): n is a, c, g, or t
  misc_feature (5)..(9): n is a, c, g, or t
  misc_feature (19)..(24): n is a, c, g, or t
  misc_feature (550)..(552): n is a, c, g, or t
  misc_feature (574)..(574): n is a, c, g, or t
  misc_feature (588)..(592): n is a, c, g, or t
  misc_feature (594)..(595): n is a, c, g, or t
  misc_feature (597)..(598): n is a, c, g, or t
  misc_feature (637)..(642): n is a, c, g, or t
  misc_feature (646)..(646): n is a, c, g, or t
  misc_feature (655)..(656): n is a, c, g, or t
  misc_feature (658)..(659): n is a, c, g, or t
  misc_feature (662)..(663): n is a, c, g, or t
  misc_feature (688)..(688): n is a, c, g, or t
  misc_feature (698)..(703): n is a, c, g, or t
  misc_feature (709)..(709): n is a, c, g, or t
  misc_feature (717)..(719): n is a, c, g, or t
  misc_feature (726)..(726): n is a, c, g, or t
  misc_feature (728)..(728): n is a, c, g, or t
  misc_feature (730)..(735): n is a, c, g, or t
  misc_feature (738)..(740): n is a, c, g, or t
  misc_feature (888)..(894): n is a, c, g, or t
  misc_feature (912)..(914): n is a, c, g, or t
  misc_feature (995)..(996): n is a, c, g, or t
  misc_feature (1004)..(1007): n is a, c, g, or t
  Peptide Sequence Number=SeqID_13628
  Probeset Number=SeqID_21656
ncncnnnnnggcgattggnnnnnncgaggccggccggggaccagcccccagccgcttgccctcgaatctcaatcgctcaagcagtgcttcagtcgccggtcgccgctcgctggactgtcgctcacccgaaccgccgctcgcccagactgtcgcttgcccagagcctcggacgcagagcccagaccccggagtcccaggaccgtcgctcgcccacacgcagagcccatcagccgccgcttgctggacgcttggacagtcgcagagacggcagagcccgtcagtcgccgctcgcccggacgcttggagtcccggactgctcgctggacgcccggatgacatcttcatcgatgccgacgccgatgaacactgctgacaaggaaggtgagaactaagaagtgagatttgtttaacatgttctatgccactatatctatgtgtctgtgtgtgaattgtgatgctttgcgagagacgatactctaaacgtttgcgctatgctgtttattcactaaccgacatccaacgctttttattcactaacctacgagggatnnngacaaagatctgtcactgccanctccatcgatggtnnnnncnntnncaactgacaaccctatttcccgccgctgccccctagttnnnnnnattnctgatgtanncnnctnngagcacgtgttggtcggctgcgggnactcttgttnnnnnntctttngagttgcnnngtttttnancnnnnnnttnnncgacttgtggcacttgagtgttcatctccttggcttctagaccccgttagagcatcaccagcagctgcgggagatgctcttagcaagttccagtttatcagtgaagagtcaatcactgatgtcgtccatagctccttcaaaccttgtnnnnnnngatcggtaataactgcannncttctttctgttgatatggcgtgctggtgtggacctgtagtatggtatccactgctgtgttattgtgtatgctcttttttnnaaaaaaannnngaagttattgttgtgt

SEQ ID NO: 7254 - DNA, 425 bp, Zea mays
  Probeset Number=SeqID_21657
attcactttccaagttgtccgaaaagaccagactaccctgttcccccgaagtcagagggggagaggaggctagggatactcgagcaggcggcgagcttttcgcaaactgacccattgaggcagtatcacccgatcagctttgtcgcgaagggggtggccaggaacttcctccttgagccattgtacagtttgagggacgaattctacacggtttacttcaacgtcagggtctgagtcctgacgcttacacttggcagtagaagtaatacagaataaataatgtgcgcgacctttttcttctcatacactgtagcttagaacagccaatgaagaagcaattgggttgtttgaacttgttatgcacgcgggagtattcactttgtgtgaaaccacttgttatgcaataccaaacgagtcctggctgc

SEQ ID NO: 7255 - DNA, 485 bp, Zea mays
  misc_feature (485)..(485): n is a, c, g, or t
  Peptide Sequence Number=SeqID_13629
  Probeset Number=SeqID_21658
agacagacagacagacagacgtcaagcgagtgtcgtcagcctcctcccaatacaaaggaaggagcaaacgaccgagcaagagctacatactcgcccctccactccgtacctgcccctgcctcgatccagtccgccgcgcgcacggcacgacgtcgccgagtgtccatccccgtgcctagctcgctcgatccacttcgccgcaccaagcagcatgtgcaagctggcgatcacgacgatcccgtccatcgcgtggctgcgccgcaccgtgcggcggcggtcccgcaaccacaccacggccgcatccgcctcctgcttctcctcctgcccctcgtgtccgtgccctgctgcggttccggccgggcacgtggcggtgtgcgtggagtccggctccggctccaccaggcggttcgtggtgccgctggcgcacctcagccacccggcgttccgggagctgctgcagaaggcggaggacgagtacggattcn

SEQ ID NO: 7256 - DNA, 477 bp, Zea mays
  Peptide Sequence Number=SeqID_13630
  Probeset Number=SeqID_21659
aacagaaaatcagaaaagagtctcgttctcgttgtcttcctcacgaagacacggtccaggtgaccttctcgatcgcctcacgtcccggtcttcaccgccggcggccacggggcgtgacaattggtatcagagcctcggcgatcctcgtcgagggtgcatcagcgacgattgggtgctacgatcggaagcggaggagcggctgcgacttcgtcgattcggagcccccaaacttcgacggcgacgcggcgctactcgggaggcgagacggtggcgctgttggtggtgatttgcatttggtggcgagtggcggcggtggaagtgtgaccagattcctgtggtgatgtttgaggtggctgcccatgaggtgttcgatgtcatgcctcgttgggatgatgatacaatacgagttcagcaaatcgcattcgaggcttcaatggtgtcgacaacccccgcacatgagctgttcgacgaaaatcc

SEQ ID NO: 7257 - DNA, 519 bp, Zea mays
  Probeset Number=SeqID_21660
atttttttcccgtggagaattatataaccgattttcggagcaaaatcagggtgagaaatggcagcaaaacgaattacgaaaagtgcaattaactgggcccaattaggggaacgtgtgcccgaacatcaacgccaacaattcttagcttttaaagctaaatctgatggatacattaggcgcatgaatgcttacccggaaaacccaccgaaaatcgattggacctactacaagaaacatgtccctgttgctggaatggtagacgattttgaaaagcagtattctgctttgaatatcccttatcctccagacaccgttagcactcaaattgattcccaggcgcaggaaattaagggcgatattgaaagattcaaaacttaatcgaattctcgcattgaagaatataagaaacagttagcgcatttggccagcttgattccatatgaccaaatgacaatggaggactacagggatgcctatccagaagatgccattgatccactgaacaaaccaacttactgg

SEQ ID NO: 7258 - DNA, 510 bp, Zea mays
  misc_feature (474)..(474): n is a, c, g, or t
  Peptide Sequence Number=SeqID_13631
  Probeset Number=SeqID_21661
cctcgcggcaaacgtgcaccttttcttcttccgttccatgcggccctctctcctacccaaagcaagcccctcggccatgaagctccacaagatcaacccgtcgtctcggaagatctccgtcgccgttgccacgccggtcctcgtcctgctggcgctcgccgtcgtttcgctctacgacatcaacttcgctgatagttaccagtacatacgccgcgcctcctcttcatcctctgcgtcgtcgtcgtcgtcgtcgacgccgattccggccactaccccctcgtcttcgacgattccggacacgtcgtcgtcgtctccggtcaaatcctcctcgtcttcgacgtctccggccgccaccaccgtcgaggcctgcgaccttacgcggggccaatgggtgccggacgacgagcaggcgccgtactacacgaacctgacgtgcccgttcatcgacgacctccagaactgcatgaagttcancaagccgagcctcgagttcctgcgctggcgctggca

SEQ ID NO: 7259 - DNA, 404 bp, Zea mays
  Peptide Sequence Number=SeqID_13632
  Probeset Number=SeqID_21662
agtgaaacccgctctgccgttttctataattgcaaaaatcttccgaatccgtggcttcccttcggtggcagcgcgagtcgcgagcgtgcgcagaggctagccaagcgatgccgctcctcttccccgccacgccgccgttaccgctgtgccgtgccgcgcgcgcctcacgccgcgccacggcctccgtggcgtccgcggccaggaactcgtcgtcgtcctcggcctcgttcgacgcggccgccttcgaggccgagcggctgcgcctggacgccgcggcgcgggccgggatggagtccaccgccgcggcagcggaggccggcccgcgggcctggaagtgggcgatacggaagcgggtgtgggacgcgctcgaggctgagggcatcgcgcgggaccgcgccccgtcc

SEQ ID NO: 7260 - DNA, 515 bp, Zea mays
  Probeset Number=SeqID_21663
aaaaaaaagtcaccgtcgtttttatcttctacgggcgtcggcgcttttctctaccgcaccctgcttctctctccctgagttcctcccctacgcgcgccggctgctcttccctggccgccgcgccctcccctgctagcagccaaagctcctgtgcgctcatccctctgctcggggcgcgccctgccgtattccctgcccatggcagccgtccgaccgagctccatctccagccgcgacgcccagttccctcccatggcgctcttccttggccactgcttccccagccgcgagttccccctgctcagcacctcctcgagctcgtccatggtcgcatcttgctcggatcccatctctctgctcggatctcggccctgcctagctccctctctcctctctacatctccctatcgggcggtactcatctccctgctgcgcgcaatccttctcggctccatcccccagcgccctgctagctccctgctcgccgtgctctggagtcctccctgcaccaagcc

SEQ ID NO: 7261 - DNA, 503 bp, Zea mays
  misc_feature (478)..(478): n is a, c, g, or t
  misc_feature (490)..(490): n is a, c, g, or t
  misc_feature (492)..(492): n is a, c, g, or t
  Peptide Sequence Number=SeqID_13633
  Probeset Number=SeqID_21664
ctgctccctcccctagccgccgctagggacattttttcccctttctgcgcgcggccccaccttcctctctactctcccctgctctcacccgcgcagcacctggagcgccgccaagagccccgcaccgcgccccttcctccagccgtcagggcgcgaccgggccatctcgagccgcgccagcagaaccgacctaccccgcgcgcccaggccgccgtcgccctgcagcctgacgccccgaccgccgtgcccctgaccgaagaccccgcgacaccgagcgcgccaggcctcgccgtgtgacccgcccggccaaacgccgaccccacgcgccctgaagccgagccgccgacgccacagcaccccgcacccctgtccaagacccgaccatttctctaagttattggcgtcgtttctcctcccccattactccctccctccattgatggcgccttgaagctatggccgccgtttctcttctctncccaacgccctntncctataaaatt

SEQ ID NO: 7262 - DNA, 494 bp, Zea mays
  Probeset Number=SeqID_21665
aagttggtgttgaaactgttgctgggtatatcacggtcggtgttaatgcgatatttatttttgtttttgtttctgtagtgatatatttctgtgaacaggaagaaagttttggtgatctattttttggaatttattattttggcgccaaaaacaaaactgaaattacatattttttagtttgcatattaaagaaaaattcataataagtataaatcgtcaatatgaatttcaaatagtgatttccgacggtattctttaacaatgaccgaaaagtactaaaagaaaaagttactaaacgtacttgatcgattgatttatagtgatttttttatttggattaagtgattggttgaaaatattcttagtgaattgaattgaagtgaaatgcactgttttcatagaataatatgagctgctctgaagtgatgtaccaggcatattatccgtatttatatcaaagggccgccgccgccggagctgcaccgccagtttcg

SEQ ID NO: 7263 - DNA, 476 bp, Zea mays
  Peptide Sequence Number=SeqID_13634
  Probeset Number=SeqID_21666
aacgctagtacctcgccccaaaaccctagtccccagaggccccatcgcctaagtgtcatagtgtctggaaacgctacaacctgcagcagctcgaatttgatgtgtgctgtttctctacagggcaacaatatgaagactgcaactctccaacaacaaagggcaacaatatgaagactgcaactctccaacaacaaagaggaggggatcgataaggaagaagacgcgtagcgccgtcgtcgctcctgctcaacattaatgactggacgatcgagagggttggaagtcctccaaatttgaagtctgaagacatgctgtacacgtaagagtatgaccaagtgctcaagcaccgtaggttagttggcaacctcgctagctaagctggttcaataaagctttatattgaatccgtagagaataatgtgaaacattggacgatccagctagcatatctagatggaatgaggatctacatgtgc

SEQ ID NO: 7264 - DNA, 593 bp, Zea mays
  misc_feature (2)..(3): n is a, c, g, or t
  misc_feature (7)..(14): n is a, c, g, or t
  misc_feature (510)..(510): n is a, c, g, or t
  misc_feature (567)..(567): n is a, c, g, or t
  misc_feature (575)..(575): n is a, c, g, or t
  Probeset Number=SeqID_21667
tnnccgnnnnnnnntctctctcctggaccctattggccaacgcccagccccttccccagccgctccctcctctctccccctcagctcgcatcccctctgctcgctcgcgcttagctgagctcgcccctgcgtgctcctccctcctcccctgcgcgccacgcccagctcccacgcgcgcccctctactcgctcgcgcccagcgcgtttccatggccaagcatgccatggctccctccgagctcgcccccgacctctgctccttcctctccgtagtcccaggctgtcgcgccctactcgccctccgtgtcgcgctccctcgctgtccgtgctgtcgaagctccccgggcagtgcgctcctctgctcgccggttctccttgccccagctcggccgaccatccctgctcgcccatggaagctgcgcccccgctccctgatttctccagctcggcttcctctccattttcctcagccgcgcctacttcctctgtccatccctggctgcgtgcggngcttctccatggatgtgcccgctgcttgctgccagttttgctctgcatcagcatggnaccaccgnccttcgctgcctaacaat

SEQ ID NO: 7265 - DNA, 466 bp, Zea mays
  misc_feature (464)..(464): n is a, c, g, or t
  Peptide Sequence Number=SeqID_13635
  Probeset Number=SeqID_21668
aaatcctccgtgcgaccgtgcgtgactcggtctgctccgccggcgccatccgcctccgcgcctccgtccgccgagcgcgccgctccgcgcctccactgatccgtccgccagaccgccactgccacagtcgagcgcccgacctggccgcaagcccgcagtggcgcagtgtcgtccggcgtccgctcagcgcctcagcccgacccgccaagccacgagcaggcgagctgctccgccgtccggcgagctgctccgccgcgcctccgactctccgtccaccgatcgtcgtccactcggcccgagcggccgagccgctccgcgccctgctcgcctgctctgctcgctggctccgcgctctgctcgcccggcggggatgacggatcagatcgatccggtttaggagcacggggacaacatatatcccagattcaagtgcaagtgtagtaagaaatagtggaaggagttgngc

SEQ ID NO: 7266 - DNA, 584 bp, Zea mays
  misc_feature (520)..(520): n is a, c, g, or t
  Probeset Number=SeqID_21669
tttttagttccctgccctctctccggcctcgttttcttgcctgtttagtttcctcttgtgttctttgcacatctatagttctatacagtacttttgattttcttttaataggcatcccctgctgtatttattctaaaaaaggtgccaacaatcattgactgttccagtctgctttgcctaatttttgtgacatactccctccgtcccagtatataaggcataaccacctctggatcaaagaccaagaaatgcatttaattctctctatatcactgtatcgatgtatgtgtgcatagagagagcacgccttatattgtgggacaagaacaaaaagtggttacgccttatattctgggacggagggagtactccctctgtactatagaaagtgtaactcctcaaacaccaagaccaaggagataatttaattcatgcacattcccagtagaggcgctctgatcctccacctaatttattgcgagcttgcatgcaagcatgcagaaaccaccgtagttgttgntggccaagcatgctattttttctcgccatgcatgcatagtagtccagcagcccatgtaaattgt

SEQ ID NO: 7267 - DNA, 410 bp, Zea mays
  Peptide Sequence Number=SeqID_13636
  Probeset Number=SeqID_21670
aaactatctcgaaccctcaccgagcaccaaaagtcgccgtgcgaacagaggaaggaggttgctggggtgcggggaatgcgtgcgcatcgttcccaagcaccgaggagcagcgggattgacctgagtcgctcgtcggacctcggccaccaacggagccgcacaaacgtggaggaccgcatcattgccgcccaaattcctcggttgcctaggattcttctgtcctaatggggaatgtgtcacatgcttttgttcatggcactggcacggtggatttgaagtttactttggcgaatatcatgcagctgaggaacatgcaacatgtcccttttatgagcaagaatctcattagcggtacccttctatgtagatatgggttcaaggtagttttggagtccaataaaacagttgtc

SEQ ID NO: 7268 - DNA, 493 bp, Zea mays
  Peptide Sequence Number=SeqID_13637
  Probeset Number=SeqID_21671
aaaaaccatggtgtacaaacttgttagttcaataaagcatcctcaacctatcacccagccaatcttgatggttattaggatgctagtcttgaggtctatgttctggccggtctctgtgcttagtggaggatacgatgaggatggctgctatcatccaacgaggcataggaagtctcagggttttccttcaccggctgctgaagatatgggtcccgatactgttctctatcaatttatgacgaaagagaaggaaatattaggtgaatcaacacaaaggatcaacgattggatcaaaaaactacaaggggaacgtgagaaataccgaaccggggaaattgctgccaaagacggcacgatatatgaaaaaggacgaactaacgatcggatatacagagaatatacaaatcggatagctgtgcttcaaaaagagatttcagatcgagagaatctcatagagaatattcaggatctgaaaaagcatcaaaaactaaaa

SEQ ID NO: 7269 - DNA, 214 bp, Zea mays
  misc_feature (20)..(20): n is a, c, g, or t
  misc_feature (43)..(43): n is a, c, g, or t
  misc_feature (60)..(60): n is a, c, g, or t
  misc_feature (62)..(62): n is a, c, g, or t
  misc_feature (86)..(86): n is a, c, g, or t
  misc_feature (92)..(92): n is a, c, g, or t
  misc_feature (115)..(115): n is a, c, g, or t
  misc_feature (170)..(170): n is a, c, g, or t
  Probeset Number=SeqID_21672
atccattgaggagcggcaantacaaacagcttaagaagggagngaatgaagcgactgaanancctgaataggtggcatatcggagnttgtanggatggcgtccggacacagaggnctctcgagatcctgctccacctccccttgttagctgagggataagaacgtgccantatgtgtttgttccatcgaagcaagctcttggccgtgcttgtgg

SEQ ID NO: 7270 - DNA, 582 bp, Zea mays
  misc_feature (533)..(533): n is a, c, g, or t
  misc_feature (547)..(547): n is a, c, g, or t
  Peptide Sequence Number=SeqID_13638
  Probeset Number=SeqID_21673
tatgagatcaattttctcaatccaccaccatactatggtcaagctaatggccaaggtgattctagtaataagagttgtatcaagattatcaaaaacaagcttgaggataacctaaggaggtggcacgaggttttgtctaaagatcttgggcacgtcgtgtatctagacatggtgttattaatgttacttcttttgagttggtgtatgagcaagagtttgtgttactcgtcgaggtgaatctagatgcatataggcttgcaaaacaaaatgacttatttattgttatgtataatgacttgatgatgacaatatcaatgaggtgataggcaggagattaatggaccacaaggatatggataaagacaaagcttgagttgcccgagcatacaataataaagccaaaataatattgttccagttagagatctagtgtggaaaactatagtaccaattggtgtgaagagcaaaaaaatgaagttgggagggtccttataaagtgatgagagaaatattcaaaaacacatatatgttanaggtgttgcaaggngatagtctctccagaacgatcaccagaatgtactt

SEQ ID NO: 7271 - DNA, 467 bp, Zea mays
  misc_feature (420)..(420): n is a, c, g, or t
  Peptide Sequence Number=SeqID_13639
  Probeset Number=SeqID_21674
aggtgggggagatggttcttctgaagctgcagtcttatgcacaacactcggtggatggctcgacaagcggttcacggcgctcgactccaagtgggagccccacgccggcgctgtagagtcccaggcggtggactttgatcagcaccgcgacgaattctcatcagccctccgcgcagacgtcgaggcacatctctcggcggctgacgcggatccgttggaacggatctgctattgggaggcctctactggcacgcgtgacgctcgctatctcccagcctccaagtcgtcgagcctcggttctgttctcgagtccgacctcgcatgcccagatcagttcgtcgtcgattttgcggtcgcgctcgtggacctcaacccgctcgtccacgtcgacttcagcacagtcccagtcgcaaactccgncgaccctcgtcatcaggtggatccagtgactccgctcaccccacacc

SEQ ID NO: 7272 - DNA, 479 bp, Zea mays
  Peptide Sequence Number=SeqID_13640
  Probeset Number=SeqID_21675
aaaacctcatttcgttcaaaatgtttaaattattcgtatctctcgtattattcggaattctcagcagcggagaatcgtgctgcgcgaaaaaataccttaaagtttacgcggagccggaatgctgttctaaatcgatcccgataattttaactcatcagaaatcgtgttgtcactccccagctccgatttatatttcggccccagctccggcttgtccgcccccggcgcccatttatatttcggcccctcctgcccctaagcccgctcctatttacatctccgctcctgcccccgcatgtcctcctcctgcgcccatctacatctcagccgctcctgcaccagccccggccgcactcccgtctttaccatgcttaccagatctccaatctctttattgctgattctcgtggcaccgatgatgttttaattaggtattttatttttatatgaatttttgtaaaaattaatttttttaaaaa

SEQ ID NO: 7273 - DNA, 494 bp, Zea mays
  misc_feature (487)..(487): n is a, c, g, or t
  Probeset Number=SeqID_21676
acccgcaatccagccaccgccgcgatccgcccgcccgtgcatgccgcaaccgcgcgatccgcccgcccgccgcaaaaccgccgcgatctcgcggcccgcccgtccgccatccagccaccccgctgcgaccgctccgtgcatgcctccactgtcgcgatccgcaaaaccgctgcaaaaccgccgcgatgtgaccggcgagatccgcccgcccgccgaccagccgtgaccggcgagatccgcccgcccgcccaccgcaaaccccgcgcgcgaccgctccgcaaccgccgctcccgcccactcgtcgcgcaatcctctcctcctacccatctgctccgcaatccccgccattgttgcatcagatgcagaaggaggctatggcgccgcagcacgctccgcccgacttctcgcatggaggttgcggcggcgagaggaagcggcagtgcgaggcggaccccgtgtcccggcagctcttgtcgttgcagcagcngcaaccg

SEQ ID NO: 7274 - DNA, 442 bp, Zea mays
  Peptide Sequence Number=SeqID_13641
  Probeset Number=SeqID_21677
atcgggtagatattgccctgtttgtttgggatttttttagcttatggacaccaaaagttgctgcgaaccgttaaacacgtttttcagctcacttctataagaatcgttttagtaaaaatcgtctaaaatcaacatgaacacagaatcggtcaagtcatcgtcatagtaggagtccattgctttctagatcattaaccatttagaccacttcatcttactctgcacttaattctcacgatactcaggttctttccacgaccacgttctctccatacagtcagattctcataaatactggtaagaaaaaaactgaatcaacatagccattataaaagatcatcatgtgctacactgacacaacacgaaattaattaaaagctatcttccaagggatggacgaattatgatgagacttgggagtgacatgtgacagatcgccgag

SEQ ID NO: 7275 - DNA, 571 bp, Zea mays
  misc_feature (524)..(524): n is a, c, g, or t
  Probeset Number=SeqID_21678
acatacccccctccccccgtcccccgcgtcactctctcactctcacagctcactcactctctctctcgaacgctccgcgactcctcggctcctccgctcctggcgactcaccggcgatttggaaagcgacgcctccatcctctccctcaccgcctctccgccgcctcatctggtcctctccctctccggcgcctctgctggtaacactatcctcttggccggttgtgctctcttgctcgtgtcgcctctggatctagttggaaaccctaagtttggtgctctgatcttgaacttctgttcttcttctggtctctcttccggtctcccctctacggctccctctccctgtaacgctgcgtcggtgcgtaaccctaaccgtgctttaaccctaatcatcgtgccgtcggggttggatctggtgctccggctttggttggagccgtgaggtatcgatctggtgctccggtccggctttggttggatccgtgagggaccgatctggtgctccggctttggacctttgngaggctgcagttccttcaacggagcccatcaatatagatcctgactc

SEQ ID NO: 7276 - DNA, 492 bp, Zea mays
  misc_feature (376)..(376): n is a, c, g, or t
  misc_feature (404)..(404): n is a, c, g, or t
  misc_feature (414)..(414): n is a, c, g, or t
  misc_feature (416)..(416): n is a, c, g, or t
  misc_feature (485)..(485): n is a, c, g, or t
  Peptide Sequence Number=SeqID_13642
  Probeset Number=SeqID_21679
aaaacaaggcccccaggggtcacgcatgtacgcccaaatctcgccggcgcccggtcccagacgaagacaagcccccgccactcctctcggcacagtgcagacacaccgccgtcgccacctgccatgtctgcgcgtcgccggggtccatgcgtccatgttcgtccagctccagcggcagggtggtggtggtggtggagtggactgtggactggtatcctggcggggatcgggacggagcccgcccatggcaccggcggcccccgcgcggggtcgatccatctctaggccggcaggcatgcagttggatcccccgcctccatggccatccctcgctgccgcatggcacccgtgtgcgcccgcgtgctgtcagctgganctggtgcatgcatcccatcggccgcggntgcgcgcctnanctagtgttcatgcgacgcgaccgatggggggcgcgctggagatcgctgatgtgctgcagtgatctgaanatgcttt

SEQ ID NO: 7277 - DNA, 517 bp, Zea mays
  misc_feature (469)..(469): n is a, c, g, or t
  misc_feature (504)..(504): n is a, c, g, or t
  Probeset Number=SeqID_21680
atcgctggcgacgaagcttcagacttgttcggttcaccagtgcttcagcaatcagtgtagtagtactggcactggcagtgccctaaggtctccagtctcctcggtctcatctcatctccatgatggcttcttcttcctcctcctcctccttctcttccttcttcggcatcgagcctctcgacggaggcgacggcgacgcctaccgccgcgccatggacgcctgctccctctgcgggaagcgcctcgccggggaccgcgacatcttcatgtacagaggggacacgccgttctgcagcgaggagtgcaggcaccaccagatggccagggacgatttcggcgcggcgttgaagacggagccgcgtccggcaaggagaggggagcgacgccgccgcaggcacgaggctcctgcatccgccgccgccgccgagccggcccgtgtcccgctagcgccaaatgtgcccgccgttgngatctagtggtgcagtggttatagctgccacagancggcatccgaccg

SEQ ID NO: 7278 - DNA, 408 bp, Zea mays
  Peptide Sequence Number=SeqID_13643
  Probeset Number=SeqID_21681
aagtttccttgcgtggcctcgacataccctctgcaccgaaagccatcgcgccccatcggcgggagaggagagtgccgtggggcggaggaggcgtcacgggcatcccccacaaccaacacagctcgggtgccacggagtgatctctggcgggccggtgacggtgtagatcaaagacggaggagtgttcgtgctcgcgagaccttaggacggccggaattcctcgccgtgattaagctccgtcgcggctccaccattcctccgcgaccaacgttctgcgcgtcaagtctctctggagaagaacaggtggttcaagaggagccacacaatgaggagtttgatctgatctaggtggcatctcccagttgactttatggtgccaaggatggaccttagttcgttctatattta

SEQ ID NO: 7279 - DNA, 474 bp, Zea mays
  misc_feature (432)..(432): n is a, c, g, or t
  Probeset Number=SeqID_21682
gtaacagcactagctagctagctagaatcgaaacagaatggatgcctctactaccttcctcttcctcgcgcttgcatgcatggcggccactaatagctctccctcactgtgccaacgcaaggcatttcctccctcctagtcgtagccatggcagcagcactggcacgaggagctctagcgccgtcgacgccgccgccgccgccgccagcagcagcaagctctcgtggccactgctaccgtggaagaagcctggccgtggcggcagcagccgtggctccgggagcgggcacggtttcggctggaccgtctcgcacaacgggtcggacaccgacgtcgggttcggcggcggcgccggcgccggcacgagcagctccggaggtggctcgagcgcgggcgggggagctggtctcggcgtcggcatccacgtcggcnacgacggagtggacgtcgcgatcggcgtcgccggaggcggcg

SEQ ID NO: 7280 - DNA, 380 bp, Zea mays
  misc_feature (361)..(362): n is a, c, g, or t
  Peptide Sequence Number=SeqID_13644
  Probeset Number=SeqID_21683
ctgtcttgtccacatctagcactatgagtctacagcgattatgtaagcattcattatgttgctatcttctatggcacgattgttaatccttttgttcttcatcgttgtctcgttgttcacggacacggtctacggagcaaaacaaatctgtaactggcgctcgccacccaaagaacagcagtgcatgcacggcactagcacgtatcatgagccatggcggtgcatgcccgcgccgctgaggctgggccgctatgccgaggctgccttgctgcggctggccgcgcgctgaggctggggccgcgtgcccacgctaccagagagccgcgctctggccgcctgcgccgccgggggactcgcccgnntgcgcgtcggggcagcgc

SEQ ID NO: 7281 - DNA, 521 bp, Zea mays
  misc_feature (16)..(16): n is a, c, g, or t
  misc_feature (20)..(20): n is a, c, g, or t
  misc_feature (32)..(32): n is a, c, g, or t
  misc_feature (35)..(35): n is a, c, g, or t
  misc_feature (37)..(37): n is a, c, g, or t
  misc_feature (39)..(39): n is a, c, g, or t
  misc_feature (44)..(44): n is a, c, g, or t
  misc_feature (53)..(53): n is a, c, g, or t
  misc_feature (65)..(65): n is a, c, g, or t
  misc_feature (67)..(67): n is a, c, g, or t
  misc_feature (97)..(97): n is a, c, g, or t
  misc_feature (102)..(102): n is a, c, g, or t
  misc_feature (105)..(105): n is a, c, g, or t
  misc_feature (107)..(107): n is a, c, g, or t
  misc_feature (110)..(110): n is a, c, g, or t
  misc_feature (114)..(114): n is a, c, g, or t
  misc_feature (123)..(123): n is a, c, g, or t
  misc_feature (126)..(127): n is a, c, g, or t
  misc_feature (144)..(145): n is a, c, g, or t
  misc_feature (148)..(149): n is a, c, g, or t
  misc_feature (153)..(153): n is a, c, g, or t
  misc_feature (161)..(161): n is a, c, g, or t
  misc_feature (195)..(195): n is a, c, g, or t
  misc_feature (210)..(210): n is a, c, g, or t
  misc_feature (233)..(233): n is a, c, g, or t
  misc_feature (239)..(240): n is a, c, g, or t
  misc_feature (242)..(242): n is a, c, g, or t
  misc_feature (245)..(245): n is a, c, g, or t
  misc_feature (248)..(248): n is a, c, g, or t
  misc_feature (257)..(257): n is a, c, g, or t
  misc_feature (262)..(262): n is a, c, g, or t
  misc_feature (264)..(264): n is a, c, g, or t
  misc_feature (269)..(269): n is a, c, g, or t
  misc_feature (281)..(281): n is a, c, g, or t
  misc_feature (283)..(283): n is a, c, g, or t
  misc_feature (288)..(288): n is a, c, g, or t
  misc_feature (311)..(311): n is a, c, g, or t
  misc_feature (322)..(322): n is a, c, g, or t
  misc_feature (327)..(327): n is a, c, g, or t
  misc_feature (346)..(346): n is a, c, g, or t
  misc_feature (356)..(356): n is a, c, g, or t
  misc_feature (360)..(360): n is a, c, g, or t
  misc_feature (365)..(365): n is a, c, g, or t
  misc_feature (390)..(390): n is a, c, g, or t
  misc_feature (492)..(492): n is a, c, g, or t
  Probeset Number=SeqID_21684
atcacaattcactccnctcntcttttctcgtntanantntcttntatttcccncactcgtcagtngnagcagcacctgtagcagacatggacgcccntgcanccncnagnaagntgaacaagntgnngaacgtgcgcaaggcanncgnncccnggaagaanttggtgatgcgtgtccgtcaaggccgacctgcanttccccgatcggccngatcggagcgctacctcaagaanggccgnnangcncancgagtggcnactgnangcccncgtctacctcgncngcgtnctggagtacctcgccgacgaggntctggagttgncaggnaacgcggagaaagacaacnagaagacgcngatnatccngcgccacgtgctcctggagatccgnaacgaccaggagctcgggaagctgctggtcggagtcaccatcgcgcacggtgtagtcctccccaacatccactccgtgctcctgcccaagaaggcgccgaanaaaggcggccagcggcggcagcaagggag

SEQ ID NO: 7282 - DNA, 457 bp, Zea mays
  misc_feature (2)..(4): n is a, c, g, or t
  misc_feature (8)..(8): n is a, c, g, or t
  misc_feature (11)..(11): n is a, c, g, or t
  misc_feature (27)..(27): n is a, c, g, or t
  misc_feature (37)..(37): n is a, c, g, or t
  misc_feature (59)..(59): n is a, c, g, or t
  misc_feature (65)..(65): n is a, c, g, or t
  misc_feature (69)..(69): n is a, c, g, or t
  misc_feature (76)..(76): n is a, c, g, or t
  misc_feature (97)..(97): n is a, c, g, or t
  misc_feature (101)..(101): n is a, c, g, or t
  misc_feature (103)..(103): n is a, c, g, or t
  misc_feature (105)..(106): n is a, c, g, or t
  misc_feature (108)..(109): n is a, c, g, or t
  misc_feature (136)..(137): n is a, c, g, or t
  misc_feature (144)..(148): n is a, c, g, or t
  misc_feature (152)..(152): n is a, c, g, or t
  misc_feature (168)..(168): n is a, c, g, or t
  misc_feature (201)..(201): n is a, c, g, or t
  misc_feature (203)..(204): n is a, c, g, or t
  misc_feature (208)..(208): n is a, c, g, or t
  misc_feature (211)..(211): n is a, c, g, or t
  misc_feature (219)..(219): n is a, c, g, or t
  misc_feature (227)..(227): n is a, c, g, or t
  misc_feature (237)..(240): n is a, c, g, or t
  misc_feature (243)..(243): n is a, c, g, or t
  misc_feature (250)..(250): n is a, c, g, or t
  misc_feature (260)..(260): n is a, c, g, or t
  misc_feature (267)..(267): n is a, c, g, or t
  misc_feature (271)..(271): n is a, c, g, or t
  misc_feature (281)..(281): n is a, c, g, or t
  misc_feature (287)..(287): n is a, c, g, or t
  misc_feature (294)..(294): n is a, c, g, or t
  misc_feature (307)..(308): n is a, c, g, or t
  misc_feature (312)..(312): n is a, c, g, or t
  misc_feature (319)..(319): n is a, c, g, or t
  misc_feature (324)..(324): n is a, c, g, or t
  misc_feature (328)..(328): n is a, c, g, or t
  misc_feature (331)..(337): n is a, c, g, or t
  misc_feature (341)..(341): n is a, c, g, or t
  misc_feature (455)..(455): n is a, c, g, or t
  Peptide Sequence Number=SeqID_13645
  Probeset Number=SeqID_21685
annnaccntantcgcatctgcttcctnagccccccgncgtctctgcgccctcctctcgngcctgncgtncgtcganctgataggactaccatggtcnagancncnncnngctcaatgatgctctcaagtccatgtnncatgctnnnnngatngggaaacgtcatgtcntgatcaggccgtcatccaaggagatcatcaagntnntganggncatgcagngccgtgantaccttgacnnnntcnagtacgnggatgaccangagctgntaanatcgtgctgnagctgnatggaanactgaataaatgnnccgntattagnccacntttngannnnnnntttnaagggaaatcaagggatggacggcgaaggcttcttccatctcgccagtttggctacatcgtcctaacaactttctgctggaattatggacccatgaggaaggcccgccgtaagnaa

SEQ ID NO: 7283 - DNA, 486 bp, Zea mays
  misc_feature (2)..(2): n is a, c, g, or t
  misc_feature (4)..(5): n is a, c, g, or t
  misc_feature (7)..(7): n is a, c, g, or t
  misc_feature (13)..(13): n is a, c, g, or t
  misc_feature (16)..(16): n is a, c, g, or t
  misc_feature (20)..(23): n is a, c, g, or t
  misc_feature (32)..(32): n is a, c, g, or t
  misc_feature (39)..(39): n is a, c, g, or t
  misc_feature (41)..(42): n is a, c, g, or t
  misc_feature (65)..(67): n is a, c, g, or t
  misc_feature (73)..(74): n is a, c, g, or t
  misc_feature (80)..(80): n is a, c, g, or t
  misc_feature (91)..(91): n is a, c, g, or t
  misc_feature (102)..(102): n is a, c, g, or t
  misc_feature (132)..(132): n is a, c, g, or t
  misc_feature (134)..(134): n is a, c, g, or t
  misc_feature (224)..(225): n is a, c, g, or t
  misc_feature (227)..(227): n is a, c, g, or t
  misc_feature (238)..(238): n is a, c, g, or t
  misc_feature (243)..(246): n is a, c, g, or t
  misc_feature (255)..(256): n is a, c, g, or t
  misc_feature (263)..(263): n is a, c, g, or t
  misc_feature (268)..(268): n is a, c, g, or t
  misc_feature (270)..(276): n is a, c, g, or t
  misc_feature (278)..(280): n is a, c, g, or t
  misc_feature (284)..(286): n is a, c, g, or t
  misc_feature (291)..(291): n is a, c, g, or t
  misc_feature (295)..(297): n is a, c, g, or t
  misc_feature (299)..(299): n is a, c, g, or t
  misc_feature (302)..(304): n is a, c, g, or t
  misc_feature (310)..(310): n is a, c, g, or t
  misc_feature (315)..(315): n is a, c, g, or t
  misc_feature (319)..(321): n is a, c, g, or t
  misc_feature (326)..(330): n is a, c, g, or t
  misc_feature (337)..(337): n is a, c, g, or t
  misc_feature (339)..(339): n is a, c, g, or t
  misc_feature (341)..(342): n is a, c, g, or t
  misc_feature (344)..(346): n is a, c, g, or t
  misc_feature (348)..(348): n is a, c, g, or t
  misc_feature (353)..(355): n is a, c, g, or t
  misc_feature (358)..(365): n is a, c, g, or t
  misc_feature (367)..(367): n is a, c, g, or t
  misc_feature (370)..(372): n is a, c, g, or t
  misc_feature (376)..(377): n is a, c, g, or t
  misc_feature (380)..(380): n is a, c, g, or t
  misc_feature (382)..(384): n is a, c, g, or t
  misc_feature (386)..(387): n is a, c, g, or t
  misc_feature (393)..(393): n is a, c, g, or t
  misc_feature (402)..(404): n is a, c, g, or t
  misc_feature (406)..(407): n is a, c, g, or t
  misc_feature (410)..(412): n is a, c, g, or t
  misc_feature (415)..(415): n is a, c, g, or t
  misc_feature (418)..(419): n is a, c, g, or t
  misc_feature (423)..(423): n is a, c, g, or t
  misc_feature (429)..(431): n is a, c, g, or t
  misc_feature (436)..(436): n is a, c, g, or t
  misc_feature (440)..(441): n is a, c, g, or t
  misc_feature (443)..(443): n is a, c, g, or t
  misc_feature (445)..(446): n is a, c, g, or t
  misc_feature (453)..(454): n is a, c, g, or t
  misc_feature (458)..(461): n is a, c, g, or t
  misc_feature (463)..(464): n is a, c, g, or t
  misc_feature (468)..(468): n is a, c, g, or t
  misc_feature (474)..(475): n is a, c, g, or t
  misc_feature (477)..(477): n is a, c, g, or t
  misc_feature (479)..(479): n is a, c, g, or t
  misc_feature (481)..(481): n is a, c, g, or t
  misc_feature (484)..(485): n is a, c, g, or t
  Peptide Sequence Number=SeqID_13646
  Probeset Number=SeqID_21686
tncnncnccaagnccnagcnnnncagaggagnccagacncnnccccggaaggtctcacggctgcnnncgtganncgtggnctctccgccgnactctgctgcnctccctctcccctcgcgtctgacgcgatgntntccatcgccggatcttcggtcctctccttcgccaggtccgtcaaggcaatcaacacaaattctctagctttctccccggcgaggaaggcnncncattcctccgnctgcnnnntgcctatgnnactgttncctgngnnnnnnntnnngttnnngccgncccnnntnttnnncccccnttttnctcnnntcccnnnnncctcccntncnncnnncncttcnnnttnnnnnnnntnttnnntctnnccncnnntnnctcccnccccctccnnntnnttnnntcnctnncccncctccnnnccccncccnncntnnccctttnntctnnnntnncccnttcccnntntntnttnnc

SEQ ID NO: 7284 - DNA, 391 bp, Zea mays
  misc_feature (228)..(228): n is a, c, g, or t
  misc_feature (243)..(243): n is a, c, g, or t
  Probeset Number=SeqID_21687
aacgacgcctcctgcaccctgcggcggccatggcgacaaccggtgtcgtcgttggacgccgcagccgcagccgcagccgctgcctcggccttctctcccatgccgttcctcgactccaccctctcggctctgctcgaaaaagaagacgcaccggttctagacacggaactcctcgccatcgacgactaccggttcgcagcgacggcggttagcagaattgagccacgncccgagcagcagcgnttcgcacaggtgccgatggtgcttccggtggcagaacacccgagtagtctgcagacgcagatgagcagcactgcgttcgagctgctgcacgcagcgtccgtcgtcgtcggggtacaccgacaacgactgcttcgcggcggcaatggac

SEQ ID NO: 7285 - DNA, 484 bp, Zea mays
  Peptide Sequence Number=SeqID_13647
  Probeset Number=SeqID_21688
acgagcggagtgagcagttacgagcggagtgaggcgaggcaggaggagagatgagcggggacgaggttgcgaaggccaaggctgccgccgcggccggcggcggcgtaggggagtacgggacgttccacggtccgcccagctacccgcccccgcgcccgcccgtcgggtacccgcagcccgccccgccgcccggcctccacggccagcgagagcccaactcgcgccaccgcggcgggtaccaggccgggaacgctcaagattacgaagctggtgcccgtggacatagacatgaccgccttccatgctgcggtattggtatgggctggtttctattcatactcggtttctttcttggtgccatcccctggtatgtcggagcatttctgttgtggtgttccagagtggattacagggagaaaccaggatatgtggcatgcacaatagcggctgtccttgctacaattgccgtcatcatcggggcaac

SEQ ID NO: 7286 - DNA, 484 bp, Zea mays
  misc_feature (19)..(19): n is a, c, g, or t
  misc_feature (25)..(26): n is a, c, g, or t
  misc_feature (36)..(36): n is a, c, g, or t
  misc_feature (39)..(39): n is a, c, g, or t
  misc_feature (66)..(66): n is a, c, g, or t
  misc_feature (68)..(69): n is a, c, g, or t
  misc_feature (88)..(89): n is a, c, g, or t
  misc_feature (105)..(105): n is a, c, g, or t
  misc_feature (114)..(114): n is a, c, g, or t
  misc_feature (116)..(117): n is a, c, g, or t
  misc_feature (123)..(123): n is a, c, g, or t
  misc_feature (152)..(152): n is a, c, g, or t
  misc_feature (168)..(168): n is a, c, g, or t
  misc_feature (213)..(213): n is a, c, g, or t
  misc_feature (215)..(215): n is a, c, g, or t
  misc_feature (225)..(225): n is a, c, g, or t
  misc_feature (232)..(232): n is a, c, g, or t
  misc_feature (236)..(236): n is a, c, g, or t
  misc_feature (238)..(238): n is a, c, g, or t
  misc_feature (240)..(240): n is a, c, g, or t
  misc_feature (243)..(243): n is a, c, g, or t
  misc_feature (245)..(245): n is a, c, g, or t
  misc_feature (256)..(256): n is a, c, g, or t
  misc_feature (281)..(281): n is a, c, g, or t
  misc_feature (283)..(283): n is a, c, g, or t
  misc_feature (288)..(288): n is a, c, g, or t
  misc_feature (301)..(302): n is a, c, g, or t
  misc_feature (312)..(312): n is a, c, g, or t
  misc_feature (319)..(320): n is a, c, g, or t
  misc_feature (329)..(329): n is a, c, g, or t
  misc_feature (333)..(333): n is a, c, g, or t
  misc_feature (339)..(340): n is a, c, g, or t
  misc_feature (356)..(357): n is a, c, g, or t
  misc_feature (363)..(363): n is a, c, g, or t
  misc_feature (370)..(370): n is a, c, g, or t
  misc_feature (379)..(379): n is a, c, g, or t
  misc_feature (384)..(384): n is a, c, g, or t
  misc_feature (394)..(394): n is a, c, g, or t
  misc_feature (408)..(409): n is a, c, g, or t
  Peptide Sequence Number=SeqID_13648
  Probeset Number=SeqID_21689
attatccgaagttccgaanccacgnnaagccccagngtncgaccgcaggaaccgacccaagaatgncnnccgcctcttccatgctcanngtcgtggcgctctccnccccggtcncnnccccgngcctccgcgccgccggcgccgcctcctcnattcgctccgccgcgncgcgcggcagtcgcactcggcgggcgtgcggaggccgcatcttcnangtcccctgcnacggggnaggngngnccnangaagatgaggntcgatacgctttatcaccacttgtnantccgngcaatcatcagcnntattacagcntggtacnncttgggtgnattnacttgnncagagaacatcagggnnacaacngactacnataacttgngctancaaaccttgntgcctactctcagnnaacagcagtttcttccattcaaccaactagctgcattgaactctgcttcttatttgcaacaacaacaactaccat

SEQ ID NO: 7287 - DNA, 534 bp, Zea mays
  misc_feature (26)..(26): n is a, c, g, or t
  misc_feature (41)..(41): n is a, c, g, or t
  misc_feature (47)..(47): n is a, c, g, or t
  misc_feature (68)..(68): n is a, c, g, or t
  misc_feature (108)..(108): n is a, c, g, or t
  misc_feature (125)..(125): n is a, c, g, or t
  misc_feature (141)..(141): n is a, c, g, or t
  misc_feature (161)..(161): n is a, c, g, or t
  misc_feature (169)..(169): n is a, c, g, or t
  misc_feature (180)..(180): n is a, c, g, or t
  misc_feature (191)..(191): n is a, c, g, or t
  misc_feature (195)..(195): n is a, c, g, or t
  misc_feature (198)..(198): n is a, c, g, or t
  misc_feature (202)..(202): n is a, c, g, or t
  misc_feature (204)..(204): n is a, c, g, or t
  misc_feature (239)..(239): n is a, c, g, or t
  misc_feature (251)..(251): n is a, c, g, or t
  misc_feature (253)..(253): n is a, c, g, or t
  misc_feature (264)..(264): n is a, c, g, or t
  misc_feature (266)..(266): n is a, c, g, or t
  misc_feature (271)..(271): n is a, c, g, or t
  misc_feature (281)..(282): n is a, c, g, or t
  misc_feature (291)..(291): n is a, c, g, or t
  misc_feature (308)..(308): n is a, c, g, or t
  misc_feature (317)..(317): n is a, c, g, or t
  misc_feature (339)..(339): n is a, c, g, or t
  misc_feature (355)..(355): n is a, c, g, or t
  misc_feature (360)..(360): n is a, c, g, or t
  misc_feature (364)..(364): n is a, c, g, or t
  misc_feature (370)..(370): n is a, c, g, or t
  misc_feature (372)..(373): n is a, c, g, or t
  misc_feature (390)..(390): n is a, c, g, or t
  misc_feature (395)..(395): n is a, c, g, or t
  misc_feature (397)..(397): n is a, c, g, or t
  misc_feature (409)..(409): n is a, c, g, or t
  misc_feature (420)..(420): n is a, c, g, or t
  misc_feature (431)..(431): n is a, c, g, or t
  misc_feature (435)..(435): n is a, c, g, or t
  misc_feature (466)..(467): n is a, c, g, or t
  misc_feature (472)..(472): n is a, c, g, or t
  misc_feature (474)..(474): n is a, c, g, or t
  misc_feature (481)..(481): n is a, c, g, or t
  misc_feature (496)..(497): n is a, c, g, or t
  misc_feature (501)..(501): n is a, c, g, or t
  misc_feature (504)..(505): n is a, c, g, or t
  misc_feature (510)..(510): n is a, c, g, or t
  misc_feature (513)..(513): n is a, c, g, or t
  misc_feature (518)..(519): n is a, c, g, or t
  misc_feature (524)..(524): n is a, c, g, or t
  misc_feature (532)..(532): n is a, c, g, or t
  Probeset Number=SeqID_21690
acagggaacaatggtataccaggcgntgtagaatgtatcgntaatgngaaagctgatctcctgcaggnaacttatcttggatgatggtgaagggacacctgtaaatcntcccaccaattccttcnttagatgaattcatgnagggcttaaattctgagccnccttttgntgatatctccnttgggactccnccanaanatgncnatgactctgatgaacttggacacccccctgggagncctcggattttncngagacagaaananaatgnatctgccccnnaaaaaaacnggaatctaaatctgganaagtcctcntgccacaggttaaacagcgggngggaagggttagaggnccccngggncatatnannctggtttcaaaaaaatncgggntnctttaattgganaccacggtggntggggagaagngtgnaaaaaaaatccttccccccttcccccttggnnaaaanantgggagncacaaagaaaaaacnncccnggnnggaanaanggccnncctanaatttttnga

SEQ ID NO: 7288 - DNA, 389 bp, Zea mays
  Peptide Sequence Number=SeqID_13649
  Probeset Number=SeqID_21691
agagaaagaaagagagagagagaagatgagtggagaaaacgacaacggcggtgctaagcgcaggggctcggtcaagtggtttgctgccgagaaggggttcggtttcatcactcccgaagacggcggcgaagatctcttcgttcaccagtcttccatcagatctgagggataccgaagcctcgctgaaggagaatctgtcgagttccttgttgaggtcgacaacagcagtggccgtaccaaggccatcgaggtgaccggacctgatggcgctcctgtccaaggtaccagccgtggttcagctggcggacgcggaggctttggcggcgacgggtacggaggaagaggtggaggccgtggaagttacggtggacgaggtggcggcggtggtg

SEQ ID NO: 7289 - DNA, 511 bp, Zea mays
  misc_feature (16)..(16): n is a, c, g, or t
  misc_feature (19)..(19): n is a, c, g, or t
  misc_feature (24)..(24): n is a, c, g, or t
  misc_feature (42)..(43): n is a, c, g, or t
  misc_feature (47)..(47): n is a, c, g, or t
  misc_feature (49)..(49): n is a, c, g, or t
  misc_feature (55)..(55): n is a, c, g, or t
  misc_feature (69)..(69): n is a, c, g, or t
  misc_feature (74)..(74): n is a, c, g, or t
  misc_feature (76)..(76): n is a, c, g, or t
  misc_feature (80)..(80): n is a, c, g, or t
  misc_feature (82)..(82): n is a, c, g, or t
  misc_feature (87)..(87): n is a, c, g, or t
  misc_feature (94)..(94): n is a, c, g, or t
  misc_feature (101)..(102): n is a, c, g, or t
  misc_feature (113)..(113): n is a, c, g, or t
  misc_feature (117)..(117): n is a, c, g, or t
  misc_feature (121)..(121): n is a, c, g, or t
  misc_feature (171)..(171): n is a, c, g, or t
  misc_feature (173)..(173): n is a, c, g, or t
  misc_feature (175)..(175): n is a, c, g, or t
  misc_feature (178)..(178): n is a, c, g, or t
  misc_feature (182)..(182): n is a, c, g, or t
  misc_feature (189)..(190): n is a, c, g, or t
  misc_feature (195)..(195): n is a, c, g, or t
  misc_feature (210)..(210): n is a, c, g, or t
  misc_feature (225)..(225): n is a, c, g, or t
  misc_feature (248)..(248): n is a, c, g, or t
  misc_feature (276)..(276): n is a, c, g, or t
  misc_feature (299)..(299): n is a, c, g, or t
  misc_feature (301)..(303): n is a, c, g, or t
  misc_feature (307)..(307): n is a, c, g, or t
  misc_feature (313)..(313): n is a, c, g, or t
  misc_feature (315)..(317): n is a, c, g, or t
  misc_feature (320)..(320): n is a, c, g, or t
  misc_feature (323)..(323): n is a, c, g, or t
  misc_feature (327)..(328): n is a, c, g, or t
  misc_feature (355)..(355): n is a, c, g, or t
  misc_feature (360)..(360): n is a, c, g, or t
  misc_feature (364)..(364): n is a, c, g, or t
  misc_feature (368)..(369): n is a, c, g, or t
  misc_feature (376)..(376): n is a, c, g, or t
  misc_feature (389)..(390): n is a, c, g, or t
  misc_feature (396)..(396): n is a, c, g, or t
  misc_feature (408)..(408): n is a, c, g, or t
  misc_feature (419)..(419): n is a, c, g, or t
  misc_feature (424)..(424): n is a, c, g, or t
  misc_feature (431)..(431): n is a, c, g, or t
  misc_feature (436)..(436): n is a, c, g, or t
  misc_feature (442)..(442): n is a, c, g, or t
  misc_feature (456)..(457): n is a, c, g, or t
  misc_feature (461)..(461): n is a, c, g, or t
  misc_feature (464)..(464): n is a, c, g, or t
  misc_feature (473)..(473): n is a, c, g, or t
  misc_feature (479)..(479): n is a, c, g, or t
  misc_feature (485)..(485): n is a, c, g, or t
  misc_feature (489)..(489): n is a, c, g, or t
  misc_feature (499)..(499): n is a, c, g, or t
  Peptide Sequence Number=SeqID_13650
  Probeset Number=SeqID_21692
gagagagagagagagntcnctagncccccccccccccccccnnagananagattnagatttagaactantctcncngggngncccgnaacccanatgggcnntgtttagagangaantganatctactggccgagatgtttaccgcgagatggactgtgtaaagcctggantnancgntttntctcggnnagatntatgtcccccggttntattacctgttgaangatataaaaagaggcctggaccntgtcggccttcccaagcaggttgtatgngctgtgaatggaagaatggcatntnnnacgngttcanannntgnganaagnntggctcctatgtagccgaagccgctcnttttnttgncacnnggacganatcgaagctctcnngttgtnaatgccaagganattcctatttngggcngtgtcgntgacntctatngcgacgaacccccnnattnatnacgtggagnccccgnccacantggncaggactttncggtggcgattt

SEQ ID NO: 7290 - DNA, 683 bp, Zea mays
  misc_feature (1)..(116): n is a, c, g, or t
  misc_feature (118)..(119): n is a, c, g, or t
  misc_feature (121)..(135): n is a, c, g, or t
  misc_feature (137)..(140): n is a, c, g, or t
  misc_feature (142)..(142): n is a, c, g, or t
  misc_feature (144)..(144): n is a, c, g, or t
  misc_feature (146)..(148): n is a, c, g, or t
  misc_feature (150)..(150): n is a, c, g, or t
  misc_feature (153)..(153): n is a, c, g, or t
  misc_feature (155)..(157): n is a, c, g, or t
  misc_feature (159)..(161): n is a, c, g, or t
  misc_feature (165)..(167): n is a, c, g, or t
  misc_feature (169)..(171): n is a, c, g, or t
  misc_feature (173)..(173): n is a, c, g, or t
  misc_feature (180)..(181): n is a, c, g, or t
  misc_feature (184)..(187): n is a, c, g, or t
  misc_feature (191)..(191): n is a, c, g, or t
  misc_feature (193)..(193): n is a, c, g, or t
  misc_feature (206)..(206): n is a, c, g, or t
  misc_feature (213)..(213): n is a, c, g, or t
  misc_feature (229)..(229): n is a, c, g, or t
  misc_feature (238)..(238): n is a, c, g, or t
  misc_feature (248)..(248): n is a, c, g, or t
  misc_feature (683)..(683): n is a, c, g, or t
  Peptide Sequence Number=SeqID_13651
  Probeset Number=SeqID_21693
nnnnnnnnnnnnnnnnnnnnnnnnnnnnnnnnnnnnnnnnnnnnnnnnnnnnnnnnnnnnnnnnnnnnnnnnnnnnnnnnnnnnnnnnnnnnnnnnnnnnnnnnnnnnnnnnnnnntnncnnnnnnnnnnnnnnntnnnngngntnnngnccntnnngnnnaggnnncnnncnggatcannatnnnngatntnggcaatcccaagnccgttcngatggcacgggccgantatgatcgncggcgttcgnagcggcgagcggtgcagccgcaattccgacctgacgggtgtaaggcgccaatgccgctgcggtgaagatttgcagcggcatgactcaaccgctagataaaagcctattcgaactctgtgcgcgtgagcgcgatcatcatgaggctgccagatgaaccccgtcgtcgttgctgtcgcaatcaccggctccgttccgcgcaagaaggacaatcccgcggtaccgattctgccgtccgagcagatcgagtcgacgcagcaggccttcgaagccggagctacgctggcgcatatccatgttcgcaacgacgatgagacgccgtcatccgatcccgagcgatttgcgctggtgcagcaaggcatccggaaacattgccctgatatgatcgtccagttctcgaccggcgggcgcggccgccaccgcggggagctccagttn

SEQ ID NO: 7291 - DNA, 747 bp, Zea mays
  misc_feature (305)..(305): n is a, c, g, or t
  misc_feature (311)..(311): n is a, c, g, or t
  misc_feature (320)..(320): n is a, c, g, or t
  misc_feature (330)..(330): n is a, c, g, or t
  misc_feature (364)..(364): n is a, c, g, or t
  misc_feature (381)..(381): n is a, c, g, or t
  misc_feature (400)..(400): n is a, c, g, or t
  misc_feature (437)..(437): n is a, c, g, or t
  misc_feature (439)..(439): n is a, c, g, or t
  misc_feature (441)..(441): n is a, c, g, or t
  misc_feature (449)..(449): n is a, c, g, or t
  misc_feature (461)..(461): n is a, c, g, or t
  misc_feature (470)..(470): n is a, c, g, or t
  misc_feature (481)..(482): n is a, c, g, or t
  misc_feature (484)..(484): n is a, c, g, or t
  misc_feature (489)..(489): n is a, c, g, or t
  misc_feature (491)..(491): n is a, c, g, or t
  misc_feature (497)..(497): n is a, c, g, or t
  misc_feature (508)..(508): n is a, c, g, or t
  misc_feature (513)..(513): n is a, c, g, or t
  misc_feature (515)..(515): n is a, c, g, or t
  misc_feature (517)..(517): n is a, c, g, or t
  misc_feature (525)..(525): n is a, c, g, or t
  misc_feature (534)..(534): n is a, c, g, or t
  misc_feature (546)..(546): n is a, c, g, or t
  misc_feature (549)..(549): n is a, c, g, or t
  misc_feature (555)..(555): n is a, c, g, or t
  misc_feature (561)..(561): n is a, c, g, or t
  misc_feature (564)..(564): n is a, c, g, or t
  misc_feature (569)..(569): n is a, c, g, or t
  misc_feature (571)..(571): n is a, c, g, or t
  misc_feature (578)..(578): n is a, c, g, or t
  misc_feature (583)..(585): n is a, c, g, or t
  misc_feature (587)..(587): n is a, c, g, or t
  misc_feature (591)..(591): n is a, c, g, or t
  misc_feature (593)..(594): n is a, c, g, or t
  misc_feature (596)..(596): n is a, c, g, or t
  misc_feature (598)..(598): n is a, c, g, or t
  misc_feature (600)..(747): n is a, c, g, or t
  Peptide Sequence Number=SeqID_13652
  Probeset Number=SeqID_21694
agccgtcatcgtttcgcgtccgcctcagcccgccgcaaggggagttcatgagacaccttcgagaagctgaaatggctcctaaagctgctcctgccaagaagggtgatgccaagacccaggccttgaaggttgccaaggctgtgaagtctggggcagccaagaagaccaagaagatccgcacatctgtgacatttcaccgccccacgaccctgaagaaggctagggaccacaagtacccacgaatcagcactaccggaaggaacaagcttgatcagaccaaattctcaagtacccccttaccacanaatcanctgatgaanaagattgtanattacaacactctgggcttcattggtagacctcnatgcagacaagaataanatcatggctgccgcatganatgtatgacatcaggcaaagatagtcaacaccctagntnangccttaanggaagaagaagnttacgttancctacttcccnntntgatntnttgttngggccacaaanttggntntntaagtgtncttagcatntgtgggtcctanacnattggngggccnatnctatngnacccgtnatttnnntntggntnnantntnnnnnnnnnnnnnnnnnnnnnnnnnnnnnnnnnnnnnnnnnnnnnnnnnnnnnnnnnnnnnnnnnnnnnnnnnnnnnnnnnnnnnnnnnnnnnnnnnnnnnnnnnnnnnnnnnnnnnnnnnnnnnnnnnnnnnnnnnnnnnnnnnnnn

SEQ ID NO: 7292 - DNA, 468 bp, Zea mays
  misc_feature (7)..(7): n is a, c, g, or t
  misc_feature (11)..(11): n is a, c, g, or t
  misc_feature (13)..(14): n is a, c, g, or t
  misc_feature (23)..(23): n is a, c, g, or t
  misc_feature (26)..(27): n is a, c, g, or t
  misc_feature (34)..(35): n is a, c, g, or t
  misc_feature (37)..(40): n is a, c, g, or t
  misc_feature (44)..(44): n is a, c, g, or t
  misc_feature (47)..(48): n is a, c, g, or t
  misc_feature (61)..(61): n is a, c, g, or t
  misc_feature (64)..(65): n is a, c, g, or t
  misc_feature (69)..(69): n is a, c, g, or t
  misc_feature (78)..(78): n is a, c, g, or t
  misc_feature (83)..(83): n is a, c, g, or t
  misc_feature (85)..(87): n is a, c, g, or t
  misc_feature (107)..(107): n is a, c, g, or t
  misc_feature (113)..(113): n is a, c, g, or t
  misc_feature (133)..(133): n is a, c, g, or t
  misc_feature (146)..(146): n is a, c, g, or t
  misc_feature (186)..(186): n is a, c, g, or t
  misc_feature (203)..(203): n is a, c, g, or t
  misc_feature (206)..(207): n is a, c, g, or t
  misc_feature (214)..(214): n is a, c, g, or t
  misc_feature (219)..(219): n is a, c, g, or t
  misc_feature (229)..(229): n is a, c, g, or t
  misc_feature (236)..(236): n is a, c, g, or t
  misc_feature (247)..(247): n is a, c, g, or t
  misc_feature (251)..(251): n is a, c, g, or t
  misc_feature (257)..(258): n is a, c, g, or t
  misc_feature (270)..(270): n is a, c, g, or t
  misc_feature (287)..(287): n is a, c, g, or t
  misc_feature (309)..(309): n is a, c, g, or t
  misc_feature (412)..(412): n is a, c, g, or t
  misc_feature (416)..(416): n is a, c, g, or t
  misc_feature (423)..(423): n is a, c, g, or t
  misc_feature (442)..(445): n is a, c, g, or t
  misc_feature (452)..(452): n is a, c, g, or t
  misc_feature (455)..(456): n is a, c, g, or t
  misc_feature (458)..(458): n is a, c, g, or t
  Peptide Sequence Number=SeqID_13653
  Probeset Number=SeqID_21695
ggactcnctcnannatatctacnatnntatactnnannnnacanggnnaccaccgccatgntgnnccangatgcttgnattgntnnntctcctagctctttgtgcangcgccnctagtgcgacccatattccngggtacttgccancagtctcgccattgggtaccatgaaccccatgcgtgcagnactgcatgatgcaaacnggnnctttgtnagctntgatggacgngaccgancctgatgctgngggnagctgnnggccttaccgcntcagacgatgccagtgntgatgccacaggatgatgacgnctaacatgatgcgcccattggatgatgccgagcatgatggtcaccaatggtcttgccgagcatgatgtcgcaaatgatgatgccacaatgtccctggcgacgnccgnctcgcanattatgctgcaacagcagnnnnccattcntgnncnacccaatggt

SEQ ID NO: 7293 - DNA, 746 bp, Zea mays
  misc_feature (77)..(77): n is a, c, g, or t
  misc_feature (601)..(746): n is a, c, g, or t
  Probeset Number=SeqID_21696
ctccaagcacgcgcgcgccctgtgctccccctcagtcctcgctggtcctttctccatcacaaacgctagtctttttntccctaaagctcggagaccgccggaagcagaccgatggcgtgcaagacgaagagcctgctgttggcgctcaggcgctggccacccaccaaccacgccccgtcttgccccggggggtccccccccccgttttgtccccgttctccccatacccccacctctccgtcaggcgcccgcgctggatcctcccccccccccccccccgctcgaatgtgagtccaccaccctccacccccaaatatccgtgatctcgcctccccgcccctcgcccagctcccctttccccttttccccttgcccctctccgccccccgcggcgccggccccgcccccaaatcgcgagcttatatgcttacccgcccccttacgccctgcgtgcggttgtgctcccccctcgccccacctacgacacctaactttcaattccccccctcccctcccgtccccccccactccccctccccacccatctcaccccccgccccccggcgctgtcggtggtgttggacgttataaaaaatacaannnnnnnnnnnnnnnnnnnnnnnnnnnnnnnnnnnnnnnnnnnnnnnnnnnnnnnnnnnnnnnnnnnnnnnnnnnnnnnnnnnnnnnnnnnnnnnnnnnnnnnnnnnnnnnnnnnnnnnnnnnnnnnnnnnnnnnnnnnnnnnnnn

SEQ ID NO: 7294 - DNA, 746 bp, Zea mays
  misc_feature (1)..(146): n is a, c, g, or t
  misc_feature (670)..(670): n is a, c, g, or t
  Peptide Sequence Number=SeqID_13654
  Probeset Number=SeqID_21697
nnnnnnnnnnnnnnnnnnnnnnnnnnnnnnnnnnnnnnnnnnnnnnnnnnnnnnnnnnnnnnnnnnnnnnnnnnnnnnnnnnnnnnnnnnnnnnnnnnnnnnnnnnnnnnnnnnnnnnnnnnnnnnnnnnnnnnnnnnnnnnnnnnttgtattttttataacgtccaacaccaccgacagcgccggggggcggggggtgagatgggtggggagggggagtggggggggacgggaggggagggggggaattgaaagttaggtgtcgtaggtggggcgaggggggagcacaaccgcacgcagggcgtaagggggcgggtaagcatataagctcgcgatttgggggcggggccggcgccgcggggggcggagaggggcaaggggaaaaggggaaaggggagctgggcgaggggcggggaggcgagatcacggatatttgggggtggagggtggtggactcacattcgagcgggggggggggggggggaggatccagcgcgggcgcctgacggagaggtgggggtatggggagaacggggacaaaacggggggggggaccccccggggcaagacggggcgtggttggtgggtggccagcgcctgagcgccaacagcaggctcttcgtcttgcacgccatcggtctgcttccggcggtctccgagctttaggganaaaaagactagcgtttgtgatggagaaaggaccagcgaggactgagggggagcacagggcgcgcgcgtgcttggag

SEQ ID NO: 7295 - DNA, 221 bp, Zea mays
  Probeset Number=SeqID_21698
tttttttttttttttttacatatagctcttacagcattcttgtattgcagaaggtgaaatagcaagaaggtaccactccaccggcacggggctcgagattgccttcgccgccattccgtgagatctgctgccgctgtagtcgccgcccgctccgcctgcctcgtcgcccccttgtcgccgccgcgatgcacaaacaactttgtgacgaccagagccaaatg

SEQ ID NO: 7296 - DNA, 739 bp, Zea mays
  misc_feature (1)..(5): n is a, c, g, or t
  misc_feature (678)..(678): n is a, c, g, or t
  misc_feature (739)..(739): n is a, c, g, or t
  Peptide Sequence Number=SeqID_13655
  Probeset Number=SeqID_21699
nnnnncgcgtccggtctccacaaatctgtctgtgcatcgcggcggcgacaagggggcgacgaggcaggcgtagcgggcggcgactacagcggcagcagatctcacggaatggcggcgaaggcaatctcgagtcccgtgccggtggagtggtacccgacgctggccgtcgtcatggtatcagtaggcctcatgttcaccgcctccttcttcatttatgaagcaacttcatcccggaggagccgtagcctgtcaaaggagatcgcaacagcagttgttgcttctgttttcttgggctttgggtctctgttcgtgcttcttgcaagtggtgtttatgtctgatgactggctatgggccgtgtgcttgtgttctgcatcccgagttgtagacttggttatgccagatcctcaaagctgttgtcctaacgaatatagagcatttgaacttattctagaacgatgtatgggaacaaccgagttaaagcaacgttttcttccaggtctgcattatatatcatcaatctaaatccctgttgcctatgtttctgcttattccaggtctgcttatttattatgtattaccaacatattttgctgttttatggcgtgcattgtgagtgaaggatgatctggttgggcacatgatgttatgacacaatgatatctcacccaaagacatcnaatcagtacccaaacaagggcttgccccagtccaacgtggtcggttccgaaatgttctcgn

SEQ ID NO: 7297 - DNA, 635 bp, Zea mays
  misc_feature (1)..(2): n is a, c, g, or t
  misc_feature (399)..(399): n is a, c, g, or t
  misc_feature (415)..(415): n is a, c, g, or t
  misc_feature (631)..(635): n is a, c, g, or t
  Peptide Sequence Number=SeqID_13656
  Probeset Number=SeqID_21700
nnaaaccccccctgccccagacgtcgcgcgcatgaaatgaaaccctagtgagtagtgaccctgtccggatcactgcgtggcgccgccatggcaccctccgctctggcctccctcccggcgccgctccggtcactgcggctcaagacgaagcagcaggagctactgctccgcgtctcggcgctggcgctcatctacgttctcgccttcgccgtccgcctcttctccgtcctccgctacgagtctatgatccacgagttcgacccctacttcaattaccgcaccacgctcttcctcaccgagaacggctttagcgagttctggaactggttcgattccgagagctgtaacccgctcggggcggggtcgttcggggggactcctcttccggggtctcatggnttgacggcggggttgnttcaacgccttcctccgggggttttccctcgttgtcaaattccggggaggcctgggcctcacggggctttctttgcccgcgcaacccactctcgtcgctagcctttggggccggaattggggcatcccggggggggggttggacgccgcggtttatcgccccgcccgggttactcccgcctcccgggggggggccaaaaaagagagggggcccctnnnnn

SEQ ID NO: 7298 - DNA, 559 bp, Zea mays
  misc_feature (559)..(559): n is a, c, g, or t
  Peptide Sequence Number=SeqID_13657
  Probeset Number=SeqID_21701
cccacgcgtccgcccacgcgtccgcccacgcgtccgcccacgcgtccacccagaaagatcgcactacccggcgctcgcgcggctttctttcccaactccgacgaaggctagctacaccacctggtgcgggctcgtctccatcgcccgccacccgctccgtcgtcgtcgtccccgccgcgccgatcccgaatcgaatggggagcctggcgtccgagaggaaggtggtcgggtgggccgccagggacgccaccggacacctctccccctactcctacaccctcaggaacacaggccctgaagatgtgctggtgaaggtgctctactgcgggatctgccacacggacctcctccaggcgaggaaccacctcggaagttccaagtatcactatggaccctgggcgcgcggcccgacaacagcacacgcgggacgcggcggcgacagggacgcccgtcgccccgccaacaactggcgggagagatcgcccgcaccgcaccgccgcgggacgcagcccagccccgcggccccgcgcccgcatcaagaccacctgccaccgaccgn

SEQ ID NO: 7299 - DNA, 638 bp, Zea mays
  misc_feature (342)..(342): n is a, c, g, or t
  Peptide Sequence Number=SeqID_13658
  Probeset Number=SeqID_21702
ttgaggaaaccaaaattaaggcttttcaaaggagctgaggccgcatcaaaaagctttttttccagataagtggactgtggttggccgagcaatgatcgagcataatctccttagggccagtaacctttacccaaatatcagctttgatgagcttggggcattactggggattgatccaaggaaggctgagaagaaagcatctcggatgatttattaggataaaatgcgggggtccattgatcaggttgaggctgtgatccctttttatgattccccggaaaagctgcaccaatgggatcagcagattgctgggctgtgcccagccctgaacgccatcctttncagcatgtcaagcaagggaataactattccggtgtgaataaaaatttcatgctgtcggtcgatggtgcatggcagaaacagcaaccatgccccggaatccagaatcaaccttttgtatagtttgcagctgcaaatgtgtatcttgtgattttggggggaggatgcttgtttaagtaacgctcccctggatacctctgtagcccctactgtttccagagcgccccgaatgattcccgtaagggccttccggtttaaaaaaaaaaaaaaaaaaaaaaagggggaaaaaaaaaaaaaaa

SEQ ID NO: 7300 - DNA, 654 bp, Zea mays
  misc_feature (1)..(12): n is a, c, g, or t
  misc_feature (596)..(598): n is a, c, g, or t
  misc_feature (600)..(603): n is a, c, g, or t
  misc_feature (605)..(605): n is a, c, g, or t
  misc_feature (608)..(615): n is a, c, g, or t
  misc_feature (653)..(654): n is a, c, g, or t
  Peptide Sequence Number=SeqID_13659
  Probeset Number=SeqID_21703
nnnnnnnnnnnngggtacgagtcgtggggccccctggtcgggaagctcttcttcgccttctgggtgatcgtccacctgtacccgttcctcaagggtctggtggggaggcagaacaggacgccgacgatcgtcatcgtctggtccatcctgctggcctcgatcttctcgctcctgtgggtccgcgtcgacccgttcctcgccaagagcaacggcccgctcctggaggagtgtggcctggactgcaactgaagtggggcccccctgtcactcgaagttctgtcacgggcgaattacgcctgattttttgttgttgttgttgttggaattctttcctgtagatagaaaccacatgtccccggcatctctgctgtgtccatggcatctctgcgtttttttgaaccgaagacagtccatgcctgctgctgctgctgctggttggtggtggtggtggcaaggcaggcagggattgatattgatctgcaagcccctggagcaggagagaaaggtgcctgctgctgtttgttgagtaaattaaaaagttttaaagttatacagtgatgcccattccagagtatggccagtgtattccctttttnnngnnnntntannnnnnnnaaagaacagattggttaggagtttgattcttttgtagnn

SEQ ID NO: 7301 - DNA, 1166 bp, Zea mays
  misc_feature (1)..(565): n is a, c, g, or t
  misc_feature (841)..(845): n is a, c, g, or t
  misc_feature (899)..(901): n is a, c, g, or t
  misc_feature (993)..(995): n is a, c, g, or t
  misc_feature (1002)..(1002): n is a, c, g, or t
  misc_feature (1010)..(1014): n is a, c, g, or t
  misc_feature (1016)..(1016): n is a, c, g, or t
  misc_feature (1020)..(1020): n is a, c, g, or t
  misc_feature (1074)..(1077): n is a, c, g, or t
  misc_feature (1102)..(1102): n is a, c, g, or t
  misc_feature (1153)..(1166): n is a, c, g, or t
  Peptide Sequence Number=SeqID_13660
  Probeset Number=SeqID_21704
nnnnnnnnnnnnnnnnnnnnnnnnnnnnnnnnnnnnnnnnnnnnnnnnnnnnnnnnnnnnnnnnnnnnnnnnnnnnnnnnnnnnnnnnnnnnnnnnnnnnnnnnnnnnnnnnnnnnnnnnnnnnnnnnnnnnnnnnnnnnnnnnnnnnnnnnnnnnnnnnnnnnnnnnnnnnnnnnnnnnnnnnnnnnnnnnnnnnnnnnnnnnnnnnnnnnnnnnnnnnnnnnnnnnnnnnnnnnnnnnnnnnnnnnnnnnnnnnnnnnnnnnnnnnnnnnnnnnnnnnnnnnnnnnnnnnnnnnnnnnnnnnnnnnnnnnnnnnnnnnnnnnnnnnnnnnnnnnnnnnnnnnnnnnnnnnnnnnnnnnnnnnnnnnnnnnnnnnnnnnnnnnnnnnnnnnnnnnnnnnnnnnnnnnnnnnnnnnnnnnnnnnnnnnnnnnnnnnnnnnnnnnnnnnnnnnnnnnnnnnnnnnnnnnnnnnnnnnnnnnnnnnnnnnnnnnnnnnnnnnnnnnnnnnnnnnnnnnnnnnnnnnnnnnnnnnnnnnnnnnnnnnnnnnnnnnnnnnnnnnnnnnncctcacgggcctcaccctctccgtagtcgaagaaacccctcgggcggcgccatcccccgtttagcccagcgaggcgcccgatttcgccggcggaatcagaatcggtggggtttcgcgggggcgagaggctcacacgggctgcgcattccccatttccccgtgatactacgcgctgccgcctgctgccctctctctcctcaggtcgagttctctcctatcggtcggcgatttgggtgggggacggtgagcgcttcggtttcgtgcccggtttggccnnnnntttctccccgtgccgctgctgctgttgcatgcctgcgggcggtcgctgctgctnnngtgcagcctggagatttgctgctggcgctgtttggccgcgtccagcattcaagaagcacgcgtgtgggaaaggagggagtggatgtctcatnnntaagtcntacccccnnnnncncaancggagatttgatagtggttgaaacggattcggagctcgttttggcttgtaggcnnnnttttgctgaaatttgggtttttcgntgccccaaaaaaaaaaaaaaaaaaaaaaaaaaaaaaaaaaaaaaaaaaaannnnnnnnnnnnnn

SEQ ID NO: 7302 - DNA, 692 bp, Zea mays
  misc_feature (30)..(31): n is a, c, g, or t
  misc_feature (36)..(40): n is a, c, g, or t
  misc_feature (63)..(63): n is a, c, g, or t
  misc_feature (101)..(101): n is a, c, g, or t
  misc_feature (513)..(513): n is a, c, g, or t
  misc_feature (552)..(552): n is a, c, g, or t
  Probeset Number=SeqID_21705
cccccaccccacaaaaaagatattttgggnnccccnnnnnccccccccccttttttctttttnagaggggggggggggggggcgcggaaaaaaaaccccgnggggggccttttttttcggcgcgtttttttcccccgcggggggttttttttgggggtttttccccccccccgcttttttttttgggggggggggggggggaagaggagaatttttccccttttttttggggggcccccccccaccaggggttttctttcggggggagggtggggtttaaaaaaattcggaactcccccgggggggggggggggttccggggatttttttggggttccgggcccttaaatttgttttccccgtttttttcccatcccctgtttttccaattagagaccttgggatcctaggggaggggtcgtccccaacccacgcagcccgagtttgagctcggagtggggccaaaatggtggggagtgcgtgcagcgaccacgaccccccgcggcggtggcntatagggctctcccctcacttccttcgcctccgcctgcngactccgatgccgccgctctcccaggcgcgcgactacctcgcgccgacgccacctcgtcgtcctgctcctccggtggcgaggggacggggccgcacctcgcgctgcgtctcgggctcccagggggaaaaattgctatttt

SEQ ID NO: 7303 - DNA, 692 bp, Zea mays
  misc_feature (141)..(141): n is a, c, g, or t
  misc_feature (180)..(180): n is a, c, g, or t
  misc_feature (592)..(592): n is a, c, g, or t
  misc_feature (630)..(630): n is a, c, g, or t
  misc_feature (653)..(657): n is a, c, g, or t
  misc_feature (662)..(663): n is a, c, g, or t
  Peptide Sequence Number=SeqID_13661
  Probeset Number=SeqID_21706
aaaatagcaatttttccccctgggagcccgagacgcagcgcgaggtgcggccccgtcccctcgccaccggaggagcaggacgacgaggtggcgtcggcgcgaggtagtcgcgcgcctgggagagcggcggcatcggagtcngcaggcggaggcgaaggaagtgaggggagagccctatangccaccgccgcggggggtcgtggtcgctgcacgcactccccaccattttggccccactccgagctcaaactcgggctgcgtgggttggggacgacccctcccctaggatcccaaggtctctaattggaaaaacaggggatgggaaaaaaacggggaaaacaaatttaagggcccggaaccccaaaaaaatccccggaacccccccccccccccgggggagttccgaatttttttaaaccccaccctccccccgaaagaaaacccctggtgggggggggccccccaaaaaaaaggggaaaaattctcctcttcccccccccccccccccaaaaaaaaaagcggggggggggaaaaacccccaaaaaaaaccccccgcgggggaaaaaaacgcgccgaaaaaaaaggccccccncggggttttttttccgcgcccccccccccccccctctnaaaaagaaaaaaggggggggggnnnnnggggnncccaaaatatcttttttgtggggtggggg

SEQ ID NO: 7304 - DNA, 474 bp, Zea mays
  Probeset Number=SeqID_21707
tcagctacgtaggccccccccccttttatttcttgtaattatcatcctgttgtcatgtgttatgaatcttgatccattcttttggtgtcgtaagataaaaatggtggtcaagtgctgctgcacgggaacataaaattgtataatatgcccacgagtcaaatattgccttgctgactgaagatagcaccacacctgtatctgctgcgccagtctccttcggtcctcactgcttgtttgtatattcatttagacagtttgtgtatcccgtatcaggtggttcgtggttattgataagtcctgttagacatatagtttaaggtgggtacaaatatagttagccgaaactcagctgtatgaaatcatttttttgtcagacgtatcaaaacaaaaagcttaggctcagtttgttttattggaattgaattcgattctaataattataatttagacaaaaccaaaaaaaaaaaaaaaaaa

SEQ ID NO: 7305 - DNA, 934 bp, Zea mays
  misc_feature (1)..(5): n is a, c, g, or t
  misc_feature (18)..(23): n is a, c, g, or t
  misc_feature (29)..(41): n is a, c, g, or t
  misc_feature (83)..(85): n is a, c, g, or t
  Peptide Sequence Number=SeqID_13662
  Probeset Number=SeqID_21708
nnnnncctcgaggccggnnnnnngatccnnnnnnnnnnnnntagacaatttttttccaaaaaaaagaaaagaggaaaaaaatnnnatcttttgcctccctcgcggctggccgccatggccgcccccattatcctttccctccgtcgaaggcgcatcttttcctagctctccccaacaaccctacccgtttcctggcctcggcctccgtccgggtcgcctatcctccccggtggcctctccgcgccgccgacggggagcgggacaaccgcgtgcaggagctgagggtgcccgattcttggctgacgcctgcaggagcaacgcaggaatctgaatggctgagggagacactgcgcaagtggctcgacgacgagtactgcccggagccggccaacgtggacatcagcagcaccgccgcgcggtcgtatcgcgaatccctgatagcgcggcagtctgacctgggagagatcttgctgaggatggtgggcgacctggacaagctgtcgtacagggagagcttccacggccccttctcggccgccaacgctgcagtccgtttgatcgctcagaggatggaggagtcactgcctgatgaatgacggtggtgcgcgacctggagtttctatatggcacgacttttgatgaagtcgtaggctatatgtacttttgatgaagaacaattcgatcaccactagaaagcatggagcgccgttggcgctctcgcgccgcgctctctctaagagaccacgcgctagttatgggcgtgactttctggcttaattaaattgtaatatttattcttacgtctcattttaacacatgtacatatacattttactagtgtactcctataatcctcatgtatcgttataggtcccggacactgtatcaatgtactactataatcctttggtccaaaaaaaaaaaaaaaaaaaag

SEQ ID NO: 7306 - DNA, 537 bp, Zea mays
  misc_feature (537)..(537): n is a, c, g, or t
  Peptide Sequence Number=SeqID_13690
  Probeset Number=SeqID_21709
taataacaacacagaaacatacgtgtgtatgtgtatatataaatattgaatccggcacgaggctgacaggactgcgagaacgttcagatgaacgaaccccaggaggccaggaccaagagacggaggcgaggcgaggcaggcgaccatgaacaatggcgggagcagttgactcttgacaggatcttatttaggcgctagctgctacatatatactactacgcctcgtcgtcgtcctctctcgtgcgccaccattgggccggctcagctgcagttgcagctggtgccgccgcacttgcaggtgttgcagccgccggcgctggcctggatggtcggcgcagcgaggatgccgctggcggcggcggtctccacttcagggtacaaattgcagcagtcgcatgggcatccgcagtcaggggggcagttgcagccgtcgtcgcagcaatacgccatgatcacaggcgaagggagcaggtgcagctagccagctgtgtttgctgaatgaggaggatgcgtgctgctgcttttgttgcttgtgtn

SEQ ID NO: 7307 - DNA, 962 bp, Zea mays
  misc_feature (1)..(18): n is a, c, g, or t
  misc_feature (20)..(43): n is a, c, g, or t
  misc_feature (65)..(65): n is a, c, g, or t
  misc_feature (67)..(71): n is a, c, g, or t
  misc_feature (83)..(83): n is a, c, g, or t
  Probeset Number=SeqID_21710
nnnnnnnnnnnnnnnnnngnnnnnnnnnnnnnnnnnnnnnnnnagcatcaatgactgcatcaagntnnnnncctggacgcccngtctgaccttcatgagcgaaggcggcaagcagatcatggaagtcagcgacttcaatgcgattcgcggctgtccttggcccgacttctggcaagaccagggcaatctcgacgccaaggccgccgtggaggccgccaaggcccggtcgcaacgccagctttgtcggcgccgccaacaccctggccggcaacctgaaatggtggcacgtgaacgtcagcccgatcatgggcagtgacggcctgccggaaaaaatcctctgcgtgtcccgggacatcacgcccctgcgcgaagccgaagagtccctgcgcaaactcaacgagtccctggaacagcgggtgatcgaacgcacccgcgaccgcgaccgcatctggcgcctgtcgccggacctgatgctggtggcgcaactcgatggtgtgatctccgccgtgaacccggcgtggacacgcatgctcggccacaccgaaaacgacctggtgggcagccaattgctggccctggttcaccccgacgacctggccgtctcatcctcggcggtcagccgtctgggggacggcaagaacttccccaacttcaagaaccgttaccgccaccaggacggcagctaccgcatgatcgcctggacggccgtgcccgacagcgactacatccatgccgtgggccgcgacatccaggccgaggaagaagccaaggaagccttgcgcctgtcggaagatgcccggcgccagtcgcagaaactggaagccatcggccagcttactggcggtgtcgcccacgatttcaataacctgctgacggtgatcaagtcctgcgccgacttgctcaagccgcccgccctcagcgaagcgcggcgcgtgaaatacgtggaagccatcgccagcacc

SEQ ID NO: 7308 - DNA, 334 bp, Zea mays
  Peptide Sequence Number=SeqID_13691
  Probeset Number=SeqID_21711
tattgtgacttgagatgcccgacgtagctcgaatcgcaggagaaagaagcggcgggaaaacgtatcatacagaggagagcacgtgatgatgtccttgcaatgttggaagaacgcaaggagcttacatcatcagcaagatggagcaaagcaatacttatgtttgaagatgatgaaagattcaaagcagttgagcgtccaagggagcgtgaagatttatttgagaactatcttgtggaactggataagaaggtcattagatattaaacatttggccttgtgactcttttcactgtggtagttcgtactgttgacctctgaagattcatatatttct

SEQ ID NO: 7309 - DNA, 454 bp, Zea mays
  Peptide Sequence Number=SeqID_13692
  Probeset Number=SeqID_21712
attccctacaccaactacccctgccctagatgccctgaccgagcctcaccttggctgacccctgccctgatgaccttggtctcaatggtaacctcccacatcactgactctagagagctatgaccatagaggttaggcttgtcctcctctcgataaaatatggttagcagtcatcgccaattagagcatgagttgaaggttacaatgttgtgtgaggagctaaagaaacaagatgaatttcaaaaggaacaacaatagtgctatgctttgttcatatcacaacatcatgctgtgtttttcaagcaaggttgagtttccaattattgttgccattaaaagtatttaagaacgcttagcatggtgacatattgcacatgcaagcaacattacaagaactaaggatgaatgttaacttttcacaaattcaacccaccattactatgatgtggaggct

SEQ ID NO: 7310 - DNA, 592 bp, Zea mays
  Probeset Number=SeqID_21713
ttttttttttttttttaaagcataaaaccatacatttaaggagtattaaattattacatcaccatcagagttttgcaaaagtagtcatcattgttcgaagtgcagcggaataaaactaacgataaataaatggagggatggagaagcctgtcccatcactcctcatgctcctcctcggccgaggcggggtcccactcgacagtccaacccggtggcaagatggacggccaagtcactccagcaaccatgtcctccaaagaacctttttgcagtgaagaggttctagatccctctacccaaccatcaattagatagctccatcctcttgatgataagacacttgagtagactcctctttagcaaccacttcatcttgaatcttcactctttgttttgggagctctttgccgagcatggaacaagtaatacacggccaagaatacttgtgggaaaccttgtccacggggaggtgaagaacgggtgggtttggtcacccctagggaatggtacatcaagctccgggcagatggaccaagatacagggaggggatgaactccgggggaaacataggctacaagagccaaggagatc

SEQ ID NO: 7311 - DNA, 338 bp, Zea mays
  Peptide Sequence Number=SeqID_13693
  Probeset Number=SeqID_21714
tgctgtcgctggagtgaggaagaacagagagaaggggagggagatcgtagcagcggcgctgtttgagagctcgccgatctgctgcgggaatggggtgcacggcgtccaaggtggagcaggaggacacggtccggcgctgcaaggagcgccgccgccacatgaaggacgcggtagcggcgcgccagctgctggcatccgcgcacgccgactacctccgctccctccgcgtcaccgccgccgcgctctcgcgcttcgcgaagggccacccctcgctcgccgtttcgcaccacactacccccgtcctcctctccgccgccgcgccgccgccgacagcaacg

SEQ ID NO: 7312 - DNA, 554 bp, Zea mays
  misc_feature (459)..(459): n is a, c, g, or t
  misc_feature (511)..(511): n is a, c, g, or t
  misc_feature (551)..(551): n is a, c, g, or t
  Peptide Sequence Number=SeqID_13694
  Probeset Number=SeqID_21715
aagaactcgtttcgacatctccttcatcctcgtcgctgccgctcgcctgcccagcaagcccaccaggcgccaggccacaccgcgtctcacgcgtgtgcgcgtcgcgcggacgcagcagcccatcagcagctccaagttctcctcttctccaaaactgcttctcttgcgcagcagagcaaccgcgccaggcttcttctccaggtccgtgcgtgagaatcgcagcctctgttcatctcccaaatttcaaaccatctcctacccacgtcgcgaggacctgggatccatggcgcccttgcagcagaccagccagtcttggcaccccaacccctgcggctcccctgccatccgtcccctgcgttccagggtggtcgtcccgcgtcgttgccgtcgagctgaaaggaaaatgtgcccttgggccatttctaagtattttggtgattgagtgccaacacaagtggncatgtgttaatctatgccaaatgatggacaaagtgaaaaccaacataaaggnatgtttctaagtcttagtactttggtttaaggactaatgnatt

SEQ ID NO: 7313 - DNA, 458 bp, Zea mays
  Probeset Number=SeqID_21716
ttttttttttttttttttttgacattttcaagagcactcaaggtgttccatgctttcatctaaacaaactactggtactgtactgtcgttatactttcatcacccacactagatagacaccataagcaattaagcatcgactgttcacatgcacaactcaactccctaagggcttgttcgttttggatcttgcagaggacttttctgatcttcctgtagcatctctcgcattcaaggtcaaccttgaggacgatcgtggagatcttgtccgccatgggagtggcgctcgactgagtcgccgggccgtcaccctcctggcctggtgccgctggtctcgagctccgggatggtggctgccgcgggagtgtgtgtacgcgtggggaaggaggaagggatgacagtctagcacagaggaggagggcggtgggtgcgggtgcggcgctttaaaacgggagcct

SEQ ID NO: 7314 - DNA, 206 bp, Zea mays
  misc_feature (191)..(191): n is a, c, g, or t
  misc_feature (193)..(193): n is a, c, g, or t
  Peptide Sequence Number=SeqID_13695
  Probeset Number=SeqID_21717
atcttgatccaattgtttaaaaataataatcgtcttgtactactgtgctgagggtgcgtgcaaataggaaacaggaaaggagacccgcgtcgtcgcgcccatcgcctcgcctcgctttcatttcccgtcgcttcgggtctgtccctcctcctccccaagctggagagccattcgtgggcgtaggacgagananaggatcggcggcg

SEQ ID NO: 7315 - DNA, 802 bp, Zea mays
  misc_feature (502)..(502): n is a, c, g, or t
  misc_feature (505)..(505): n is a, c, g, or t
  misc_feature (508)..(508): n is a, c, g, or t
  misc_feature (510)..(510): n is a, c, g, or t
  misc_feature (517)..(517): n is a, c, g, or t
  misc_feature (521)..(521): n is a, c, g, or t
  misc_feature (524)..(525): n is a, c, g, or t
  misc_feature (527)..(527): n is a, c, g, or t
  misc_feature (533)..(533): n is a, c, g, or t
  misc_feature (535)..(535): n is a, c, g, or t
  misc_feature (540)..(542): n is a, c, g, or t
  misc_feature (544)..(548): n is a, c, g, or t
  misc_feature (551)..(551): n is a, c, g, or t
  misc_feature (555)..(556): n is a, c, g, or t
  misc_feature (560)..(560): n is a, c, g, or t
  misc_feature (562)..(563): n is a, c, g, or t
  misc_feature (566)..(566): n is a, c, g, or t
  misc_feature (568)..(568): n is a, c, g, or t
  misc_feature (571)..(571): n is a, c, g, or t
  misc_feature (579)..(579): n is a, c, g, or t
  misc_feature (581)..(581): n is a, c, g, or t
  misc_feature (583)..(583): n is a, c, g, or t
  misc_feature (586)..(587): n is a, c, g, or t
  misc_feature (590)..(592): n is a, c, g, or t
  misc_feature (594)..(594): n is a, c, g, or t
  misc_feature (598)..(598): n is a, c, g, or t
  misc_feature (601)..(802): n is a, c, g, or t
  Probeset Number=SeqID_21718
atttccttcccctctctccgtccgcgtctctgcgcctatgcccatcttttttgtctccgactctcatggcgacgcggcggcgcctctctccgactttcttcggcgggctccgagcccgggagcacggtggcgctagtggctcctcccgcgccacagcggggctcccttacctcgccgacctctcctctaaccccggcggccgcggcggcggggtcatagctgttgagcactccggtgaccccgtgatccccttcgccatctccttcggcaaggttcggagtctgactgcacagacctgtaacctcctggcggtcgccgacgaagacgggtatgttggcctctacgacacccgccggcgccttccttccacctcctcgtcactagagaagtcagctgaaacaagggtgcccgactgggttgctcacaacaatgcaatatttgacgtgtgctggatcaaggagggatcccagatactgactgcatcgggcgatcaaactgtcangcngtngnccccctnccgngtnncncctttncngcccnnntnnnnnccncccnngccntnnccncnctntcctccgntntnttnnccnnncncttnttnnnnnnnnnnnnnnnnnnnnnnnnnnnnnnnnnnnnnnnnnnnnnnnnnnnnnnnnnnnnnnnnnnnnnnnnnnnnnnnnnnnnnnnnnnnnnnnnnnnnnnnnnnnnnnnnnnnnnnnnnnnnnnnnnnnnnnnnnnnnnnnnnnnnnnnnnnnnnnnnnnnnnnnnnnnnnnnnnnnnnnnnnnnnnnnnnnnnnnnnnn

SEQ ID NO: 7316 - DNA, 379 bp, Zea mays
  Peptide Sequence Number=SeqID_13696
  Probeset Number=SeqID_21719
aaacctttcgatccgtggtgtgttggatctgaacccaagctccgagtcgctttcggggtgggcattctcctcttcgtcttcggttgcaagaaagaaaaagcatcatggacggcttccccaagagcgtcggcggtggcggccctaacattccggcgggatcccaccccgcaggcgggagccaggcggcggcaggaggaggcgcgacgcagcggacgcagtatccgtatgtgactggtgttattatgtgctggatctgttgtaagctaagctagggagcttgagtgctgtgttggtcgattaattatttaagctgctaatgtggatgtgtacaattaattagaggatggtgatgatgttcgtaacaaaaaaaaaaaaaaaa

SEQ ID NO: 7317 - DNA, 379 bp, Zea mays
  Probeset Number=SeqID_21720
ttttttttttttttttgttacgaacatcatcaccatcctctaattaattgtacacatccacattagcagcttaaataattaatcgaccaacacagcactcaagctccctagcttagcttacaacagatccagcacataataacaccagtcacatacggatactgcgtccgctgcgtcgcgcctcctcctgccgccgcctggctcccgcctgcggggtgggatcccgccggaatgttagggccgccaccgccgacgctcttggggaagccgtccatgatgctttttctttcttgcaaccgaagacgaagaggagaatgcccaccccgaaagcgactcggagcttgggttcagatccaacacaccacggatcgaaaggttt

SEQ ID NO: 7318 - DNA, 400 bp, Zea mays
  misc_feature (376)..(400): n is a, c, g, or t
  Peptide Sequence Number=SeqID_13697
  Probeset Number=SeqID_21721
atcacattcccaaaccctccgtcgacccctcctcctcgatctacaccggcgatcggcggcgagtgatggggtgggcgacgcggttcctggcggcggtgtgcttctttgctgcgggtgtcctcttcgtcccggagctctccttggttccccctccggcgcaggcgccgtcaccgctgccaagctggcccacgtcctctcctttggcacttctgggggggcgccctctggggccactttatcgggggcatcttcatggtcaaaaacttgccgaggcacatgttccggaattttgcaaaaaaagaagttcccggcctatttacgtttatttttggcgtggggaccattttgggggggcaccttttcccaccttcccccnnnnnnnnnnnnnnnnnnnnnnnnn

SEQ ID NO: 7319 - DNA, 939 bp, Zea mays
  misc_feature (1)..(3): n is a, c, g, or t
  misc_feature (5)..(5): n is a, c, g, or t
  misc_feature (29)..(38): n is a, c, g, or t
  misc_feature (41)..(43): n is a, c, g, or t
  misc_feature (52)..(54): n is a, c, g, or t
  misc_feature (64)..(68): n is a, c, g, or t
  misc_feature (100)..(102): n is a, c, g, or t
  misc_feature (129)..(137): n is a, c, g, or t
  misc_feature (139)..(139): n is a, c, g, or t
  misc_feature (146)..(164): n is a, c, g, or t
  misc_feature (179)..(181): n is a, c, g, or t
  misc_feature (189)..(193): n is a, c, g, or t
  misc_feature (202)..(205): n is a, c, g, or t
  misc_feature (210)..(214): n is a, c, g, or t
  misc_feature (218)..(223): n is a, c, g, or t
  misc_feature (225)..(230): n is a, c, g, or t
  misc_feature (236)..(241): n is a, c, g, or t
  misc_feature (261)..(261): n is a, c, g, or t
  misc_feature (263)..(263): n is a, c, g, or t
  misc_feature (265)..(275): n is a, c, g, or t
  misc_feature (277)..(285): n is a, c, g, or t
  misc_feature (289)..(294): n is a, c, g, or t
  misc_feature (299)..(307): n is a, c, g, or t
  misc_feature (309)..(309): n is a, c, g, or t
  misc_feature (311)..(317): n is a, c, g, or t
  misc_feature (322)..(324): n is a, c, g, or t
  misc_feature (326)..(329): n is a, c, g, or t
  misc_feature (332)..(340): n is a, c, g, or t
  Peptide Sequence Number=SeqID_13698
  Probeset Number=SeqID_21722
nnngncctttttttttttttttggttttnnnnnnnnnntgnnntttgcaaannntcgagatcgnnnnngtgtgattttacaaaaccctgtctgtatgtgnnnggccattttctagttattccaattttnnnnnnnnntngagagcnnnnnnnnnnnnnnnnnnnacaactgacaagatnnncaacaagnnnnngaaaggtgnnnntttgnnnnncctnnnnnncnnnnnnagcttnnnnnncaggtaccaggagtgcatgncnannnnnnnnnnngnnnnnnnnntggnnnnnnatgannnnnnnnngntnnnnnnnaactnnntnnnnatnnnnnnnnnggggggggggtttttacccccccccgggtttttttttccccccccccccttcccccccccaaaatcagggggcccccccacaaatttgggcctccttttttccaacttcccaattcccaaggggggggaaagttaaccccggttggagggaattcccacccccccccccttttggggggaaccacaaagcggttacccccccccgggggcccccctttttccccgggggaaggtgggaaaaggtgcccccccaaaatggtccccacgccaaaaataaacgtaaataggccgggaacttctttttttgcaaaattccggaacatgtgcctcggcaagtttttgaccatgaagatgcccccgataaagtggccccagagggcgcccccccagaagtgccaaaggagaggacgtgggccagcttggcagcggtgacggcgcctgcgccggagggggaaccaaggagagctccgggacgaagaggacacccgcagcaaagaagcacaccgccgccaggaaccgcgtcgcccaccccatcactcgccgccgatcgccggtgtagatcgaggaggaggggtcgacggagggtttgggaatgtgat

SEQ ID NO: 7320 - DNA, 923 bp, Zea mays
  misc_feature (214)..(214): n is a, c, g, or t
  misc_feature (291)..(291): n is a, c, g, or t
  misc_feature (580)..(582): n is a, c, g, or t
  misc_feature (617)..(617): n is a, c, g, or t
  misc_feature (658)..(659): n is a, c, g, or t
  misc_feature (670)..(672): n is a, c, g, or t
  misc_feature (679)..(681): n is a, c, g, or t
  misc_feature (683)..(685): n is a, c, g, or t
  misc_feature (700)..(700): n is a, c, g, or t
  misc_feature (702)..(703): n is a, c, g, or t
  misc_feature (707)..(709): n is a, c, g, or t
  misc_feature (759)..(761): n is a, c, g, or t
  misc_feature (780)..(780): n is a, c, g, or t
  misc_feature (786)..(786): n is a, c, g, or t
  misc_feature (788)..(788): n is a, c, g, or t
  misc_feature (795)..(797): n is a, c, g, or t
  misc_feature (804)..(808): n is a, c, g, or t
  misc_feature (832)..(836): n is a, c, g, or t
  misc_feature (923)..(923): n is a, c, g, or t
  Peptide Sequence Number=SeqID_13699
  Probeset Number=SeqID_21723
aaaccctccgtcgacccctcctcctcgatctacaccggcgatcggcggcgagtgatggggtgggcgacgcggttcctggcggcggtgtgcttctttgctgcgggtgtcctcttcgtccccgaggctctccttggttccccctccggcgcaggcgccgtcaccgctgccaagctggcccacgtcctctcctttgccacttcctggggcgccgccntctgggccacctttatcggcggcatcatcatgttcaagaaccctgcgaggcacaggttcgggaaacttgcagagcangatgttccccggctacttcacgcttatctctgcctggcgcagcctctcggtcggcaccttcctcgacctccccccctgaaagacgggtccacccggggaagggctccaggctgggatccccccattaaggggtcggttgcagatcttcccccacctggttgtccttccccccccttgcattttgggatgatgaagaaaggccccaattttggggggggccctggttttctgggaggaagggggatggtcaaaaaataccccggggtgggtaaatccaacccccccctcnnngcaatgaacaagaagtttgggatgatccccgggcngtcatccctggccaacatcatgtcgtttggtagcttggccnngccctcctggnnnctggccnnnannntggagctgtgaagangnnccannncgttttccatttccgcgtttttgggaattttatccctatgggggtaatgnnncccgtcaggttgtcagatngctagncnaaactgnnngattgcnnnnntggcttcccaagataataaattgnnnnnctagttaaaaaagaaaaaaaaaaaaaaaaaaaaaaaaaaaaaaaaaaaaaaaaaaaaaaccaaaaaaaaaaaaaaaaaaggcccctn

SEQ ID NO: 7321 - DNA, 689 bp, Zea mays
  misc_feature (1)..(1): n is a, c, g, or t
  Peptide Sequence Number=SeqID_13700
  Probeset Number=SeqID_21724
nttcggcacgaggcctgaagtaagcacgagtatataactaatttgaaagacatgcctgcacatcctgcagtacagtagcttgccagcttatcttcagaaactgcagcttttttagtcagagtagactaatccattcagcttgtatctggtagtgtaacttgtaatcagtaaaaggacactcataattgcatagattcaatcagtcattatacccctaaaattgtttttgaatacgatgtcttagtggtctaaggtatgattatcatatttcttttattttgtgcggggtggcagtgctcatgctcaaatatacccttcacttactgaagttttcaagcccctgataaatgagggcaatgtggcaatgtctacaacgtctcctacattcagatcaagaaagcaaataggatgtacaagactgttgataacgatatcatgatcggtttcacaaaatggacaacggtcgaggaacttattgaggtgcaaatggtatgtgaatccacaggttccagaggcaatgagccttatagctaggtaccttgtaaatacctctggtttggttgcctgtttcccgctgtatcgactagacgtaaacttggaccatgtaatcttattatggaccagtttccagctgaaacaagcctcaatgtcatgctatggtgcacgtttaagtgtggtgctacaacttt

SEQ ID NO: 7322 - DNA, 725 bp, Zea mays
  misc_feature (2)..(2): n is a, c, g, or t
  misc_feature (15)..(21): n is a, c, g, or t
  misc_feature (623)..(624): n is a, c, g, or t
  misc_feature (646)..(648): n is a, c, g, or t
  misc_feature (669)..(672): n is a, c, g, or t
  misc_feature (725)..(725): n is a, c, g, or t
  Peptide Sequence Number=SeqID_12692
  Probeset Number=SeqID_21725
angccggccgggccnnnnnnncctaacttcttttctattctcctccccagccgccattcacatccggccgccaggaagcaccggcgcctggccgacggcgagcctcccttttcccttttctgtcatctgttttcgttctgtcagccgcacagaacttcagccgccaaggaactctggttcctggccaaccgcgcgctgcttcttcctctctcttttttttcttgccgcgctcgtccagttcttctttttcttaaaaaaatgagcatggccgaccgcacctgttgctctaattctgtcttttctttctttccctgtctttgtttttgtgcgttctctagcatctggccgctagttcactggagcacatgcagttcattcgttacaccactggccatacagccatatgcctcacggtctctgcatcacttgaactcagccgaaaaataccgttggtcatggccgtttctggttacacttatactcatatccagcctcatgtattcgatccctctcttctgtgtgaatgtatgtatgagatgtgttgtaatttatgggatcgagtacggaggtctaaaacgtggatgtagttcactttgcatttttctctgatttacgcgtggatnnagtcactcgattaaacgaacannnctctgtgcactttgactgatnnnnatttagggttaatttaattagggttgagccctaactggatctgtgtttctgtn

SEQ ID NO: 7323 - DNA, 711 bp, Zea mays
  misc_feature (711)..(711): n is a, c, g, or t
  Probeset Number=SeqID_21726
ccacgcgtccgccacgcgtccgccaaaacagaggagcccgtcggccgccgcaaaaaaacaagaccggacgagcgcaccagggaatcgctgacgcttcgcgcttcgacggagccggcctcgccgctggggggacgccggctgctccccgggcggcagcgcgcgacgaacgtccgcgccacggcctccgccggcgagccggacctctccgtgcgcgagaacgggctgcagatgcccaacccgatagtgattagaggtggggaaacaggagaaccaactatcacgttatgaagcgcgccttacaagaggactgaggcatcgaaaatagccaacactgtgacaacaggatgattaaaaaaaataataacgatactacccgatacgaaaagattacgagaaacaagcaaaaggggtctacacattgacgacccaacactgacaccgaccaaaaataaaacaacaacagtgagccagggccactgtagcatctcgcccgcaaatgagcgcgaagcagagtagaaaaaaacgagtaagcgtgtccggttataagttaccgggttacacttagagctagagtactaccacccaacaccctacactcacacaccaccatcaatcaacaccaatagaaaagaagcaatgccagccgatcgtcaagggaagcgcctggtggttatcgtgtatggacattcggccaaagcaaaaccagaagan

SEQ ID NO: 7324 - DNA, 448 bp, Zea mays
  misc_feature (18)..(18): n is a, c, g, or t
  misc_feature (85)..(85): n is a, c, g, or t
  misc_feature (87)..(87): n is a, c, g, or t
  misc_feature (102)..(102): n is a, c, g, or t
  misc_feature (131)..(131): n is a, c, g, or t
  misc_feature (160)..(160): n is a, c, g, or t
  misc_feature (162)..(162): n is a, c, g, or t
  misc_feature (175)..(175): n is a, c, g, or t
  misc_feature (187)..(187): n is a, c, g, or t
  misc_feature (247)..(247): n is a, c, g, or t
  misc_feature (261)..(261): n is a, c, g, or t
  misc_feature (283)..(283): n is a, c, g, or t
  misc_feature (293)..(293): n is a, c, g, or t
  misc_feature (298)..(298): n is a, c, g, or t
  misc_feature (325)..(325): n is a, c, g, or t
  misc_feature (341)..(341): n is a, c, g, or t
  misc_feature (352)..(352): n is a, c, g, or t
  misc_feature (424)..(424): n is a, c, g, or t
  misc_feature (438)..(438): n is a, c, g, or t
  Peptide Sequence Number=SeqID_12693
  Probeset Number=SeqID_21727
ttttttttttttttttgnagctgaggccagcatgtcctcacacatcactcacgtataattataaactcctgaaaaaacctgtgcnanattgaagtctccaanattttacaaggtcaagccctcagctcagngctacaaattaatgttcacatgacaaatntntcgctcaatgtcncccgttgtcacnactttgtgtggattcatggcctgttctataaactgaaggcccaaggttcaaaaccatgtncagatgaggactanatgcttggatgtattggctgcnaatatgtttntcggnacttcattacactgaagcagtcatgancataaaagcgcgggtnttcgccacacnaaagcagcgcggcggtagcatgtgcgcatggaatgccgtaaatttgccatcggcggcatgagcaggacctancttcagtgtccacnatgtttgtcc

SEQ ID NO: 7325 - DNA, 766 bp, Zea mays
  misc_feature (297)..(297): n is a, c, g, or t
  misc_feature (325)..(325): n is a, c, g, or t
  misc_feature (364)..(364): n is a, c, g, or t
  misc_feature (431)..(433): n is a, c, g, or t
  misc_feature (444)..(446): n is a, c, g, or t
  misc_feature (454)..(457): n is a, c, g, or t
  misc_feature (461)..(462): n is a, c, g, or t
  misc_feature (466)..(469): n is a, c, g, or t
  misc_feature (479)..(479): n is a, c, g, or t
  misc_feature (481)..(484): n is a, c, g, or t
  misc_feature (491)..(491): n is a, c, g, or t
  misc_feature (493)..(495): n is a, c, g, or t
  misc_feature (503)..(505): n is a, c, g, or t
  misc_feature (507)..(507): n is a, c, g, or t
  misc_feature (527)..(527): n is a, c, g, or t
  misc_feature (531)..(531): n is a, c, g, or t
  misc_feature (534)..(539): n is a, c, g, or t
  misc_feature (553)..(555): n is a, c, g, or t
  misc_feature (559)..(563): n is a, c, g, or t
  misc_feature (571)..(573): n is a, c, g, or t
  misc_feature (581)..(583): n is a, c, g, or t
  misc_feature (600)..(766): n is a, c, g, or t
  Peptide Sequence Number=SeqID_12694
  Probeset Number=SeqID_21728
gcaataacttactaatccatctttacctcgtattcttatgctgtccttttacaggcatccaacaggtataccaaagtccaggtagtcctcaggttgtttggcaagacaacattgagcctgataatatgacatatgaggaactgttggatttgggtgaggcagttggaacccaaagccgtggtctctcccaagaacgcatttcatcgcttcctgtcacgaagtataagtgtggttttttttcaaggaagaaaacacgccgtgagaggtgtgtgatttgccaaatggagtacaggagangaaatttgcagatgacactttccatgcnagcatgtataccatgccagctgcgtgacaagatggcttngcataaaccaggtatgggctgttgttttgttgaagtcctggggaggttttccgaggcatgtgtccannnttgtgatgccnnnatgaagtnnnngctnngggnnnngggcccccantnnnngcatgantnnnttgaaggnnncntgttgtcccccctttagaantgtntannnnnnccatattaccaaannngttnnnnnttatcagnnntatttagnnngtgtttggtttgggaannnnnnnnnnnnnnnnnnnnnnnnnnnnnnnnnnnnnnnnnnnnnnnnnnnnnnnnnnnnnnnnnnnnnnnnnnnnnnnnnnnnnnnnnnnnnnnnnnnnnnnnnnnnnnnnnnnnnnnnnnnnnnnnnnnnnnnnnnnnnnnnnnnnnnnnnnnnnnnnnnnnnnn

SEQ ID NO: 7326 - DNA, 401 bp, Zea mays
  Peptide Sequence Number=SeqID_12695
  Probeset Number=SeqID_21729
ctctctgctccctcacgttctctactccacgcgcgcctggctccctgtatccaagccgtcgccgcctccttccctgctctcacttctctctcctccctccctcgtttctctcttacgcgggagcaggcaacacgcaagccgcgcgcgagccaagcccaggccgcgaccctaagccccggcggcgccctgcagcaagccgcgcccgctctgcgcgcatccagcccaggcgcgagcgacgccgagcgcgtgccgtccgatgccgcctgtgcaagccacgaccgagcccgaccctgccgcgcctgctctctgcgcaaccgctcgagtgccctgcgcgcgttacttcttcgtgtgtaatggagtttaatggaatcatttcttctcctccccatcaatcccttagt

SEQ ID NO: 7327 - DNA, 431 bp, Zea mays
  Probeset Number=SeqID_21730
ctcgaattccgttgctgtcgtattgaccccttgtggctggctgagctcgccccgcagtactacgctaccgaagagtaattgtgatcagtggacattgggcacaacagtaatacttaatggtaatgatgaattatttatatttatgcaattcgttattatattaaagtatggtgccattgccgaggcatgtacaacccatttagggagtctcgagtctcttgagtttctaggggtagatgaaaaaaaatcaagagatgggctattcgcaaagagcccgtctctacgattcactatatttattgtgtcttgactatatttatgatctagagtctcgaggctgtatcatgcagtttcttagttgtcatgcccttaacctatgagcaagtttaataatagagctcattgctggctcaaaaaaaaaaaaaaaaaaa

SEQ ID NO: 7328 - DNA, 431 bp, Zea mays
  Peptide Sequence Number=SeqID_12696
  Probeset Number=SeqID_21731
tttttttttttttttttttgagccagcaatgagctctattattaaacttgctcataggttaagggcatgacaactaagaaactgcatgatacagcctcgagactctagatcataaatatagtcaagacacaataaatatagtgaatcgtagagacgggctctttgcgaatagcccatctcttgattttttttcatctacccctagaaactcaagagactcgagactccctaaatgggttgtacatgcctcggcaatggcaccatactttaatataataacgaattgcataaatataaataattcatcattaccattaagtattactgttgtgcccaatgtccactgatcacaattactcttcggtagcgtagtactgcggggcgagctcagccagccacaaggggtcaatacgacagcaacggaattcgag

SEQ ID NO: 7329 - DNA, 413 bp, Zea mays
  misc_feature (394)..(394): n is a, c, g, or t
  misc_feature (403)..(403): n is a, c, g, or t
  Probeset Number=SeqID_21732
tcaccaacacgggcgcgctggtcacgtgcgtcaacaacttccccgagacccgcgacctggggctcagcatcctcaagggatttgtcggcctcagcggcgccgtgtacgcgcagctgtaccaagcgctatacggcggcgaggacgctgagtcgctcatcctgctcgtcacctggctccctgtggccgtgtccgtcgcgttcgtccacaccgtctgctacatgccgtacccgtggcggcggcgccgcggcgccgacggcggcgggcaggagacgagctccgacccttcttctgcttcctctacctgtccatcgcgctggcgtgcttcctcctcgtcatgatcgtggtgcaggggcaggtgcctttctcccgcgccgcgtacggggtcgccgccgcnccgctgctnatcctccttt

SEQ ID NO: 7330 - DNA, 673 bp, Zea mays
  misc_feature (1)..(2): n is a, c, g, or t
  misc_feature (4)..(20): n is a, c, g, or t
  misc_feature (22)..(27): n is a, c, g, or t
  misc_feature (36)..(44): n is a, c, g, or t
  misc_feature (601)..(673): n is a, c, g, or t
  Peptide Sequence Number=SeqID_12697
  Probeset Number=SeqID_21733
nncnnnnnnnnnnnnnnnnngnnnnnnagttgagcnnnnnnnnncagtcgtgttcaagcgtggaattatcgtgtggatgtgttgatatcctgaaggaaagaagccagaataaaaacatgatgcgaagaaacggcactacaccagcataccagcattttacggtgtgttccatcgtatccaaatatataaagaactggcatcctgcgattgtgtatatactccttccaagcaggatgaaaacacgacagataaattgacagtagtagtgtgctatcggtaatgccactacatttgtttagcggcgatctgtatctcatggataaaaatagtccatcttatagaaatatgttaataaagattaaacgtgtgttaattacatactaacaagaacaagcccattttcatcagatttctcaccatcgctggtagagaaccgagcaatggttttaccgttttaggttttatagtcccagatacctttgagccccccaggactaaagtactaaacgcagcttaagtcctgggtcaaacatctagcgccacaagttggcttacagaagagttttagtttcaatggcgctctaaccgggcctaaagggcnnnnnnnnnnnnnnnnnnnnnnnnnnnnnnnnnnnnnnnnnnnnnnnnnnnnnnnnnnnnnnnnnnnnnnnnn

SEQ ID NO: 7331 - DNA, 547 bp, Zea mays
  Probeset Number=SeqID_21734
ttccgcctcgtctccggactcctcctctgccgcctccgaaccagacgtgcctgcgccatacacggcgtctgcgtctgcgccagcgccgctggtttccgcacgaacgctccgggcccatcaccgcgcctgactggatcattggccggctcgctgcgaggtcgtcttcggcgccagaccgccgtgtccggtgatgcgcctgatccagggccatggccggggcgtcaggcggaacgccggctgccgggggtggtggaccgaggcgtcgtcggaggcccccgccggagaggtccaagacgatgtgccgcggctgcacctgcgcctcggcgagttccatttctgctgctgctctgttcggctgtgtctctacaagtctacagaagccgcagccggtttgtcagcttaggactgtgtgtgttctagcttctacaaggaaaagatttttttataaaaaaaaagaatacagggtatgagtgtaaagtatcggctagctaggaaggggaagaaatcatggcggggaggggagaggataggtggtttgcctgtctat

SEQ ID NO: 7332 - DNA, 607 bp, Zea mays
  misc_feature (12)..(12): n is a, c, g, or t
  misc_feature (601)..(607): n is a, c, g, or t
  Peptide Sequence Number=SeqID_12698
  Probeset Number=SeqID_21735
aacctcgcactnaccaactggagtccgatcgacgtagccgtggcctctcttccgtaagccctagcccctagccgcctgtctcgtgcatttgtgctgaggctcaactgctgatccgtcttccaagctgtggtgtcatcccctgagttctgatccaagatgtatctccagtattacatcaatgagaagggggacaaggtctacaccaccaagaaggagtcacctcttggggtgccgacgcagtctgctcacccaggtacaccgcctttgttcactggagttactttttttttctgctgttgtaacttgcctgtcaaagatgtaacagttgggacatttcttttgttgggtacaacgtacaaggatgcagagtcatggtttgctaatatgagtattagcattaggcatgtttgcagacttggagccccgcctgatttgtttcgtttattcatagtatgtcgtgttttcaatttcttctgagtttagattctggatattttaagcagacaaaaaatacctgtgcggcttataagactggagttaagagtatctgcacctgtcaaagctgcagaacgttatttcttttcctgtgacaaaaaaaaannnnnnn

SEQ ID NO: 7333 - DNA, 644 bp, Zea mays
  misc_feature (601)..(644): n is a, c, g, or t
  Peptide Sequence Number=SeqID_12699
  Probeset Number=SeqID_21736
ggtcaaaaatagctagcgctatggatggttcgaaatgccaagggcacatgacacggctcaacaatacgcagcacaggacagtagggtagcgaaagctttgacattttgcaggctctggagatcacagaagccagagtgtagctacaaaaaaaactgatcgattttacacgcatccgcgcatacagtgtcgagccagcgacaggtttggcgtatgccaagggcagcgtcaggttcattatttgctaacccagacagcttcggcgcgacgacgacaatcctactcctatgaacagcaaaatctcctcctaacgctggacgtttggtgctgcagagattctaccgtctccaccagttccatctgcttttccaccgcagcctgcagcgcgtttttcggtactacctgctcatgatacgaggcatgtccattcaaagaacgaaacctcagcaattatatgagttcaactaaaggcaccaggagcaattaaaaaaagatgcttaatacaggcagtaagagcaaagtaacaagtcatgtatgaagatgcctgtcacagatatatagcaggtttcttgctccatcgactctgaagctcatgaatcatannnnnnnnnnnnnnnnnnnnnnnnnnnnnnnnnnnnnnnnnnnn

SEQ ID NO: 7334 - DNA, 557 bp, Zea mays
  Probeset Number=SeqID_21737
tttttttttttttttttggtggtggtatgcgattagtattaatatagctggagataattctgctccattggtctatctattatagtcaggacaaaccattcccgatctatctccatcgaaagttatacgcgcaccagcacggttcctccaggactatatgcatcggaatgcagcatgtcctcatatccaccaaaccctgtacaagttccgaatgtcaaaatttacagggcaagggcaacggcgagagcaccagcgagaccgctgaggccgagggcagcagcgccgttggccggggtggagccggagccggagccggagccggagccagagccagagccagagccgggcttagtaccgttggtgggggcaccgggagtagcgacgggagtagcaacgggagccacaggggtctgggcagcagccgcaacagcgacgaaagcgaggacggcagcggaagcgtgcattttgatggtggttttaggttgtttggttattggaatagttcgaagagaattagatcggatttaaacgagtgttggtgtagcgattgtagttgg

SEQ ID NO: 7335 - DNA, 557 bp, Zea mays
  Peptide Sequence Number=SeqID_12700
  Probeset Number=SeqID_21738
ccaactacaatcgctacaccaacactcgtttaaatccgatctaattctcttcgaactattccaataaccaaacaacctaaaaccaccatcaaaatgcacgcttccgctgccgtcctcgctttcgtcgctgttgcggctgctgcccagacccctgtggctcccgttgctactcccgtcgctactcccggtgcccccaccaacggtactaagcccggctctggctctggctctggctccggctccggctccggctccggctccaccccggccaacggcgctgctgccctcggcctcagcggtctcgctggtgctctcgccgttgcccttgccctgtaaattttgacattcggaacttgtacagggtttggtggatatgaggacatgctgcattccgatgcatatagtcctggaggaaccgtgctggtgcgcgtataactttcgatggagatagatcgggaatggtttgtcctgactataatagatagaccaatggagcagaattatctccagctatattaatactaatcgcataccaccaccaaaaaaaaaaaaaaaaa

SEQ ID NO: 7336 - DNA, 1573 bp, Zea mays
  misc_feature (1)..(2): n is a, c, g, or t
  misc_feature (16)..(18): n is a, c, g, or t
  misc_feature (33)..(33): n is a, c, g, or t
  misc_feature (37)..(44): n is a, c, g, or t
  misc_feature (1329)..(1331): n is a, c, g, or t
  misc_feature (1352)..(1354): n is a, c, g, or t
  misc_feature (1393)..(1401): n is a, c, g, or t
  misc_feature (1410)..(1411): n is a, c, g, or t
  misc_feature (1418)..(1573): n is a, c, g, or t
  Probeset Number=SeqID_21739
nnaacccggcggtgannnggatcctgcaggagntcannnnnnnncagtccaacccctcacccgacttcatgtccctccccctcgaggaggacatcttcgagtggcaatttgctatccttggtccgagagacagcgagtttgagggtggaatttatcatggcaggatccagctaccttcggattatccattcaagccaccgtccttcatgctacttacgccaagtggacgctttgagattcagaagaagatttgcttgagcatatccaattaccaccctgagcactggcagccttcatggagtggtgagtaggggtggtaatggatcaagatccaaatgttttttcacaatacgttagggcccttaattaattttagttcaaaaatgaatagtaatagagctccatcctaatccgatttgatccttaaaatttatagtgtaaaatctagagcccattaccacccctattggtgagtaatctttagtcatttgtttataaggctattctcaatggggagtttatgttgtttctaagactgccgcatcatgtaaaaaataaaacatggataaagcatccatcctcactgcatagtttcattctatggtttcaaatacatttacttcacgacttatagagtttgtaattgtgcccagagagttctctcttaaaaatgttgccacgtcattaaaaacgcttatgtggcaccctatttaatacaaatgaaactcacataaaacttccacctagattggcctaaatggccgctgaagtgctctgtcagatttgctaaagggctcctgtattaagctgaaaagcaccattattcatcgcccacttttatatggttttgtgggctattacgagcatggtgcaaaataaatttgttttttcttttggtctttggatttccatcaggcaagtacttgccttttggctagaccaaaagtaaatatgtttcttcattcctaagatgaatatatgaataatactctagttgggtactagggttggtttgcttctgagagtatggaattttgtaatactagggttggtttgcttctgtgactatggaattttgtaatgctcttttggtgagcagttttcagtgccattaggtcgttacttgagaggcatcaggtgtgtatatgtgcaacactaagttcatagaagtatttcattgtcttgctttttttcgctcatgcatgcttgaaactccctctgtgttcactagctatagcaatacatagcagtgacttcacactcttccatatatcggcaccagttttttcatagtgcacatacgtatgttatgtacactatacgagcctnnngcagaagaaaatggttccttnnntcttaaggacttgtcctgcagcaagtatttatctgcttnnnnnnnnnaaagggagnncatgcannnnnnnnnnnnnnnnnnnnnnnnnnnnnnnnnnnnnnnnnnnnnnnnnnnnnnnnnnnnnnnnnnnnnnnnnnnnnnnnnnnnnnnnnnnnnnnnnnnnnnnnnnnnnnnnnnnnnnnnnnnnnnnnnnnnnnnnnnnnnnnnnnnnnnnnnnnn

SEQ ID NO: 7337 - DNA, 932 bp, Zea mays
  misc_feature (1)..(1): n is a, c, g, or t
  misc_feature (736)..(739): n is a, c, g, or t
  misc_feature (742)..(810): n is a, c, g, or t
  misc_feature (812)..(821): n is a, c, g, or t
  misc_feature (835)..(852): n is a, c, g, or t
  misc_feature (855)..(860): n is a, c, g, or t
  misc_feature (862)..(869): n is a, c, g, or t
  misc_feature (874)..(907): n is a, c, g, or t
  misc_feature (910)..(916): n is a, c, g, or t
  misc_feature (918)..(921): n is a, c, g, or t
  misc_feature (925)..(928): n is a, c, g, or t
  misc_feature (932)..(932): n is a, c, g, or t
  Peptide Sequence Number=SeqID_12701
  Probeset Number=SeqID_21740
ntttttttggccgccccttttttttttttttttttgctcaaaaaacatgtagtattgatacgaattctacaaatacaataatcaatacatatcgttctgattcttgataaggaatccatcgatcttatctctataaacataaaatttaattttatcaactaacctactaaccaaggaaataattgattaaaccaaaataccaaataatcttacttcttaactagcacagtagcactagcagccacacgcacatagcaaactagcagcagaagcagtgctagcacacggttttcttcaccttcactggttcaatcgttcagggaatcaggccggccacaggcgtcaggttcagtagccgtgcccagccgcctatccgctcaggcttccttcctccatggtggccgatcggagcagcaaacgcaggagctggcgagggcgagctggtgacgagggggggaggccgagcgcgcgccggtgccacgcctgcgaggccgcgatggagcgccgctgctccaacgcccggcgatggacatccctgtgcccctgttggagtgttggttgtcgcggtgtcaccaagaccagagaggcagagaggcggctggatcgtggacacgaccacgaggccgagaggggttgaggagcggctgatgcgtctcagggtgacctatttttcttggacttctcgagcctattcgttgttgttagtgggcagcgaccggggctgcaggccgggccnnnnagnnnnnnnnnnnnnnnnnnnnnnnnnnnnnnnnnnnnnnnnnnnnnnnnnnnnnnnnnnnnnnnnnnnnnannnnnnnnnncggatggaagaatnnnnnnnnnnnnnnnnnnaannnnnngnnnnnnnnatatnnnnnnnnnnnnnnnnnnnnnnnnnnnnnnnnnnaannnnnnntnnnncaannnnaaan

SEQ ID NO: 7338 - DNA, 666 bp, Zea mays
  misc_feature (601)..(666): n is a, c, g, or t
  Peptide Sequence Number=SeqID_12702
  Probeset Number=SeqID_21741
ctgcacacattccgcgcacaccccggggcagccgcaaacgccttcgccgtcgcgtcccgctcctccgcccgcccgacgcgacccctaggacctggagagagaggtcggcatggctgccgcagtggtcgacgacgctggtatggacgccgtccagaagcgcctcatggtcgaagacgaatgcattttggtggacgagcaggacaatgggtggggccatgagtcaaagtaccactgccatttgatggaaaaagatggatctgagaatctgctacttaggccatgcaggggggtcccttttccacccaaatttgacctgctactccacaaaggccccggaaaagggtacccttcccttaattgggccaaaaccggtggggccccccctgggcccgggggtggggttttccccggaaactccctgggggggaaaaaggcccccagagagagtctcggggggggggggccccccccaaaaagggccccccggggacaattcccccccccgggggggagggttttttaggggccccctctccccaaaaggggggggggaaaaaaattttacccccgccggtggcttcccccgggggggggggggggnnnnnnnnnnnnnnnnnnnnnnnnnnnnnnnnnnnnnnnnnnnnnnnnnnnnnnnnnnnnnnnnnn

SEQ ID NO: 7339 - DNA, 666 bp, Zea mays
  misc_feature (1)..(62): n is a, c, g, or t
  misc_feature (663)..(666): n is a, c, g, or t
  Peptide Sequence Number=SeqID_12703
  Probeset Number=SeqID_21742
nnnnnnnnnnnnnnnnnnnnnnnnnnnnnnnnnnnnnnnnnnnnnnnnnnnnnnnnnnnnnnggggcccccccccccccccgggggaagccaccggcgggggtaaaatttttttccccccccccttttggggagagggggcccctaaaaaaccctcccccccgggggggggaattgtccccggggggccctttttggggggggccccccccccccgagactctctctgggggcctttttcccccccagggagtttccggggaaaaccccacccccgggcccagggggggccccaccggttttggcccaattaagggaagggtacccttttccggggcctttgtggagtagcaggtcaaatttgggtggaaaagggacccccctgcatggcctaagtagcagattctcagatccatctttttccatcaaatggcagtggtactttgactcatggccccacccattgtcctgctcgtccaccaaaatgcattcgtcttcgaccatgaggcgcttctggacggcgtccataccagcgtcgtcgaccactgcggcagccatgccgacctctctctccaggtcctaggggtcgcgtcgggcgggcggaggagcgggacgcgacggcgaaggcgtttgcggctgccccggggtgtgcgcggaatgtgtnnnn

SEQ ID NO: 7340 - DNA, 540 bp, Zea mays
  misc_feature (539)..(539): n is a, c, g, or t
  Peptide Sequence Number=SeqID_12704
  Probeset Number=SeqID_21743
gaggcacccaatcgggcacggcggcccagccggccatttaaaggtggcagttagggttggacctaaccggccatcccggccaggcggcggcggcggccagccatggcagcgggcgcggaggcgaggcaccagcggccttgcgcgcgcgggcgcagccctcgacggcgcgggtgcagaggccccgggcggggcgggcgctccggccagccccctgcagatcgagcgcccccgctggcggcgcggcacacgttcactgcgcgggcagcggcctctacgcccgggcgcggccctcggcacgctggccacggcggcggtgcaggcgcgtgtccatggcgcgggcagcagccactacgcgcaggcgcggcctccggcaacgcggcgcggtggcccggccatggctgcgcgggcgtgttcccttgcgcgctggcgtggctccctggcatcgcgggcccgctgccccgacgcgcgctcgggcgagtccctcggcggcgcaggcggccagggcgtggttctccgatagcgcaggcacgcggccccang

SEQ ID NO: 7341 - DNA, 336 bp, Zea mays
  misc_feature (109)..(109): n is a, c, g, or t
  Probeset Number=SeqID_21744
agcggcgcgacggcacctgagcgactgcggcggcggcggcggcggcggcggcgcctcggagcgggcggcccgggctgtagtgccggcgccgccgcgtcttcccggtctnctttcccggccgcacagggtgttataggatcacattgacaaaagtaccatggagttttatgagtcagcatattttattgttcttattccttcaatagttacagtaattttcctcttcttctggcttttcatgaaagaaacattatatgatgaagttcttgcaaaacagaaaagagaacaaaagcttattcctaccaaaacagataaaaagaaagcaaaaaaaaaaaa

SEQ ID NO: 7342 - DNA, 398 bp, Zea mays
  misc_feature (1)..(23): n is a, c, g, or t
  Peptide Sequence Number=SeqID_12705
  Probeset Number=SeqID_21745
nnnnnnnnnnnnnnnnnnnnnnntaagtgcttgcaaaagctcagttatcgtatcggttggctgatcgcaaccgtacatgcgacagagaaaataagtgacacggacaaaatcctgatgagacactgaacactccgcttgcagttccatcaccttttctcaagcacgacttgaaattgccttgaaaccaagaaatataggcatgcttgctatccacaccagaatagatagagttttccgaagaaacctgctagtggaggaaggcctcctttcaaaatctcacgagctggatccgtgttgcggaaatcagtagcttggcaaacctggacgaagcggacacgcaggtcggcgacgacggcacggatcttgtagcattcggaggtgtggaaccccgcttcctc

SEQ ID NO: 7343 - DNA, 398 bp, Zea mays
  misc_feature (376)..(398): n is a, c, g, or t
  Peptide Sequence Number=SeqID_12706
  Probeset Number=SeqID_21746
gaggaagcggggttccacacctccgaatgctacaagatccgtgccgtcgtcgccgacctgcgtgtccgcttcgtccaggtttgccaagctactgatttccgcaacacggatccagctcgtgagattttgaaaggaggccttcctccactagcaggtttcttcggaaaactctatctattctggtgtggatagcaagcatgcctatatttcttggtttcaaggcaatttcaagtcgtgcttgagaaaaggtgatggaactgcaagcggagtgttcagtgtctcatcaggattttgtccgtgtcacttattttctctgtcgcatgtacggttgcgatcagccaaccgatacgataactgagcttttgcaagcacttannnnnnnnnnnnnnnnnnnnnnn

SEQ ID NO: 7344 - DNA, 456 bp, Zea mays
  misc_feature (3)..(3): n is a, c, g, or t
  misc_feature (15)..(15): n is a, c, g, or t
  misc_feature (46)..(46): n is a, c, g, or t
  misc_feature (53)..(53): n is a, c, g, or t
  misc_feature (64)..(64): n is a, c, g, or t
  misc_feature (72)..(72): n is a, c, g, or t
  misc_feature (81)..(81): n is a, c, g, or t
  misc_feature (94)..(94): n is a, c, g, or t
  misc_feature (130)..(130): n is a, c, g, or t
  misc_feature (153)..(153): n is a, c, g, or t
  misc_feature (164)..(164): n is a, c, g, or t
  misc_feature (190)..(190): n is a, c, g, or t
  misc_feature (198)..(198): n is a, c, g, or t
  misc_feature (206)..(206): n is a, c, g, or t
  misc_feature (212)..(212): n is a, c, g, or t
  misc_feature (233)..(233): n is a, c, g, or t
  misc_feature (236)..(236): n is a, c, g, or t
  misc_feature (263)..(263): n is a, c, g, or t
  misc_feature (268)..(268): n is a, c, g, or t
  misc_feature (276)..(276): n is a, c, g, or t
  misc_feature (281)..(281): n is a, c, g, or t
  misc_feature (292)..(292): n is a, c, g, or t
  misc_feature (295)..(295): n is a, c, g, or t
  misc_feature (297)..(297): n is a, c, g, or t
  misc_feature (307)..(308): n is a, c, g, or t
  misc_feature (314)..(314): n is a, c, g, or t
  misc_feature (324)..(324): n is a, c, g, or t
  misc_feature (364)..(364): n is a, c, g, or t
  misc_feature (383)..(384): n is a, c, g, or t
  misc_feature (440)..(440): n is a, c, g, or t
  misc_feature (450)..(450): n is a, c, g, or t
  misc_feature (452)..(452): n is a, c, g, or t
  misc_feature (455)..(455): n is a, c, g, or t
  Peptide Sequence Number=SeqID_12707
  Probeset Number=SeqID_21747
acnaatatacactanaggggcacataatttcatttttttttatatngggatancgtgctagtgnggacaaanctacagatncctccatgccagngggggattcacgacatgagacaagagaggagctaantatatgttgaaccatactactancagctatattnttatataataaagaataactatgtantactaacnttgttcangcaacntgtaaaatatttttcatctgnganagagggagaggctgtctgtgtctttgntaggncggggggngctgncccttcaaacntgnantttccctggnntggtgnggagaaaatnacagggggtattctcattttttttgggctcaccccgggangagcccccctaccgcttgnnctatagggctgcccctgctccaagcgcagtatgctacacttacgattttactgttnggcactttangnttnc

SEQ ID NO: 7345 - DNA, 445 bp, Zea mays
  Probeset Number=SeqID_21748
atctgtcatcctcaactgttgagtctacgccgagctgcagccgccaccgccagtccgccaccataactccgtaagcgtcgtccgcccgtccctgcgtggccgcgtcccacacaccgcagtcccgctcggccgctcctgccggcgcgctgcagcagtgcagcagctcggctgctcacctgtagcctgctcccgctactcgcggtcgcggcctcgcgggccacggcttgtcccgcccggcggtcgacgcccaggctaactggggtagtagcgtgccacaggggacagcggtccagttcaccggcctcgtcagctcgtgctcacaacagcagacagcaatccagttcaccagcctcgtcagttcgtgctcacaacaacagacagcggtccagttcaccggccaccggggtagcacgccacagtccacagaaaggtagcgcgtgactac

SEQ ID NO: 7346 - DNA, 731 bp, Zea mays
  misc_feature (1)..(1): n is a, c, g, or t
  misc_feature (10)..(12): n is a, c, g, or t
  misc_feature (14)..(14): n is a, c, g, or t
  misc_feature (16)..(17): n is a, c, g, or t
  misc_feature (722)..(722): n is a, c, g, or t
  misc_feature (727)..(731): n is a, c, g, or t
  Peptide Sequence Number=SeqID_12708
  Probeset Number=SeqID_21749
naccctcgannngngnncctcgaggccggccgggccgggttagcaaggcgatagataagaggaaggaaagaaagaacaggggcaggcgaagcgactgtcgcgaggcaaggccatcgtccgccatgacgctctccctctccacctctttcctctccatccccgccgccgcgaggaccaccgcccgcaccctacgctccgtcgtcccctcccaggggatgcgctgctcgatgcgcaagaaggggttgcacccggagatctacgaggacgcgaaggtgtactgcaacggcgagctggtgctggtgacggggggcacaaagccggagtacacggtggacgtgtggtccggaaaccacccctactatgtcggcgacacctcggcgctcgtggtcatggacagccagatcgagaagttccgcaagaagtggggccacatcaaggagtactggcccgaggaccagtggagggagatgcacccagacggcgacccggagttcgagcccgagggggacaactgattgatggctccccgttttcctcacccggtgcgtggtcaccggtccagtttacatttgccctcttgaatggaactagcaagtaatatgatgttcctgtctagaaatgacccttattgttcaattcctagcactctgataatcatgtggcacttggataattcaatgatctcctatttcaaaagcacaaaaaaaaaaaaaaaaaagcgncctannnnn

SEQ ID NO: 7347 - DNA, 571 bp, Zea mays
  misc_feature (386)..(387): n is a, c, g, or t
  misc_feature (571)..(571): n is a, c, g, or t
  Peptide Sequence Number=SeqID_12709
  Probeset Number=SeqID_21750
ctcctgaacacaccacccctcgtctccccacggaggccgtcctctcctctcctctgcgtccgccactgcccaccgctcgcccgcgcgcgctccattacctcggcgggcgatggccgacctatccaacaccggctccacctaacacgagcagcgcccccgcctaggcggcagctggctggtcggtcgtcgagcagctagcggcggcagcgcccggagggaggccgtctcactctcctcgtcggggcgggaggagatggaggccatcgtgggcgtccgcgcggcgccgcgtggccgtgcctggccccacctcgagaagccgccgccccccgcttgctgcgccagagtcccgacggcgagcctcgcggtcgcggcggacaggccacacnnaggctgccgcagctgcgagccgatctcgccgagggccgtgactgatcctacaccttgtcccctggacgccctccttcttcgcaccggccgttgtttctccccctccgcatttgtcccatgggtcgtttccgatagaacacaacataggactactgcgccacttagctacgcaagagacttaccn

SEQ ID NO: 7348 - DNA, 571 bp, Zea mays
  misc_feature (1)..(1): n is a, c, g, or t
  misc_feature (185)..(186): n is a, c, g, or t
  Probeset Number=SeqID_21751
nggtaagtctcttgcgtagctaagtggcgcagtagtcctatgttgtgttctatcggaaacgacccatgggacaaatgcggagggggagaaacaacggccggtgcgaagaaggagggcgtccaggggacaaggtgtaggatcagtcacggccctcggcgagatcggctcgcagctgcggcagcctnngtgtggcctgtccgccgcgaccgcgaggctcgccgtcgggactctggcgcagcaagcggggggcggcggcttctcgaggtggggccaggcacggccacgcggcgccgcgcggacgcccacgatggcctccatctcctcccgccccgacgaggagagtgagacggcctccctccgggcgctgccgccgctagctgctcgacgaccgaccagccagctgccgcctaggcgggggcgctgctcgtgttaggtggagccggtgttggataggtcggccatcgcccgccgaggtaatggagcgcgcgcgggcgagcggtgggcagtggcggacgcagaggagaggagaggacggcctccgtggggagacgaggggtggtgtgttcaggag

SEQ ID NO: 7349 - DNA, 322 bp, Zea mays
  Peptide Sequence Number=SeqID_12710
  Probeset Number=SeqID_21752
ccatcacagtacacaatcgatggcccattaggtccatttggcgttcccagttgccctccacgctcagacgctctacctcgctcgaatcctcgatcccaccggtggcggctgagcggctccaagctcctaagcacgacggcgccactgcggactgcggtacgctgttgctgagctcctacgcgcctgtggacgaccggtcgtggctccgcgcgcgtgcgagacggcgtcgcggcgagcggtgcgccggcgccgtggccgtgcgctcgtccgcagcgggcccgtggtgaggcgacgaggcggctccaccggccgcggctaccga

SEQ ID NO: 7350 - DNA, 184 bp, Zea mays
  Probeset Number=SeqID_21753
aaaattgagaaatagcattggagttaagaaaccaagaaaagaaaataatgagagagtttgacggcccaatcaaatcttacaaatgcctagaccaaaaggaggggtatcggaaggcgacatcgcgatatctcattcttacacattggaggaggggattgagcatccgccgcctccaaatgccaag

SEQ ID NO: 7351 - DNA, 637 bp, Zea mays
  misc_feature (601)..(637): n is a, c, g, or t
  Peptide Sequence Number=SeqID_12711
  Probeset Number=SeqID_21754
aagtcccaatccaccgacgaattccaaaccctgcccaggacctcggcgccactcgccgcacgtcgtccccgtccgcctccaccccaatccgatggggtatgaagagagcaaaaaacatctcctcagtctcagctaccctgagctgcaatgtttgtgcaaaaggtataaccttcctgctaagaagacccactctcagttagcaagttcgctcgcctcgctgcttgaggcatctccatctcctgctcctccctcctgtcaccagcaaatattgaaagaagcatccacatgcaatcatgctaacaacaaaagaggccatacaatggcagggatgatggaaaaccactggtgcctgcgaaacatcaaaaaggagttcagacccctggtgatgaaaactctaaaaaggggattggacctggaacgagaatcctcccggtttttatgaccctggggaaacccggaatatctggccctttatttttctgacctgagaactgctaaatatttacagccccaaagtgacgggggaattgcaactaatacaacaaatctagaatttgttggcaaacatgattgttcacctgctaacgtaattgtgtttaannnnnnnnnnnnnnnnnnnnnnnnnnnnnnnnnnnnn

SEQ ID NO: 7352 - DNA, 308 bp, Zea mays
  misc_feature (1)..(16): n is a, c, g, or t
  Peptide Sequence Number=SeqID_12712
  Probeset Number=SeqID_21755
nnnnnnnnnnnnnnnngaggtacaacatctacaagggaccacatcaccctcaaggactacgagatccacgacggcatgggcctcgagctctactacaactgagccaggcggcggccctctctcctactcggcaggttggtctgaattctgaaggcatgggtgcaattcggttcgcggtgatctcttaagctcatcacatatataaaagcaacctcaggtggctatggaagacatggcgggccaaactatgagggaccactgacaggtttgcaatacggtggtggatgggcaacctgcaaacttggtgg

SEQ ID NO: 7353 - DNA, 576 bp, Zea mays
  misc_feature (17)..(17): n is a, c, g, or t
  misc_feature (30)..(30): n is a, c, g, or t
  Probeset Number=SeqID_21756
atcgcttggcgtccgcnttttccccccganaggagagaatcggatgctcttctttgttttgtagccggctcggtcggttcgtcgaagatcccggatctgctctgtcacgaggtctttcggcgggtgttgtctcgcgaggtgtagcgagccaaggtctggtcgcctgttcaggagagtttcgagaagctgaaatggctcctaaagctgctcctgccaagaagggtgatgccaagatccatcccttgaaggttgccaaggctgtgaagtctggggcatccattaagaaaacccagaagatccgcacgtctgtgacatttcaccgccccacgaccctgaataaggctagggaccccaagtaccctcgaatcaccactaccggaaggaacaagctcgatcagtaccaacttctctattacccccttaccacttaatcagcgatcaagaacattgaagataacaaccctctggtcttcattgttgacctcaacgtatacgacaacaagatgaaggctgccctcaacaatatgtttgatatccaggcaaagaaggtctacaccttgattttgcctgatggga

SEQ ID NO: 7354 - DNA, 423 bp, Zea mays
  misc_feature (398)..(398): n is a, c, g, or t
  Peptide Sequence Number=SeqID_12713
  Probeset Number=SeqID_21757
gtttactcccgatccccatcagccatggcgataaagtgagggttccaggcggcggccgcttcagggagggctcgcggcggagacaggctcggcgctcgcgcggtcggcaggagctcgcagcgggcaagggctggctctcgggcaggaggtgctcgcagcacggtgctggcaggggtggctcgtggcgcaggcaaggagaagctcacgacaggggcggctaagacttcggtgcgggcacagttgcaggttgcagcagccactcgttgaagatgtttccctctgacgtcgagctagcattcaggtgttattcaaccattaacagataagtctcaatggccgaaagtcaaccttggcttcaagttattgccacctctggtaaaaagatcagtaggtagacnatggaagaacaggataaaaggatgc

SEQ ID NO: 7355 - DNA, 934 bp, Zea mays
  misc_feature (1)..(88): n is a, c, g, or t
  misc_feature (739)..(934): n is a, c, g, or t
  Peptide Sequence Number=SeqID_12714
  Probeset Number=SeqID_21758
nnnnnnnnnnnnnnnnnnnnnnnnnnnnnnnnnnnnnnnnnnnnnnnnnnnnnnnnnnnnnnnnnnnnnnnnnnnnnnnnnnnnnnnnccgtttacaatggagttcatatctaaatttacctgtgatattggtcattctgccgggaacaccccattatttctggcatgttgatactattatgtacattctttttactgatcgagtcatcgagtaaataaatatatatgccgaccacgaccagcggaactctgaatgggagccccttggctaattaccaaatccctcgcgtatttacaccgctgcgtgaatcgaaaaaccttaaccgcctattcacgtacccgctctagcgccacaggcaacctgaagctcccatccattcgatcattggctttaaaaaccgccccacgccggccccaaaagctcccgaaccaaaagaacccttcctgctcaatgatcgcctcccacacgccgtcgaagtcgaagtctacgccgccgtcgccgccgacagcgaagcacctgaacctctctttccaatcgctggggccctcctgctctcccatgcgcgaacgcggcctcaaagccgtcgtcgtccaggtccagcagggcggacagcttcatcccggatgctcttgacggcgccggcgggcatctcctgtgccaccgcctcaggatgaccctcttggtcttcacgaccaccttcctgggtagccggacgaataggaagacggtgacctgcannnnnnnnnnnnnnnnnnnnnnnnnnnnnnnnnnnnnnnnnnnnnnnnnnnnnnnnnnnnnnnnnnnnnnnnnnnnnnnnnnnnnnnnnnnnnnnnnnnnnnnnnnnnnnnnnnnnnnnnnnnnnnnnnnnnnnnnnnnnnnnnnnnnnnnnnnnnnnnnnnnnnnnnnnnnnnnnnnnnnnnnnnnnnnnnnnnn

SEQ ID NO: 7356 - DNA, 232 bp, Zea mays
  misc_feature (26)..(28): n is a, c, g, or t
  misc_feature (80)..(80): n is a, c, g, or t
  Peptide Sequence Number=SeqID_12715
  Probeset Number=SeqID_21759
gtcgattcaaccacactgctgccagnnntgccacaactatttactgccgccccctcatcaccgccacgggcccggcgagnaagcgccaccaggggagggaagccgaggcctaggacaggaggccatgtcaggggaccgctcgtccacggcagagcgccggcgggggatccggcgcctcctcctgcatccgcgcggcgaggcctcctcgctccgcctccgccgccagcgccgg

SEQ ID NO: 7357 - DNA, 472 bp, Zea mays
  misc_feature (10)..(10): n is a, c, g, or t
  misc_feature (27)..(27): n is a, c, g, or t
  misc_feature (36)..(36): n is a, c, g, or t
  misc_feature (85)..(85): n is a, c, g, or t
  misc_feature (231)..(231): n is a, c, g, or t
  misc_feature (293)..(293): n is a, c, g, or t
  misc_feature (365)..(365): n is a, c, g, or t
  misc_feature (370)..(370): n is a, c, g, or t
  misc_feature (381)..(381): n is a, c, g, or t
  misc_feature (391)..(391): n is a, c, g, or t
  misc_feature (430)..(432): n is a, c, g, or t
  misc_feature (436)..(436): n is a, c, g, or t
  misc_feature (439)..(439): n is a, c, g, or t
  misc_feature (442)..(443): n is a, c, g, or t
  misc_feature (445)..(446): n is a, c, g, or t
  misc_feature (448)..(448): n is a, c, g, or t
  misc_feature (451)..(451): n is a, c, g, or t
  misc_feature (455)..(456): n is a, c, g, or t
  misc_feature (461)..(464): n is a, c, g, or t
  misc_feature (466)..(468): n is a, c, g, or t
  misc_feature (472)..(472): n is a, c, g, or t
  Probeset Number=SeqID_21760
aagccatcgncgcccactgctcagttngcgcacganagtctcatcttcctcgcgcacaccaccggagccccctcctcttcctcgngcaacgggggcttcctctccctctccaagccgccgccgcccaccgccgtcagttcgcggatggctcatcttcctcgtgtagaccaccggagcccccttctcttcctcacgcagagcaccgggatcccccttttcctcgcgcagagncgacgcataggaggtctggcaaagtctcatcaagatggcaggagaatctacaaagttcaaancagtaaccatctgctgaaggtgatacactgtaataggtgaagcataagaagttttttcataagatcaaaggnagacnagggatagagntctatggcgntaaatagatgtttaaaggaaagtcatgatgagcaaaggnnnttgntgnggnnanngntgngagnntatgnnnngnnntatn

SEQ ID NO: 7358 - DNA, 638 bp, Zea mays
  misc_feature (1)..(79): n is a, c, g, or t
  misc_feature (145)..(147): n is a, c, g, or t
  Peptide Sequence Number=SeqID_12716
  Probeset Number=SeqID_21761
nnnnnnnnnnnnnnnnnnnnnnnnnnnnnnnnnnnnnnnnnnnnnnnnnnnnnnnnnnnnnnnnnnnnnnnnnnnnnnnggtattagactcgccgtccccgtttttatgtgggtcgccgccgagtagagtcgctaacccattaannnaggatgctcgtttcagagatgaaatcaagctggtctcttcttccccgatcacgactccgctgggccaacctccgtcgtccccttcttcctctgggaggaaaggaggatgtgttagaggcaattttggtaacagcccagcggttaggatcgaagggtttgattgccttgacagggacagtagaaactgcagcatccctgccttggcttagaaaccaaaccaacctcgaaaacgcatccactctgttgaattatctcatgaaaaccaatttagtgcgtcgtacatatatgagtttaaggatatggaaatgtgtggaatataatctttgagggaagtgaaagagcatgtgagatcaatcttttggagtttggttgttttgtttttaaagagtgtaaataggtgacggagtaaaaccgattttctgggttaagtttttagtattcgtggtcattttgtaagtataagtatcaagtctaaagatgaatcgttgagg

SEQ ID NO: 7359 - DNA, 338 bp, Zea mays
  Peptide Sequence Number=SeqID_12717
  Probeset Number=SeqID_21762
gccttggaccttggtgaagaaaagtcgccgcgttcctcttgcctgatgaaatcctcttctcgtctagatctgagcctccgcgtggcttcaggatcagatgcttggtccgatcgaacaacggtgagtcttgctctgttacttgatttttcgaaacgcatggttttgttttgtgatgatgtgcaggttccgatctgtttagtttgattgatgagttgacgcatcagctcgaagcgagacaaggctgccttgccaaacggacccttagcatagtctaatttttacctcatcacaaaaccaacctaaacacaataatagtacgctttccgtaaaaaaaaaaa

SEQ ID NO: 7360 - DNA, 810 bp, Zea mays
  misc_feature (1)..(10): n is a, c, g, or t
  misc_feature (711)..(716): n is a, c, g, or t
  misc_feature (733)..(734): n is a, c, g, or t
  misc_feature (755)..(755): n is a, c, g, or t
  misc_feature (763)..(810): n is a, c, g, or t
  Probeset Number=SeqID_21763
nnnnnnnnnnagatggggagttcgcgcaacaagttcacctctcttctcctcatgttctgcctggtggtgctggtgagagccgaatatgccaagtacaaggatccgaagcagcctctcgctgttcgcatcaacgatctgcttggtcggatgactctcgcggaaaagatcggccagatgactcagattgagagggtgaacgccacggcagaggccatgtccaagtacttcataggcagcgtgctgagtggtgggggcagcgtgcctgctcctcaagcatctgctggggattgggcttcgatggtgaatgagatgcaaaagggttctctttctacccgccttggcattccgatgatctacggtattgatgctgtccatggcaacaataatgcctacagagctactatcttcccccacaatattgggcttggagctaccagggaccctatgctcgtgaagaggataggagaagcaactgctcttgaagttagagcaaccggaatctcttatgcctttgctccatgcattgcggtttgtagagacccaagatggggacggtgctacgaaagctatagcgaagacccaaaggctgtccaggcaatgaccacactcatctctggcttgcaaggcgacgctccgtcagattacacaggaaggccatatgttggtggaagcaagaaggtcgcggcatgcgctaagcactatgtcggtgannnnnnaacatacatgggaatcnncgcaaacaacacaatcatcgntacgcatnnnnnnnnnnnnnnnnnnnnnnnnnnnnnnnnnnnnnnnnnnnnnnnn

SEQ ID NO: 7361 - DNA, 605 bp, Zea mays
  misc_feature (605)..(605): n is a, c, g, or t
  Peptide Sequence Number=SeqID_12718
  Probeset Number=SeqID_21764
aatttttttactatttaggtgggctacctgttttccgggagagaacaacgaccttttcaaaggactgatttatagttcgattttcttgcctagttgcctgtcggtagcgccggataaaataggtcgtcgaattaggccccgtttcaatctcacgggataaactttagctttctgctaaactttagctatatgaattaaagtgctaaagtttagtttcaattaccatcattagctttcctgtttagattacaaatgactaaaagtagctaaaaaatagctgctaaagtttatctcgcaagattggaacagggtcttagctggattggttaacgagccaattctgagctaaactatctatcacattttagtaaatgagctaatttgtaaactatatacatatcatctatacatcaaatgatgaaaatattatatgtatatggggggtctacgatctatgagttaaagtgatgatttccattttaggtaggtgcactgttatccagtctagtactgtgttggttggttgggtccggattcgacctacgtacacggacccggtccgtacctgaaggcagaatcaaccgaacggcatcgggttggcattn

SEQ ID NO: 7362 - DNA, 605 bp, Zea mays
  misc_feature (1)..(1): n is a, c, g, or t
  Probeset Number=SeqID_21765
naatgccaacccgatgccgttcggttgattctgccttcaggtacggaccgggtccgtgtacgtaggtcgaatccggacccaaccaaccaacacagtactagactggataacagtgcacctacctaaaatggaaatcatcactttaactcatagatcgtagaccccccatatacatataatattttcatcatttgatgtatagatgatatgtatatagtttacaaattagctcatttactaaaatgtgatagatagtttagctcagaattggctcgttaaccaatccagctaagaccctgttccaatcttgcgagataaactttagcagctattttttagctacttttagtcatttgtaatctaaacaggaaagctaatgatggtaattgaaactaaactttagcactttaattcatatagctaaagtttagcagaaagctaaagtttatcccgtgagattgaaacggggcctaattcgacgacctattttatccggcgctaccgacaggcaactaggcaagaaaatcgaactataaatcagtcctttgaaaaggtcgttgttctctcccggaaaacaggtagcccacctaaatagtaaaaaaatt

SEQ ID NO: 7363 - DNA, 537 bp, Zea mays
  Peptide Sequence Number=SeqID_12719
  Probeset Number=SeqID_21766
tcagctacgtaggccccccccccccccccccgaacaagtgtgggggcactgcaactttgcaagatgtaaggcaaagtattgggctgaatgcaaccatggcactactgggtttagcaatcatttgaagtcagctcacaagattgtgaaagggcagctacaactcagtttagaaaaggatgggaaagatataactactattaagcctttcaggtcgggaggtctggtgccttgttaatgagaaatgggttgtgtgctcatgttcttggtgttggtacggtcattctgaagtttacttcgggaaagacggtgccattgaagagcgtgcagcatgtgccctctatcaagaagaatctcattagtgcttctatgttatgtcaagatgggtacaaagttgtttttgagtcaaataaatgtgttatgttgaaacatgatacttttgttggtaaaggatatgactgcggaggcttgttccactcatctctgcatgatgtgtgtaataaaatggtgaattctgttaataaaaaaaaaaaaaaaaaa

SEQ ID NO: 7364 - DNA, 880 bp, Zea mays
  misc_feature (1)..(5): n is a, c, g, or t
  misc_feature (825)..(880): n is a, c, g, or t
  Peptide Sequence Number=SeqID_12720
  Probeset Number=SeqID_21767
nnnnngaggccggccgggactccctatagctagctagatctcttctccattcgtttacctgaagcacaagaataaacgcagccgggcatgggcgaagctaagctcaacaacgtgaccgtcctgctggtggccctcctcctcctgagcagtggcgttcaggacgctgccgccatgccaggcacgttgaactacgacgcgattgtcgccgacgagccaaacggaaagaacaaggacctgtaccgccccgtcgccaacgccaataaatacacccgcgggtgcgagcccatagaacgctgcaggggcgcgcgctgatcaccaagcatatacatatagcacatcgatttcttattattgcatgcacgtttatataagtgctcattgtcttgctgttgtaagtgccagcacaagcatatatacggcgtttatatatactacatactccgatcgttcattccgttccttagtaaccaggttcccggatcaatgtgatcgaggaacaggaacgtggtacacggtacgctactaaaactaggatttaacgctactggaacgagattgtttccacgttcccggaacagaacgaacattcccggaacgaggaacgtggccaagttccccgtccccggttgctaagttccgttccaacttgtaaattatattaaagtgtccaagagtcaaagccactccatcagataatttctctattttactatgtatcaaataacacagatatatatcaacaaaacgacatggaatttggaacggtagaagtacactcttttttaataaatgaacacgcttgaatcatatatataatatagaaannnnnnnnnnnnnnnnnnnnnnnnnnnnnnnnnnnnnnnnnnnnnnnnnnnnnnnn

SEQ ID NO: 7365 - DNA, 617 bp, Zea mays
  misc_feature (557)..(557): n is a, c, g, or t
  misc_feature (574)..(575): n is a, c, g, or t
  misc_feature (579)..(580): n is a, c, g, or t
  misc_feature (595)..(596): n is a, c, g, or t
  misc_feature (601)..(617): n is a, c, g, or t
  Probeset Number=SeqID_21768
gatttggggtccaaacgaatcaggaatgagtatttcttattgggtcgttagatttgcattagggtataggaggcaaccatcgtttcctgttatcttcggtatcacatgagccttccctacccagccgtcatgtccctccgttccctgatctatcgaaacaaatgtagaagaagtgaaggggtctgctcctgccgccggatctgcttggctttggaaaagctaggtgaaaataaggatagaagggagggaggaggacgtggtctccttgaggttgcagtgctccgtatcagacttaattcattgtcgccttattggtgaagtcttttcaggtgtgctaattggatatgtctgctctaggaatgggagtagctgcagttcacacacatagatgacactttaatcgaagtttggcttgctactaatttaagtgaatggaagagtagagtctttaactagcttggttttaccttttgtttaattagtgcttttgctctgtcttagaggtgatgtgtcaaaattcaatcctattttggcatagcagtgtaattttagtagcnccctagagttgtttttnntaanngaccgtggtgagttnncatcnnnnnnnnnnnnnnnnn

SEQ ID NO: 7366 - DNA, 608 bp, Zea mays
  misc_feature (1)..(8): n is a, c, g, or t
  Peptide Sequence Number=SeqID_12721
  Probeset Number=SeqID_21769
nnnnnnnnctctcaatatgcagaaaattacagttggtctgagcaagactgctagccccgtgcacaccaaatccagccctcctcgacgtccactcaccgggacgggttcaaatgggagggcgttggatagcatctcttcgcaggatgctgctgctaaggggatcacaaatccacttgctagtatgaaagatgagcctgttctggacaaggcaatgcgccgaatagcagaacacaatctggatattggtgggaaacgtcgggaaaggaccctgtccaacgagggctttggtatgtcagaggctggggacactggtcatttttactgtagcccagaggcttcgcgcatgggctgtgctacagagacaggactcatgcaattttttggtaatggctacgcaacatttaactcaagtggccaaggagtttttttcccgggaacatggttggcggtctagtcttcggattgatagccactagtgtgtgtttttagattttgttgggctgtgtgctcctatgggcagaggccggaagtgactttcaaggaattgtatcatctcgatgtactattcttgaatgaataaaaatccttccctttcaaaaaaaaaaaaa

SEQ ID NO: 7367 - DNA, 584 bp, Zea mays
  Peptide Sequence Number=SeqID_12722
  Probeset Number=SeqID_21770
tgctgtcgccgtgctgtcgctttgcttctccgtcccactgaaccatcgccgccggctagccgcgggagaagttcccgccgcgccgacgccgacgccgaaaccgccgtcgcgtgttttgaagctctcgaagaaggggcgcgcagcatgagagcggccgtgaactctccacctccgcactgctactcgcaccgtcgtgccagcgccacgctgctggatgcgcgccatgtgttcgaccacgtgccgccgcagcgcctaccgaacctggccgcgggactccgcgtgcggcccatcgccgcggccgaatggaggcccgcgcggcgctcggccgcatctgcggctgcccgcacctgtggcgccgcttcaggacattcctgcaaatcccaacacccgcttcttcagccttatcgcgcactagtagctccgtctgcattcttgccatcaagacggagctctgaaggctacattcctcgtagctgctccagctcatcgctccagatctatagccggtcaccactgttaaatctatcgccgtcttcagctctcatggtatcctcccagctcacgggctcctccgacgtagccca

SEQ ID NO: 7368 - DNA, 536 bp, Zea mays
  misc_feature (1)..(22): n is a, c, g, or t
  misc_feature (44)..(44): n is a, c, g, or t
  misc_feature (106)..(106): n is a, c, g, or t
  misc_feature (287)..(287): n is a, c, g, or t
  misc_feature (420)..(420): n is a, c, g, or t
  Probeset Number=SeqID_21771
nnnnnnnnnnnnnnnnnnnnnnccccccctactgcatccacgcngcttggccgccgtcttgccaagacccggcaactggattgttgctctgaaaagcacttgtagnaatccatagacttccttcgtgagggtgatcctacatttcgagaagagcttcttaactttacacaaagggggcgtattctgcaactttcaaactttaaggatgactccagtccaattggcttggggttgttcctgcctgggtgcgcacatatggtttgtttttgggaaaaaaggttggaggngcttcagaagttctgaagtatgatgttgaaagctggagcgtttgtccaaacaaagggtcaaggtccctgaaaagggtcacagtagaaaccagaagagttggattcacaggaatctggttaaagcagctgccanaatttgcagcagttactataccacctcgttgggatggtcgggtggattatctccgttaacttctgggctatctagtctgctagctccttctaaatttggttatttccccccttttt

SEQ ID NO: 7369 - DNA, 517 bp, Zea mays
  misc_feature (7)..(7): n is a, c, g, or t
  misc_feature (14)..(14): n is a, c, g, or t
  misc_feature (16)..(16): n is a, c, g, or t
  misc_feature (18)..(18): n is a, c, g, or t
  misc_feature (21)..(21): n is a, c, g, or t
  misc_feature (23)..(23): n is a, c, g, or t
  misc_feature (29)..(29): n is a, c, g, or t
  misc_feature (31)..(31): n is a, c, g, or t
  misc_feature (40)..(40): n is a, c, g, or t
  misc_feature (45)..(45): n is a, c, g, or t
  misc_feature (47)..(47): n is a, c, g, or t
  misc_feature (51)..(51): n is a, c, g, or t
  misc_feature (56)..(56): n is a, c, g, or t
  misc_feature (66)..(66): n is a, c, g, or t
  misc_feature (77)..(77): n is a, c, g, or t
  misc_feature (79)..(79): n is a, c, g, or t
  misc_feature (81)..(81): n is a, c, g, or t
  misc_feature (92)..(92): n is a, c, g, or t
  misc_feature (108)..(108): n is a, c, g, or t
  misc_feature (128)..(129): n is a, c, g, or t
  misc_feature (139)..(139): n is a, c, g, or t
  misc_feature (149)..(149): n is a, c, g, or t
  misc_feature (151)..(152): n is a, c, g, or t
  misc_feature (161)..(161): n is a, c, g, or t
  misc_feature (166)..(166): n is a, c, g, or t
  misc_feature (170)..(170): n is a, c, g, or t
  misc_feature (172)..(172): n is a, c, g, or t
  misc_feature (184)..(184): n is a, c, g, or t
  misc_feature (212)..(212): n is a, c, g, or t
  misc_feature (227)..(227): n is a, c, g, or t
  misc_feature (240)..(240): n is a, c, g, or t
  misc_feature (259)..(259): n is a, c, g, or t
  misc_feature (264)..(264): n is a, c, g, or t
  misc_feature (273)..(273): n is a, c, g, or t
  misc_feature (277)..(277): n is a, c, g, or t
  misc_feature (285)..(285): n is a, c, g, or t
  misc_feature (301)..(301): n is a, c, g, or t
  misc_feature (305)..(305): n is a, c, g, or t
  misc_feature (308)..(308): n is a, c, g, or t
  misc_feature (324)..(324): n is a, c, g, or t
  misc_feature (327)..(327): n is a, c, g, or t
  misc_feature (338)..(338): n is a, c, g, or t
  misc_feature (355)..(355): n is a, c, g, or t
  Peptide Sequence Number=SeqID_12723
  Probeset Number=SeqID_21772
caaaganttttttngngnccntnggaaananttttctctnttctncngganaaccnagaaaaggantctttgttttnantntcagatttcgnttaaagggggccaagnctctttgaaagcagggtttnnccttcctggntttccttagntnngaatccccnttttngctntntaaaacaattgnagacaatccttcctcccagtttgcagtntcatcctatctcttntcatttcatcccngaccaatttctccccatangttcntgcagttcntgtngaagtganccgcaggagacgtacntcgncgncatggggcgggagcgncgncggcggggtcnccccaaaatcccgcggntaccggctctgtggaggaaccgcgatcctttccgggatccaggttgggtagtggagtgcgcgctcccttgcttcgactaggatttataaagaaggagccgggagagggtttgatttaaaagggggagagcgggagggaagaagcgagcccggcgaaggggaa

SEQ ID NO: 7370 - DNA, 517 bp, Zea mays
  misc_feature (163)..(163): n is a, c, g, or t
  misc_feature (180)..(180): n is a, c, g, or t
  misc_feature (191)..(191): n is a, c, g, or t
  misc_feature (194)..(194): n is a, c, g, or t
  misc_feature (210)..(210): n is a, c, g, or t
  misc_feature (213)..(213): n is a, c, g, or t
  misc_feature (217)..(217): n is a, c, g, or t
  misc_feature (233)..(233): n is a, c, g, or t
  misc_feature (241)..(241): n is a, c, g, or t
  misc_feature (245)..(245): n is a, c, g, or t
  misc_feature (254)..(254): n is a, c, g, or t
  misc_feature (259)..(259): n is a, c, g, or t
  misc_feature (278)..(278): n is a, c, g, or t
  misc_feature (291)..(291): n is a, c, g, or t
  misc_feature (306)..(306): n is a, c, g, or t
  misc_feature (334)..(334): n is a, c, g, or t
  misc_feature (346)..(346): n is a, c, g, or t
  misc_feature (348)..(348): n is a, c, g, or t
  misc_feature (352)..(352): n is a, c, g, or t
  misc_feature (357)..(357): n is a, c, g, or t
  misc_feature (366)..(367): n is a, c, g, or t
  misc_feature (369)..(369): n is a, c, g, or t
  misc_feature (379)..(379): n is a, c, g, or t
  misc_feature (389)..(390): n is a, c, g, or t
  misc_feature (410)..(410): n is a, c, g, or t
  misc_feature (426)..(426): n is a, c, g, or t
  misc_feature (437)..(437): n is a, c, g, or t
  misc_feature (439)..(439): n is a, c, g, or t
  misc_feature (441)..(441): n is a, c, g, or t
  misc_feature (452)..(452): n is a, c, g, or t
  misc_feature (462)..(462): n is a, c, g, or t
  misc_feature (467)..(467): n is a, c, g, or t
  misc_feature (471)..(471): n is a, c, g, or t
  misc_feature (473)..(473): n is a, c, g, or t
  misc_feature (478)..(478): n is a, c, g, or t
  misc_feature (487)..(487): n is a, c, g, or t
  misc_feature (489)..(489): n is a, c, g, or t
  misc_feature (495)..(495): n is a, c, g, or t
  misc_feature (497)..(497): n is a, c, g, or t
  misc_feature (500)..(500): n is a, c, g, or t
  misc_feature (502)..(502): n is a, c, g, or t
  misc_feature (504)..(504): n is a, c, g, or t
  misc_feature (511)..(511): n is a, c, g, or t
  Peptide Sequence Number=SeqID_12724
  Probeset Number=SeqID_21773
ttccccttcgccgggctcgcttcttccctcccgctctcccccttttaaatcaaaccctctcccggctccttctttataaatcctagtcgaagcaagggagcgcgcactccactacccaacctggatcccggaaaggatcgcggttcctccacagagccggtanccgcgggattttggggngaccccgccgncgncgctcccgccccatgncgncgangtacgtctcctgcggntcacttcnacangaactgcangaacntatggggagaaattggtcngggatgaaatganaagagataggatganactgcaaactgggaggaaggattgtctncaattgttttananagcnaaaanggggattcnnanctaaggaaanccaggaaggnnaaaccctgctttcaaagagncttggccccctttaancgaaatctganantnaaaacaaagantccttttctnggttntccngnagaanagagaaaantntttccnanggncncnaaaaaantctttg

SEQ ID NO: 7371 - DNA, 505 bp, Zea mays
  misc_feature (236)..(237): n is a, c, g, or t
  misc_feature (240)..(242): n is a, c, g, or t
  misc_feature (244)..(245): n is a, c, g, or t
  misc_feature (247)..(505): n is a, c, g, or t
  Probeset Number=SeqID_21774
aactccgatcgcacgagccccagcccccaaacagcctccaggtctagctagggtttcgtctccgccgcttgctctaatcctctcccggcacgcgacacgcgagggcgcagcgtttatggcggcgacaccggcggacgcgaagaccgaggccgccaagatggacctcctcgaggacgacgacgagttcgaagagttcgagatcgaccaagtggtaaaaaatattgctgttatatatnntgnnngnngnnnnnnnnnnnnnnnnnnnnnnnnnnnnnnnnnnnnnnnnnnnnnnnnnnnnnnnnnnnnnnnnnnnnnnnnnnnnnnnnnnnnnnnnnnnnnnnnnnnnnnnnnnnnnnnnnnnnnnnnnnnnnnnnnnnnnnnnnnnnnnnnnnnnnnnnnnnnnnnnnnnnnnnnnnnnnnnnnnnnnnnnnnnnnnnnnnnnnnnnnnnnnnnnnnnnnnnnnnnnnnnnnnnnnnnnnnnnnnnnnnnnnnnnnnnnnnnnnnn

SEQ ID NO: 7372 - DNA, 856 bp, Zea mays
  misc_feature (434)..(434): n is a, c, g, or t
  misc_feature (518)..(518): n is a, c, g, or t
  misc_feature (601)..(856): n is a, c, g, or t
  Peptide Sequence Number=SeqID_12725
  Probeset Number=SeqID_21775
ggtatacagcagcagaagcagcatcacgatcccggcccggcggcgcgtacgtcgacgaggaggaggaggacgtacgtacgcagagcagctgctggcaccatggctcccgtgagcatcagcgctgttccgttcctcccgacggcggcggagggggagacgaagctgcgcgcgtcgttcgtgcgcgaggaggacgagcgccccaaggtgccgcgagaccgcttcagcgacgaggcgccccgtggtgtcagcacccgcatcaaggtccatacaacagagctcgtcatgtccgagatccagcgcgcgactggcccacgacctggagacggagcggggccatccctccccggatggagcgaccccaccgccctgggactgttgtcgccccagtgcccccgaaacatccgtctccgcccttctgcgtagggcgaactagngttccgagagcctcccagccgccgcggactcgtcatacctcacggccgcgcggttgggccaccgtggtagaggcgggagggccntcgccgcacgcggcatccgaggccgccgcgtttcaggggccgctcggaggacagtcccttacagcacgtcagaggccggtagnnnnnnnnnnnnnnnnnnnnnnnnnnnnnnnnnnnnnnnnnnnnnnnnnnnnnnnnnnnnnnnnnnnnnnnnnnnnnnnnnnnnnnnnnnnnnnnnnnnnnnnnnnnnnnnnnnnnnnnnnnnnnnnnnnnnnnnnnnnnnnnnnnnnnnnnnnnnnnnnnnnnnnnnnnnnnnnnnnnnnnnnnnnnnnnnnnnnnnnnnnnnnnnnnnnnnnnnnnnnnnnnnnnnnnnnnnnnnnnnnnnnnnnnnnnnnnnn

SEQ ID NO: 7373 - DNA, 856 bp, Zea mays
  misc_feature (1)..(256): n is a, c, g, or t
  misc_feature (339)..(339): n is a, c, g, or t
  misc_feature (423)..(423): n is a, c, g, or t
  Peptide Sequence Number=SeqID_12726
  Probeset Number=SeqID_21776
nnnnnnnnnnnnnnnnnnnnnnnnnnnnnnnnnnnnnnnnnnnnnnnnnnnnnnnnnnnnnnnnnnnnnnnnnnnnnnnnnnnnnnnnnnnnnnnnnnnnnnnnnnnnnnnnnnnnnnnnnnnnnnnnnnnnnnnnnnnnnnnnnnnnnnnnnnnnnnnnnnnnnnnnnnnnnnnnnnnnnnnnnnnnnnnnnnnnnnnnnnnnnnnnnnnnnnnnnnnnnnnnnnnnnnnnnnnnnnnnnnnnnnnnnnnnnnnnctaccggcctctgacgtgctgtaagggactgtcctccgagcggcccctgaaacgcggcggcctcggatgccgcgtgcggcganggccctcccgcctctaccacggtggcccaaccgcgcggccgtgaggtatgacgagtccgcggcggctgggaggctctcggaacnctagttcgccctacgcagaagggcggagacggatgtttcgggggcactggggcgacaacagtcccagggcggtggggtcgctccatccggggagggatggccccgctccgtctccaggtcgtgggccagtcgcgcgctggatctcggacatgacgagctctgttgtatggaccttgatgcgggtgctgacaccacggggcgcctcgtcgctgaagcggtctcgcggcaccttggggcgctcgtcctcctcgcgcacgaacgacgcgcgcagcttcgtctccccctccgccgccgtcgggaggaacggaacagcgctgatgctcacgggagccatggtgccagcagctgctctgcgtacgtacgtcctcctcctcctcgtcgacgtacgcgccgccgggccgggatcgtgatgctgcttctgctgctgtatacc

SEQ ID NO: 7374 - DNA, 777 bp, Zea mays
  misc_feature (1)..(1): n is a, c, g, or t
  Peptide Sequence Number=SeqID_12727
  Probeset Number=SeqID_21777
naaacgattccatagtcgaagcgtagatcgcagcggagcagaggtaagttcctgaatcttcctcctgtgcctgctctgctgctcatcaacccggcaggcatggatggaaagagctttagcaacgaacagcaagcccaacaaaagaacccagacgcagtgacaaacagtgttccgagccaaggccaggagcccttgaacacgtttccagattcagacgatggaaacacgaacaccggtccgttgaatggccatgcagcagctcatgtgaacatggaagctgccatctccacggaggacgtcatacgggctggcgggttcggtgcgaaggacgacattggcagcctcctcccgacggcaattgattccaccgattttgaggcctcgctgcgggatgcccgtggtttcgagggcgagaaagcggcgccgtcgcatcctggactagggtggaagggggagaaagctgatggtggaaccaaactggcagatgtggcggagcagtgatcgcgctttcctcttctgtagcccagctccagccttcagaaaaccttgttttctgccacgtgtgtctggagagctgccctgcgtatgaacttttttcgtcacagtgttttgtgtgacacataacattctgtgtatgaacatgaggatgtcggttctatgttgtctgtcgtatagctctcatctctcaattgtgttggatgtctgcggaatgtgtagtccagcatggtttgctggctgttttaatcgactgctgatgagtggccacagagttgcaat

SEQ ID NO: 7375 - DNA, 794 bp, Zea mays
  misc_feature (772)..(774): n is a, c, g, or t
  misc_feature (790)..(792): n is a, c, g, or t
  Peptide Sequence Number=SeqID_12728
  Probeset Number=SeqID_21778
aaataatttcccgtggaggagttgatagtgaagggcgtccagttatggtcattgttggggctcactttttttttcgctgcttggatttggaacgatttgttttatatgtagtaaaggaatttgaatttttgattcagaacccttacacaattgtttatttccactttggggcatcattacacccccaccctgatttaggattcatgaaacggttacaacagatattaggtgggaagcataaaaaaaattttcatactatatacatactccccccgccactgggactgagaacacccgttatggggatgcaacttttttttgacggggaggtttggaaaaaagttgtatatgtcgacagacttgtgcagctattcaaatatgtcccccgtgaacagctccccattcctgattttgttttccaccatgcccttgaagtgaatggtggaaagggcataatcgttgccccaagaacaaagcatttttcccagagcccatttggttgatttgtcataaccctgcaaatgaacgtttcacagtccccctttcactatgtacagattttccatgattttgtccagtcctttgtagaagagtccccttttaaagctgggcattttgtatttagttgacattgttgctctgtgctattccttcccctttttgggaggcatatttaggtatcttaataacttttcaggtaaacaaaaaaaatgctaaatgtttctcaaaaaaaaagaaaaaaaaaaaaaaaaaaaaaaaaaaaaaaaaaagnnntctgcgttgttaccannnct

SEQ ID NO: 7376 - DNA, 655 bp, Zea mays
  misc_feature (23)..(24): n is a, c, g, or t
  misc_feature (56)..(62): n is a, c, g, or t
  misc_feature (81)..(83): n is a, c, g, or t
  misc_feature (96)..(97): n is a, c, g, or t
  misc_feature (102)..(109): n is a, c, g, or t
  misc_feature (159)..(161): n is a, c, g, or t
  misc_feature (655)..(655): n is a, c, g, or t
  Peptide Sequence Number=SeqID_12729
  Probeset Number=SeqID_21779
gctgcgggccagctcaaggagannctcacgcggcggcattctgtttcggctgcggnnnnnnncaaggagaacctcacgcgnnngaaacagaatgcnnctgcnnnnnnnnattgccgctcctcctggctcgattcccctcccaccagagcaggacacacnnntggcccagaactaccaactcctgcctccgttgaagccgccacctcaatatgaggaaacagaggatgagaatggagaaccaaacccaagtaacccggcgaattctaatccatcctattcgcaggatcagagtaataaggagcagcaacagcagcacactccccagcatggtcagaaggtttccttccaacttaatgctgtggcagctgcagctgcagctgcaaagcgtcctcggatgaccattgaccagctgaacatgggctaaccgttcgtcgtcgtcggttagacagtagtatctttttccgcaccctctagtctggtgaatcatgttttgaagcgagtgctgtagtggtatatgctcttactgactaccacccacatatttatggtctgtttggttgggctgtggctgtgaaaaaagttgctgtgggctgtgagctgtggaaaaagctgctgtagcctgtaagttgttaaaaagctaaaaaccatttggtgn

SEQ ID NO: 7377 - DNA, 479 bp, Zea mays
  misc_feature (1)..(7): n is a, c, g, or t
  misc_feature (11)..(16): n is a, c, g, or t
  misc_feature (56)..(63): n is a, c, g, or t
  misc_feature (65)..(65): n is a, c, g, or t
  misc_feature (67)..(67): n is a, c, g, or t
  misc_feature (69)..(69): n is a, c, g, or t
  misc_feature (71)..(71): n is a, c, g, or t
  misc_feature (76)..(77): n is a, c, g, or t
  misc_feature (95)..(97): n is a, c, g, or t
  misc_feature (106)..(110): n is a, c, g, or t
  misc_feature (124)..(126): n is a, c, g, or t
  misc_feature (136)..(138): n is a, c, g, or t
  misc_feature (181)..(185): n is a, c, g, or t
  misc_feature (218)..(219): n is a, c, g, or t
  misc_feature (279)..(284): n is a, c, g, or t
  misc_feature (293)..(293): n is a, c, g, or t
  misc_feature (295)..(299): n is a, c, g, or t
  misc_feature (304)..(304): n is a, c, g, or t
  misc_feature (306)..(307): n is a, c, g, or t
  misc_feature (311)..(315): n is a, c, g, or t
  misc_feature (317)..(321): n is a, c, g, or t
  misc_feature (323)..(331): n is a, c, g, or t
  misc_feature (334)..(335): n is a, c, g, or t
  misc_feature (338)..(346): n is a, c, g, or t
  misc_feature (348)..(349): n is a, c, g, or t
  misc_feature (353)..(354): n is a, c, g, or t
  misc_feature (357)..(359): n is a, c, g, or t
  misc_feature (363)..(408): n is a, c, g, or t
  misc_feature (410)..(426): n is a, c, g, or t
  misc_feature (433)..(433): n is a, c, g, or t
  misc_feature (435)..(446): n is a, c, g, or t
  misc_feature (448)..(450): n is a, c, g, or t
  misc_feature (452)..(458): n is a, c, g, or t
  misc_feature (460)..(476): n is a, c, g, or t
  misc_feature (479)..(479): n is a, c, g, or t
  Peptide Sequence Number=SeqID_12730
  Probeset Number=SeqID_21780
nnnnnnngggnnnnnntttttttttttttttttttttttttttttttttttttttnnnnnnnnanancnanagttnngggccaagaacccggtcnnntaatccacnnnnnaagaattagacttnnncaaaaaaaannngaaaaaaaatccatccagcattagatctatgaaatttacgacnnnnnggaggattacaatggccgtcaaccagaggttgnnagacctctcaactggctgcccttccagctggactgggggaaatccgtcgggaaattttannnnnngaacgccancnnnnngaaananntgannnnncnnnnncnnnnnnnnntgnncannnnnnnnntnnctgnntgnnncccnnnnnnnnnnnnnnnnnnnnnnnnnnnnnnnnnnnnnnnnnnnnnntnnnnnnnnnnnnnnnnnctggatncnnnnnnnnnnnngnnngnnnnnnnannnnnnnnnnnnnnnnncan

SEQ ID NO: 7378 - DNA, 479 bp, Zea mays
  misc_feature (1)..(1): n is a, c, g, or t
  misc_feature (4)..(20): n is a, c, g, or t
  misc_feature (22)..(28): n is a, c, g, or t
  misc_feature (30)..(32): n is a, c, g, or t
  misc_feature (34)..(45): n is a, c, g, or t
  misc_feature (47)..(47): n is a, c, g, or t
  misc_feature (54)..(70): n is a, c, g, or t
  misc_feature (72)..(117): n is a, c, g, or t
  misc_feature (121)..(123): n is a, c, g, or t
  misc_feature (126)..(127): n is a, c, g, or t
  misc_feature (131)..(132): n is a, c, g, or t
  misc_feature (134)..(142): n is a, c, g, or t
  misc_feature (145)..(146): n is a, c, g, or t
  misc_feature (149)..(157): n is a, c, g, or t
  misc_feature (159)..(163): n is a, c, g, or t
  misc_feature (165)..(169): n is a, c, g, or t
  misc_feature (173)..(174): n is a, c, g, or t
  misc_feature (176)..(176): n is a, c, g, or t
  misc_feature (181)..(185): n is a, c, g, or t
  misc_feature (187)..(187): n is a, c, g, or t
  misc_feature (196)..(201): n is a, c, g, or t
  misc_feature (261)..(262): n is a, c, g, or t
  misc_feature (295)..(299): n is a, c, g, or t
  misc_feature (342)..(344): n is a, c, g, or t
  misc_feature (354)..(356): n is a, c, g, or t
  misc_feature (370)..(374): n is a, c, g, or t
  misc_feature (383)..(385): n is a, c, g, or t
  misc_feature (403)..(404): n is a, c, g, or t
  misc_feature (409)..(409): n is a, c, g, or t
  misc_feature (411)..(411): n is a, c, g, or t
  misc_feature (413)..(413): n is a, c, g, or t
  misc_feature (415)..(415): n is a, c, g, or t
  misc_feature (417)..(424): n is a, c, g, or t
  misc_feature (464)..(469): n is a, c, g, or t
  misc_feature (473)..(479): n is a, c, g, or t
  Probeset Number=SeqID_21781
ntgnnnnnnnnnnnnnnnnntnnnnnnncnnncnnnnnnnnnnnngnatccagnnnnnnnnnnnnnnnnnannnnnnnnnnnnnnnnnnnnnnnnnnnnnnnnnnnnnnnnnnnnnngggnnncanncagnnannnnnnnnntgnncannnnnnnnngnnnnngnnnnntcanntntttcnnnnngntggcgttcnnnnnntaaaatttcccgacggatttcccccagtccagctggaagggcagccagttgagaggtctnncaacctctggttgacggccattgtaatcctccnnnnngtcgtaaatttcatagatctaatgctggatggattttttttcnnnttttttttgnnnaagtctaattcttnnnnngtggattannngaccgggttcttggcccnnaactntngntntnnnnnnnnaaaaaaaaaaaaaaaaaaaaaaaaaaaaaaaaaaaaaaannnnnncccnnnnnnn

SEQ ID NO: 7379 - DNA, 1346 bp, Zea mays
  misc_feature (1)..(1): n is a, c, g, or t
  Peptide Sequence Number=SeqID_12731
  Probeset Number=SeqID_21782
ncagcgagtcgtcacgttccttccccgcgtgcgaccccaaatcctaaaccctttccccatggccgccgccgccggcgccacctcgcccaagcgcctgagggtctactcgtccgccgccggcgacgccgactcctccaacggcgcgggcaacggcaggcgcgtggggacccacaacggcagcttccactgcgacgaggcgctcggctgcttcctcatccgcctcacctcccagttcgcaggcgccgacgtcgtccgcacacgcgactcccagatccttgattcgctggaggccgtgcttgacgttggtggtgtctatgatcccagccggcatcgctatgatcatcaccagaagggcttcaacgaggtcttggacatggctttaacacgaaacttagcagtgctgggcttgtttacaagcattttggtaaggagataattgcaaaggagcttcagcttaatgaggagcatgaagatgttcaccgcgtgtatcttgccatatacaaaagctttgttgaggcacttgatgcaatcgataatggaatcaatcaatatgatacagagcaaacccccaagtatgtgaacaatacacacttgtcttcacgtgttgggcgccttaatccagactggactgaggcagatcaatcacctgagaaggaaaatgccgcatttcaaaaggcaatggctcttgccggaagtgagtttatggagagtgtccgctttcatgttaagtcgtggctacctgcaagatctattgtcatggagtgtttgctgtcaagaggaaatgttgatccaagtggagaaatcatggttttagatagattctgcccgtggaaacttcatctatttgagctagaggaggagctgaagactgaccctctgaccaagtatgtgctgtatgaggatgagaggagcaaaggctggcgagtgcaggccgtctctgttgcacctgacagattcgagagccgaaaggctctcccagagaagtggaggggtatgagagatgatgaactgtccaaggaaaccggcatccctggctgtgtgttcatccatatgagtggcttcattggtgggaacaagacctacgagggagccttggaaatggcaagagctgccctcaaatgctaattcagccgaagcagcaagcagtaaaacagtcttacccatgttataactgattgaggttcatatgcagcgctgcacttgcaccaattttaccattgactagttggcatttgaatatgtaagttccgtggcgtaaaacatccacctgattagcagaaattgcttattttatccgtatgaggctgaacaagtagagttatatttgatgaaagacggtgacactc

SEQ ID NO: 7380 - DNA, 464 bp, Zea mays
  Peptide Sequence Number=SeqID_12732
  Probeset Number=SeqID_21783
gtctgctcggcgctcgctcactcgttcgcgcttcgcttccttccttccttccgtttcgctacggtcgatgagacgacagctgccgcgcggcactgggctcgggggagctggaccgccgggcgaggacaagagacggtatcgatgggctacgcgcgcaccgtgatggcggcggccgccgcgcgctgctgatggccgtaggcgcgcggttcctgggccccgcggcggcggcgttcgtggaggaagagctgccgcgcgcccgcgcggtggccgccacctggctcacgccgccgtacctgtacctcgtcatcaacgccatcatcatctccatcgccgcgtcgtcgcgcttccactcgagcggcggcggcggtggcggacgtccctcggccccgtcgtatgcgcccgcgccgacgccgacgccatcggaggagaaggagcgggcgaggagatggagcagcagcaggatg

SEQ ID NO: 7381 - DNA, 675 bp, Zea mays
  misc_feature (1)..(75): n is a, c, g, or t
  Peptide Sequence Number=SeqID_12733
  Probeset Number=SeqID_21784
nnnnnnnnnnnnnnnnnnnnnnnnnnnnnnnnnnnnnnnnnnnnnnnnnnnnnnnnnnnnnnnnnnnnnnnnnnnccgatgtgctcagtgccacaccgttgagaaggacggcggcaacaagatcggccctgccgtgcacggcctctggggccgcaagactggttccgtcgagggctacgcctacaccgatgccaacaagcagaagggcattgagtggaacgacgacactctcttcgagtacctcgagaaccccaagaagtacatccccggtaccaagatggccttcggtggcttgaagaaggccaaggaccgcaacgacctcattgcctacctcaaggactctaccaaataagcgactatggatcgcgtgtaatgttacgactttcgatagatggggaccgccaaggggcgtttgtactatagactctacacagcacttgttaagacatgccacgtgcttcgtatcctattcccatctatcctctttatgcgacttccgttccatacaacacaaccgtctttttcacccacgaagaaaagcctggcgttggtttgaggcggaaaaacaggaatgacatgagaccaaatttaaacgtgtccgcatcatagcccgatttttgttacgatagagatgttaaaactattctttttctaccctcaaaaaaaaaaaaaaaa

SEQ ID NO: 7382 - DNA, 299 bp, Zea mays
  misc_feature (30)..(30): n is a, c, g, or t
  misc_feature (103)..(103): n is a, c, g, or t
  misc_feature (112)..(112): n is a, c, g, or t
  misc_feature (137)..(137): n is a, c, g, or t
  misc_feature (195)..(195): n is a, c, g, or t
  misc_feature (236)..(236): n is a, c, g, or t
  misc_feature (259)..(259): n is a, c, g, or t
  misc_feature (272)..(272): n is a, c, g, or t
  Peptide Sequence Number=SeqID_12734
  Probeset Number=SeqID_21785
ccgcaacccctctcgatcgacacacgcagncgcgacccatcgcgacctgacccgaccctcccgagggccgccagccttatcctctccgcctccggcctcccgncgtcccctncgacccatcacaagcgcgagaagantgggcctcgacgttcggtgccactttctacaggtgggccttatggctggccccacggngggaagaatgtgcggcctttcagagggagggctaaacttcngagtaaaagcggcttaagggagnctgtactttcacnaagggatggggtcaggctatcaagaag

SEQ ID NO: 7383 - DNA, 345 bp, Zea mays
  misc_feature (25)..(25): n is a, c, g, or t
  misc_feature (55)..(55): n is a, c, g, or t
  misc_feature (113)..(113): n is a, c, g, or t
  misc_feature (119)..(119): n is a, c, g, or t
  misc_feature (161)..(161): n is a, c, g, or t
  misc_feature (200)..(200): n is a, c, g, or t
  Probeset Number=SeqID_21786
tcactagtccccccccccccccggnccgcaacccctctcgatcgacacacgcagncgcgacccatcgcgacctgacccgaccctcccgaggccgccagccttatcctctccgnctccgncctcccggccgtcccctccgaccctcacaagcgccgagaagntggggctcgcacgttcggtgccaccttctacagttgggncttatggctgccccacggggggaagaatgggcggcctttcagaggaggggtaacttcagagtaaaagcgggttaagggagctgtacttcacaaggatggggcagctatcaagaagctccagactgggagtcaataagcttgcgag

SEQ ID NO: 7384 - DNA, 753 bp, Zea mays
  misc_feature (1)..(54): n is a, c, g, or t
  misc_feature (694)..(694): n is a, c, g, or t
  Peptide Sequence Number=SeqID_12735
  Probeset Number=SeqID_21787
nnnnnnnnnnnnnnnnnnnnnnnnnnnnnnnnnnnnnnnnnnnnnnnnnnnnnngcgcgtgcgcggcgactccgggctggggtctccctcttcccttccctcagatccaactccgtttctccattccctttccctcccctagcccagccagggaaccagtctcagtgaatcccgcgcccggatcaatctcgcccaaggaagcagctcttcacgacttgcttccagatccatccatccatccatccatccatccgaggttgggccgtgggggtgtccgtgcggtggaaaatggggtaggggatccgcggtggacgcccgctcgcctcggggccttacggacaggggggtgttgtggaaccccgccgggggtttccgccgggcccgccccggggggtaaaaagttgggtgcccaagggggtttaagacagaccggaccttccttccccagggaagcccacagcgcgcgctcgatattgggggcgccaccccttttctcccttcacaaccacccctgctcacccccgcaatggactcaatatgctgtaaccaaaccccgcccccctcccaagccgtctctgccaagaccttttttctacccaaatttgggacagccggcagtcacgcccccaccccccgacaaaaacccaccccccgcaccacggaaacggtgacgaaaaacgtcggacgacccgtncccccaatccacgtacatcccgtgaccaaccgcgcaccccgcgccccagtggcgggcgc

SEQ ID NO: 7385 - DNA, 743 bp, Zea mays
  misc_feature (1)..(32): n is a, c, g, or t
  misc_feature (706)..(743): n is a, c, g, or t
  Probeset Number=SeqID_21788
nnnnnnnnnnnnnnnnnnnnnnnnnnnnnnnngtcacctaccgccgccgcaacgggtgagtttttccctacgaagctgtcgagtctcttcgctctcgaaatgtgtcgagataccatatctcgccatacagcctcatacttccgacacgaccatacgatcaggaactaaccatcctcctagctggaacactcgatccaacaccacgaggaccatccgtacacctggtggtgagctccgtgtgcttcacatcaagaagcgaggcaccgttcccaagtgtggtgactgcggctccaagctctcaggcattcccgctctccgaccccgcgagtactctcagatctccaagcccaagaagaccgtccagcgcgcctacggtggttcccgatgcggcggctgtgtccgcgaccgtatcgtccgagctttcctcattgaggagcagaagatcgtcaagaaggtgctcaaggagcaggagcagagccagaagaagaaataaatgcaatctccattgataggataggctttgcgtgggaaaggcaaggaactctgaggactcggttcattgctttggtgttcattaggcaaaaagggactgcatgatacatcgggccggtgccaaatggttggccgtccgccgtcttaggactgctactatcctcttggtgacttgaatgagaaagaacatcaaggggaaaaaaaaaaaaaaaannnnnnnnnnnnnnnnnnnnnnnnnnnnnnnnnnnnnn

SEQ ID NO: 7386 - DNA, 449 bp, Zea mays
  misc_feature (1)..(6): n is a, c, g, or t
  misc_feature (281)..(281): n is a, c, g, or t
  misc_feature (398)..(398): n is a, c, g, or t
  misc_feature (400)..(400): n is a, c, g, or t
  Peptide Sequence Number=SeqID_12736
  Probeset Number=SeqID_21789
nnnnnnaaccaaccaacccacagttcccatataggcagccatcggctacacagcctcgcctccgtaagcagagtgtgtcgttgcggaggcaggaagagagacgacggcggccatggcgacctcctttccaggggacgaccaccaagtgcaccgcctgcgaacaagacggtggtaccttgtggacaagctcaccgccgacaaccgcatctaccacaaggcctgcttccgctgccaccactgcaagggcaccctcaagctcgccaactcacctcctttttccnagggagtgcttctactgcaggcctcatttccgacagcttgttcaagaggaaaaggggagcttggacagaaagcttcgaaggaacttcccccaaggttgtcaagccagaaaagaaacngntggggaaatggagaatggctactaaagtctcaagcggcctttgctggac

SEQ ID NO: 7387 - DNA, 1056 bp, Zea mays
  misc_feature (728)..(728): n is a, c, g, or t
  misc_feature (785)..(787): n is a, c, g, or t
  misc_feature (789)..(790): n is a, c, g, or t
  misc_feature (798)..(798): n is a, c, g, or t
  misc_feature (815)..(815): n is a, c, g, or t
  misc_feature (825)..(832): n is a, c, g, or t
  misc_feature (854)..(855): n is a, c, g, or t
  misc_feature (859)..(861): n is a, c, g, or t
  misc_feature (870)..(874): n is a, c, g, or t
  misc_feature (877)..(877): n is a, c, g, or t
  misc_feature (879)..(879): n is a, c, g, or t
  misc_feature (896)..(898): n is a, c, g, or t
  misc_feature (910)..(915): n is a, c, g, or t
  misc_feature (926)..(928): n is a, c, g, or t
  misc_feature (930)..(931): n is a, c, g, or t
  misc_feature (938)..(945): n is a, c, g, or t
  misc_feature (947)..(947): n is a, c, g, or t
  misc_feature (949)..(949): n is a, c, g, or t
  misc_feature (967)..(967): n is a, c, g, or t
  misc_feature (969)..(971): n is a, c, g, or t
  misc_feature (974)..(976): n is a, c, g, or t
  misc_feature (978)..(978): n is a, c, g, or t
  misc_feature (985)..(985): n is a, c, g, or t
  misc_feature (987)..(988): n is a, c, g, or t
  misc_feature (990)..(992): n is a, c, g, or t
  misc_feature (1041)..(1045): n is a, c, g, or t
  misc_feature (1050)..(1052): n is a, c, g, or t
  misc_feature (1056)..(1056): n is a, c, g, or t
  Peptide Sequence Number=SeqID_12737
  Probeset Number=SeqID_21790
cccggtctcctacccagacaagccgtccgtctctcgttctctccttcctatcggctccacacctccacgcaactggaagcttcgctgcaatctgccctactcctcttccgccgcctccaacaccgcagacgcagctgccgcgggcgggagcttggacgtgctacgctgctctcatctcgtttccgcgcaggaattgttctcaatggcccgcgtgtatgttggcaacttggattcacgggtgacttctggggaactcgaagatgagttccgcgtgtttggagttctgcgaagtgtttggattgcacgtaaaccacctggctttgcatttattgattttgacgacaggagggatgcggaggatgctattcgtgatctagatggtaagaatggatggagagttgaactatctcgtaattccagtggtcgtggtggtcgtgatcggtatggtggatctgagtcgaagtgctatgaatgtggtgagactgggcactttgcacgtgaatgtcgtctgcgcattggctctggaggtctaggcagtggaagacgtcgcagtcgcagccgcagtcgcagtcgcagtcgcagcaggagcaggagcagaagccgcagccctagataccgcaggagtccaagctatagtagaaggagctatagccctcgttatcgctctccaaggcgccgtagtccttcgccagctcgcgcgcgcagctatagcaggtcaccatagtacnactgcaacgagtatgtatctctattgctaatgggtaatggtggcaggtactggtgtnnnannagctaggnctgaagcccgtgcctgnaacttcttgnnnnnnnnacttagcccttggtttggcggnnaggnnnaaatttggnnnnntcncnaactgcatgacttcagnnnaggtttaaaccnnnnnntagcttaattnnnanngtcttgnnnnnnnnantnaagaacttaaaatttggntnnnttnnncnactaagncnnannncctttcttctctgttgaaaaggcatgttctgcttaaacgactcggccannnnnggctnnnagtn

SEQ ID NO: 7388 - DNA, 740 bp, Zea mays
  misc_feature (1)..(52): n is a, c, g, or t
  Peptide Sequence Number=SeqID_12738
  Probeset Number=SeqID_21791
nnnnnnnnnnnnnnnnnnnnnnnnnnnnnnnnnnnnnnnnnnnnnnnnnnnnacgcttcacactctctcggtggccagtggcctggtccgttcggctccgatttcccgattcgattccaaccatccctctcccggcgtcctgccgtcctgcgggagggaggtgcaagcggaaccagcccggcaatggcagctgcgcggcggccgggggcgaaacccaggggcggcggcggcgcggggaagaggagcgcgtggttgccggcggacggcagcaagcgctgggggggaggccttctccctgctctacacgtcccttctggctcacgggctggggtggggggtcccccgatcccattccaggtcctaacaaaagggttcacgcaggctggggggagccagagtcctgggggcttgggcgcccaccccccccccggggggcccgccaccgtggccgcctgacgttgttactgataagctcacgccaggaaggacggccgatgcggttgtactggcgtcgggggacggcggggtgctgatgaggccttcacttgacggggcggtccagtggggtccttgagcgcaacgcattaatgatagcacttctcgtcgaaggggatacgcgtgacccgccgtggaagggtgtagttgggggggcgagacccaaaggaggggttcgccggtcagacagactccgtgagtggggccgccggatatgcatccagagcacacaaccgcctcacacc

SEQ ID NO: 7389 - DNA, 200 bp, Zea mays
  Probeset Number=SeqID_21792
accttctgcagtgaaggctggtttagcagcgacagctgttagggtctgatgcagtgtttgctggtttattaagaaactttgaaggattagtcaaagtatgtgaaccttctgcagtgaaggctggtttagcagcgacactgttcagggtctgatgcagtgtttgctggtttaacagcattattattattattgttgatgaa

SEQ ID NO: 7390 - DNA, 650 bp, Zea mays
  misc_feature (1)..(1): n is a, c, g, or t
  misc_feature (399)..(399): n is a, c, g, or t
  misc_feature (629)..(650): n is a, c, g, or t
  Peptide Sequence Number=SeqID_12739
  Probeset Number=SeqID_21793
ncgaccgcgactcggatcggatctctctcctgtgtagagccatgctgtgctgtgctggtagtagcagcagcagtagcaatgagtagtccagtccacagctccaagaacacgtggccgtcctttccttgcctctccctatcggtattcggtaacgcagggggagggcgccaccggctttaaccatggcctgtcgcttttgcctcgtctggtcggctggtccctctgctctatcccatcccccttgagcaggctgttgagcaagctgaactcatacgaacctcgatttcttccgtccggcgtttttttttctctcagtttctgaggtatttctccccctttctttcttccctccctcccagtagatcttcactggctcggggatttgaacaaaggccgtgngtcgaagctgggtgtgtccgttcattgtgcggaaaagaaggccagtgttatgtgtgaagtagtgaaggctaccagggaggctggctctcgcctcgccgaggatggatctcgaagatcgggagggggcctgaggctccccaagagagaatccgggaagaccaccttggtgctgcgtacaaaaaacccgggggggtggggtaaaggggacctcagaatctcccccgttggannnnnnnnnnnnnnnnnnnnnn

SEQ ID NO: 7391 - DNA, 823 bp, Zea mays
  misc_feature (236)..(236): n is a, c, g, or t
  misc_feature (239)..(239): n is a, c, g, or t
  misc_feature (243)..(243): n is a, c, g, or t
  misc_feature (259)..(259): n is a, c, g, or t
  misc_feature (261)..(261): n is a, c, g, or t
  misc_feature (268)..(268): n is a, c, g, or t
  misc_feature (279)..(279): n is a, c, g, or t
  misc_feature (287)..(287): n is a, c, g, or t
  misc_feature (297)..(297): n is a, c, g, or t
  misc_feature (301)..(301): n is a, c, g, or t
  misc_feature (322)..(322): n is a, c, g, or t
  misc_feature (329)..(329): n is a, c, g, or t
  misc_feature (335)..(337): n is a, c, g, or t
  misc_feature (342)..(342): n is a, c, g, or t
  misc_feature (345)..(346): n is a, c, g, or t
  misc_feature (351)..(351): n is a, c, g, or t
  misc_feature (361)..(361): n is a, c, g, or t
  misc_feature (375)..(375): n is a, c, g, or t
  misc_feature (383)..(383): n is a, c, g, or t
  misc_feature (390)..(390): n is a, c, g, or t
  misc_feature (392)..(392): n is a, c, g, or t
  misc_feature (396)..(396): n is a, c, g, or t
  misc_feature (399)..(399): n is a, c, g, or t
  misc_feature (408)..(408): n is a, c, g, or t
  misc_feature (410)..(411): n is a, c, g, or t
  misc_feature (418)..(418): n is a, c, g, or t
  misc_feature (420)..(420): n is a, c, g, or t
  misc_feature (428)..(428): n is a, c, g, or t
  misc_feature (430)..(430): n is a, c, g, or t
  misc_feature (433)..(433): n is a, c, g, or t
  misc_feature (435)..(436): n is a, c, g, or t
  misc_feature (438)..(442): n is a, c, g, or t
  misc_feature (445)..(445): n is a, c, g, or t
  misc_feature (448)..(448): n is a, c, g, or t
  misc_feature (452)..(453): n is a, c, g, or t
  misc_feature (459)..(459): n is a, c, g, or t
  misc_feature (462)..(462): n is a, c, g, or t
  misc_feature (465)..(466): n is a, c, g, or t
  misc_feature (476)..(476): n is a, c, g, or t
  misc_feature (479)..(479): n is a, c, g, or t
  misc_feature (492)..(492): n is a, c, g, or t
  misc_feature (501)..(501): n is a, c, g, or t
  misc_feature (504)..(504): n is a, c, g, or t
  misc_feature (506)..(506): n is a, c, g, or t
  misc_feature (509)..(509): n is a, c, g, or t
  misc_feature (517)..(517): n is a, c, g, or t
  misc_feature (520)..(521): n is a, c, g, or t
  misc_feature (523)..(523): n is a, c, g, or t
  misc_feature (525)..(525): n is a, c, g, or t
  misc_feature (529)..(530): n is a, c, g, or t
  misc_feature (536)..(537): n is a, c, g, or t
  misc_feature (539)..(539): n is a, c, g, or t
  misc_feature (541)..(541): n is a, c, g, or t
  misc_feature (544)..(545): n is a, c, g, or t
  misc_feature (548)..(548): n is a, c, g, or t
  misc_feature (550)..(550): n is a, c, g, or t
  misc_feature (557)..(557): n is a, c, g, or t
  misc_feature (563)..(565): n is a, c, g, or t
  misc_feature (568)..(568): n is a, c, g, or t
  misc_feature (570)..(573): n is a, c, g, or t
  misc_feature (576)..(576): n is a, c, g, or t
  misc_feature (584)..(584): n is a, c, g, or t
  misc_feature (586)..(586): n is a, c, g, or t
  misc_feature (588)..(588): n is a, c, g, or t
  misc_feature (592)..(592): n is a, c, g, or t
  misc_feature (596)..(597): n is a, c, g, or t
  misc_feature (599)..(599): n is a, c, g, or t
  misc_feature (601)..(823): n is a, c, g, or t
  Probeset Number=SeqID_21794
tctataaccaaaaagagaaagagtcctgaagtttctgtaggagctccttctggtggtaggaaaggtatgaatattatccctcacgctgctaattacttgacatttcaaacaccatctgaaatgcaaacgccattgaacaatggtgtagctactaatgagtcgtctgatcttacatcaagtgtggcaaagtgtatgttatgacaaataaggcacgtattcttcgagcaacacaactngtnctangacaccacaacagaangnatttccnaacagtgatanatgaagtnactcctacanactngcacaattgttactatacganagaatcncatgcnnngtccnctnnaacanattggtactnatacagtggcgaangagccatncggtttntngtanatncaccatgtnannacttatncntactatgncnatntnnannnnnatnatntacnntggagngtntcnnctacgatganacngcatactacgcanggaattgcngtncntgnccactgantgnntntntatnnacacgnngntnatnnggngnatgaacnttatcnnnatntnnnncgnactttgancntntacncgtnngnannnnnnnnnnnnnnnnnnnnnnnnnnnnnnnnnnnnnnnnnnnnnnnnnnnnnnnnnnnnnnnnnnnnnnnnnnnnnnnnnnnnnnnnnnnnnnnnnnnnnnnnnnnnnnnnnnnnnnnnnnnnnnnnnnnnnnnnnnnnnnnnnnnnnnnnnnnnnnnnnnnnnnnnnnnnnnnnnnnnnnnnnnnnnnnnnnnnnnnnnnnnnnnnnnnnnnnnnnnnnnn

SEQ ID NO: 7392 - DNA, 1024 bp, Zea mays
  misc_feature (1)..(158): n is a, c, g, or t
  misc_feature (854)..(854): n is a, c, g, or t
  misc_feature (862)..(862): n is a, c, g, or t
  misc_feature (869)..(869): n is a, c, g, or t
  misc_feature (880)..(880): n is a, c, g, or t
  misc_feature (883)..(883): n is a, c, g, or t
  misc_feature (940)..(940): n is a, c, g, or t
  misc_feature (943)..(943): n is a, c, g, or t
  misc_feature (954)..(954): n is a, c, g, or t
  misc_feature (958)..(958): n is a, c, g, or t
  misc_feature (963)..(1024): n is a, c, g, or t
  Peptide Sequence Number=SeqID_12740
  Probeset Number=SeqID_21795
nnnnnnnnnnnnnnnnnnnnnnnnnnnnnnnnnnnnnnnnnnnnnnnnnnnnnnnnnnnnnnnnnnnnnnnnnnnnnnnnnnnnnnnnnnnnnnnnnnnnnnnnnnnnnnnnnnnnnnnnnnnnnnnnnnnnnnnnnnnnnnnnnnnnnnnnnnnnnnggatagggtcccggctgcggaattcggccgaggagagagctcactagtccccccccccctacaaaaatcgaactaatcttccttttttacaaaagcttctcaaatctttcaaaggtttccaatttacgaagaaaggatctacaacatataatcactattaaagaatgagttatctgaacaaagtgtggatggcagcatcgttcgtagctgttcaaggaaacgccgatcacggcgtcaagttaaaaagcggtctcacctccgctcaccgtctccaacgaagactttcctccgatctccgtcctctcgccgccgcagatctaaccggcgactctctcccttcggaagaaagacgtcgtacctcttcttccactcccgatgagtctctccgacaagtcatgtacctcaactgctgggctcaaggctaaattcagataatgatggtcgtggctcgctcatgaactccgctgaatcagaatttttttctgatgcaaactgtatatagtttgggttcatctgtggtggtggactcgtgcttatgaaatcgcttgagtccggatttctggatgcaactgtatagttgggttacatctctgtgaatattagaatgtcctaaagatcaaagaaaaaaaaaaaaaaaaaaaactcgaggggggcccgggtccccattacccccttcgtgatgtcgtttacaatctnatggcccngggtgtngcaacgtcgtncanctgggatagccctggcgtatcctaccttcatgtcgcgtggaatggttcattttggcngtngttggtggatntgtntaaannnnnnnnnnnnnnnnnnnnnnnnnnnnnnnnnnnnnnnnnnnnnnnnnnnnnnnnnnnnnn

SEQ ID NO: 7393 - DNA, 832 bp, Zea mays
  misc_feature (23)..(23): n is a, c, g, or t
  misc_feature (245)..(245): n is a, c, g, or t
  misc_feature (248)..(248): n is a, c, g, or t
  misc_feature (264)..(264): n is a, c, g, or t
  misc_feature (267)..(268): n is a, c, g, or t
  misc_feature (270)..(270): n is a, c, g, or t
  misc_feature (272)..(273): n is a, c, g, or t
  misc_feature (278)..(278): n is a, c, g, or t
  misc_feature (280)..(281): n is a, c, g, or t
  misc_feature (299)..(300): n is a, c, g, or t
  misc_feature (306)..(306): n is a, c, g, or t
  misc_feature (312)..(313): n is a, c, g, or t
  misc_feature (315)..(318): n is a, c, g, or t
  misc_feature (321)..(321): n is a, c, g, or t
  misc_feature (324)..(324): n is a, c, g, or t
  misc_feature (327)..(327): n is a, c, g, or t
  misc_feature (332)..(333): n is a, c, g, or t
  misc_feature (335)..(335): n is a, c, g, or t
  misc_feature (343)..(344): n is a, c, g, or t
  misc_feature (346)..(346): n is a, c, g, or t
  misc_feature (351)..(351): n is a, c, g, or t
  misc_feature (355)..(355): n is a, c, g, or t
  misc_feature (369)..(369): n is a, c, g, or t
  misc_feature (373)..(373): n is a, c, g, or t
  misc_feature (376)..(376): n is a, c, g, or t
  misc_feature (382)..(382): n is a, c, g, or t
  misc_feature (386)..(387): n is a, c, g, or t
  misc_feature (392)..(392): n is a, c, g, or t
  misc_feature (398)..(399): n is a, c, g, or t
  misc_feature (401)..(405): n is a, c, g, or t
  misc_feature (407)..(409): n is a, c, g, or t
  misc_feature (412)..(413): n is a, c, g, or t
  misc_feature (428)..(429): n is a, c, g, or t
  misc_feature (431)..(432): n is a, c, g, or t
  misc_feature (434)..(434): n is a, c, g, or t
  misc_feature (439)..(439): n is a, c, g, or t
  misc_feature (448)..(448): n is a, c, g, or t
  misc_feature (450)..(451): n is a, c, g, or t
  misc_feature (454)..(454): n is a, c, g, or t
  misc_feature (456)..(458): n is a, c, g, or t
  misc_feature (460)..(460): n is a, c, g, or t
  misc_feature (463)..(463): n is a, c, g, or t
  misc_feature (465)..(465): n is a, c, g, or t
  misc_feature (467)..(467): n is a, c, g, or t
  misc_feature (471)..(471): n is a, c, g, or t
  misc_feature (473)..(473): n is a, c, g, or t
  misc_feature (477)..(477): n is a, c, g, or t
  misc_feature (479)..(479): n is a, c, g, or t
  misc_feature (482)..(482): n is a, c, g, or t
  misc_feature (486)..(486): n is a, c, g, or t
  misc_feature (489)..(489): n is a, c, g, or t
  misc_feature (492)..(494): n is a, c, g, or t
  misc_feature (496)..(496): n is a, c, g, or t
  misc_feature (501)..(501): n is a, c, g, or t
  misc_feature (505)..(506): n is a, c, g, or t
  misc_feature (508)..(508): n is a, c, g, or t
  misc_feature (510)..(510): n is a, c, g, or t
  misc_feature (515)..(516): n is a, c, g, or t
  misc_feature (521)..(521): n is a, c, g, or t
  misc_feature (523)..(523): n is a, c, g, or t
  misc_feature (529)..(529): n is a, c, g, or t
  misc_feature (533)..(534): n is a, c, g, or t
  misc_feature (536)..(536): n is a, c, g, or t
  misc_feature (543)..(543): n is a, c, g, or t
  misc_feature (549)..(549): n is a, c, g, or t
  misc_feature (551)..(551): n is a, c, g, or t
  misc_feature (555)..(555): n is a, c, g, or t
  misc_feature (558)..(558): n is a, c, g, or t
  misc_feature (563)..(563): n is a, c, g, or t
  misc_feature (572)..(572): n is a, c, g, or t
  misc_feature (579)..(583): n is a, c, g, or t
  misc_feature (585)..(585): n is a, c, g, or t
  misc_feature (603)..(603): n is a, c, g, or t
  misc_feature (609)..(609): n is a, c, g, or t
  misc_feature (612)..(614): n is a, c, g, or t
  misc_feature (620)..(621): n is a, c, g, or t
  misc_feature (627)..(627): n is a, c, g, or t
  misc_feature (634)..(634): n is a, c, g, or t
  misc_feature (641)..(641): n is a, c, g, or t
  misc_feature (647)..(648): n is a, c, g, or t
  misc_feature (658)..(658): n is a, c, g, or t
  misc_feature (660)..(660): n is a, c, g, or t
  misc_feature (670)..(671): n is a, c, g, or t
  misc_feature (674)..(674): n is a, c, g, or t
  misc_feature (678)..(681): n is a, c, g, or t
  misc_feature (689)..(689): n is a, c, g, or t
  misc_feature (691)..(695): n is a, c, g, or t
  misc_feature (701)..(701): n is a, c, g, or t
  misc_feature (703)..(704): n is a, c, g, or t
  misc_feature (706)..(706): n is a, c, g, or t
  misc_feature (712)..(712): n is a, c, g, or t
  misc_feature (717)..(717): n is a, c, g, or t
  misc_feature (719)..(719): n is a, c, g, or t
  misc_feature (721)..(721): n is a, c, g, or t
  misc_feature (728)..(728): n is a, c, g, or t
  misc_feature (738)..(738): n is a, c, g, or t
  misc_feature (740)..(740): n is a, c, g, or t
  misc_feature (746)..(746): n is a, c, g, or t
  misc_feature (748)..(748): n is a, c, g, or t
  misc_feature (750)..(753): n is a, c, g, or t
  misc_feature (758)..(758): n is a, c, g, or t
  misc_feature (761)..(762): n is a, c, g, or t
  misc_feature (765)..(765): n is a, c, g, or t
  misc_feature (767)..(767): n is a, c, g, or t
  misc_feature (771)..(772): n is a, c, g, or t
  misc_feature (781)..(781): n is a, c, g, or t
  misc_feature (788)..(788): n is a, c, g, or t
  misc_feature (792)..(792): n is a, c, g, or t
  misc_feature (803)..(803): n is a, c, g, or t
  misc_feature (805)..(805): n is a, c, g, or t
  misc_feature (811)..(812): n is a, c, g, or t
  misc_feature (817)..(817): n is a, c, g, or t
  misc_feature (820)..(822): n is a, c, g, or t
  misc_feature (825)..(825): n is a, c, g, or t
  misc_feature (830)..(830): n is a, c, g, or t
  misc_feature (832)..(832): n is a, c, g, or t
  Peptide Sequence Number=SeqID_12741
  Probeset Number=SeqID_21796
gaaaaggagtcttttttatttgntatctctcatctctctctgtctttgtctctgagctttgctttttatcaaacaagcatcatcatcacatccactttcttcttcttgctttctctgtctgtctctttacccaaatgtggactctttgagccgttattagatctctgccgcttcaataatggggagcttatcttctgaggaagacgacaaaagtctctaccgagagatgcaagaaggtacagtcncancaccgtacattagcgngcnntnannccaangnnagtgttacagcgcgcccnntgcagngtgaanngnnnnctntanctncatcnntncataccgnncngatgnggcngccccggcacacanattntancaatanagannacgcngtacanncnnnnntnnnacnnccgcactagaatacnntnnanatgcncaacgcacntnntanannntngcnantncgcncntggngnatngcancantannngnacacngtannancntgctnnagtanangcacanacanngnacgcatntatacntncgcngangagancaacatatnaggaacnnnnntnacgtacataggtatacanacagcncannntgtacnnacgaangtgcgtncgtgcgnacacgnnctagtacatngngagcatagtnnatncacnnnnacacaacncnnnnncgcatncnnanacagtncacgngnangcacatncgtgcatacncntacgtngngnnnncacgngcnnacncncagnncatacacantcacatncatntatacatgtancnagacanngtccntannngtnacgtncn

SEQ ID NO: 7394 - DNA, 877 bp, Zea mays
  misc_feature (1)..(14): n is a, c, g, or t
  misc_feature (19)..(19): n is a, c, g, or t
  misc_feature (43)..(43): n is a, c, g, or t
  misc_feature (219)..(219): n is a, c, g, or t
  misc_feature (335)..(335): n is a, c, g, or t
  misc_feature (466)..(467): n is a, c, g, or t
  misc_feature (518)..(518): n is a, c, g, or t
  misc_feature (530)..(530): n is a, c, g, or t
  misc_feature (595)..(595): n is a, c, g, or t
  misc_feature (605)..(606): n is a, c, g, or t
  misc_feature (613)..(613): n is a, c, g, or t
  misc_feature (622)..(622): n is a, c, g, or t
  misc_feature (626)..(626): n is a, c, g, or t
  misc_feature (628)..(628): n is a, c, g, or t
  misc_feature (632)..(632): n is a, c, g, or t
  misc_feature (671)..(671): n is a, c, g, or t
  misc_feature (674)..(674): n is a, c, g, or t
  misc_feature (680)..(680): n is a, c, g, or t
  misc_feature (690)..(690): n is a, c, g, or t
  misc_feature (696)..(696): n is a, c, g, or t
  misc_feature (701)..(701): n is a, c, g, or t
  misc_feature (707)..(707): n is a, c, g, or t
  misc_feature (716)..(716): n is a, c, g, or t
  misc_feature (720)..(720): n is a, c, g, or t
  misc_feature (744)..(744): n is a, c, g, or t
  misc_feature (754)..(754): n is a, c, g, or t
  misc_feature (758)..(758): n is a, c, g, or t
  misc_feature (785)..(785): n is a, c, g, or t
  misc_feature (787)..(787): n is a, c, g, or t
  misc_feature (807)..(807): n is a, c, g, or t
  misc_feature (812)..(812): n is a, c, g, or t
  misc_feature (815)..(816): n is a, c, g, or t
  misc_feature (818)..(818): n is a, c, g, or t
  misc_feature (833)..(877): n is a, c, g, or t
  Probeset Number=SeqID_21797
nnnnnnnnnnnnnngctgnggaattcgccgaggagctcactantccccccccccccgaaaagaagaacactttctctctgaaatctcaaattcatctcttctcttccgatttcgctgaatcatgtcagacgacgagcatcacttcgaatccagcgacgccggagcttctaagacttatcctcaacaagccggtaacattcgtaaaggtggtcacatcgncatcaagggacgtccctgcaaggtggttgaggtatcgacttcgaagactgggaagcatggtcacgccaagtgtcactttgttgccattgatatctttacttctaagaagcttgaanatatccgtccttcttcccacaattgtgatgttccacatgtgaatcgcgttgattatcagttgattgatatctctgaagatggctttggtagtcttcttactgataatggtagccactaaggatgatctgannctgccaacagatgaacttttactcacacagctcaagaatggatttgagganggtaaggatatngttgtgtctgtcatgctgcatgggaaagagcagatgtgtgctctcaaggaagttggcccaagtantaataataannaaccatnctctctttnacanangctntgtttttcaagtttgacagagcaaattgttataagaacnaangttggncctttttttngggctncttantataanttaaacccnatgngttcccatgcaagacactcttatntttactattntttnttaccaaaaaaaaaaaaaaaaaaactngnggggggcccggtgcccattnccctnttnngnagtcaatatcaattnnnnnnnnnnnnnnnnnnnnnnnnnnnnnnnnnnnnnnnnnnnnn

SEQ ID NO: 7395 - DNA, 779 bp, Zea mays
  misc_feature (21)..(21): n is a, c, g, or t
  misc_feature (45)..(45): n is a, c, g, or t
  misc_feature (191)..(191): n is a, c, g, or t
  misc_feature (195)..(195): n is a, c, g, or t
  misc_feature (198)..(198): n is a, c, g, or t
  misc_feature (207)..(208): n is a, c, g, or t
  misc_feature (211)..(211): n is a, c, g, or t
  misc_feature (215)..(216): n is a, c, g, or t
  misc_feature (219)..(219): n is a, c, g, or t
  misc_feature (227)..(227): n is a, c, g, or t
  misc_feature (234)..(234): n is a, c, g, or t
  misc_feature (236)..(236): n is a, c, g, or t
  misc_feature (239)..(239): n is a, c, g, or t
  misc_feature (241)..(242): n is a, c, g, or t
  misc_feature (244)..(244): n is a, c, g, or t
  misc_feature (250)..(250): n is a, c, g, or t
  misc_feature (255)..(255): n is a, c, g, or t
  misc_feature (260)..(260): n is a, c, g, or t
  misc_feature (264)..(265): n is a, c, g, or t
  misc_feature (268)..(268): n is a, c, g, or t
  misc_feature (273)..(273): n is a, c, g, or t
  misc_feature (281)..(282): n is a, c, g, or t
  misc_feature (290)..(290): n is a, c, g, or t
  misc_feature (292)..(294): n is a, c, g, or t
  misc_feature (298)..(298): n is a, c, g, or t
  misc_feature (305)..(305): n is a, c, g, or t
  misc_feature (309)..(310): n is a, c, g, or t
  misc_feature (312)..(312): n is a, c, g, or t
  misc_feature (314)..(314): n is a, c, g, or t
  misc_feature (320)..(322): n is a, c, g, or t
  misc_feature (324)..(324): n is a, c, g, or t
  misc_feature (326)..(326): n is a, c, g, or t
  misc_feature (333)..(333): n is a, c, g, or t
  misc_feature (335)..(336): n is a, c, g, or t
  misc_feature (339)..(339): n is a, c, g, or t
  misc_feature (342)..(344): n is a, c, g, or t
  misc_feature (349)..(349): n is a, c, g, or t
  misc_feature (351)..(351): n is a, c, g, or t
  misc_feature (354)..(355): n is a, c, g, or t
  misc_feature (361)..(361): n is a, c, g, or t
  misc_feature (364)..(364): n is a, c, g, or t
  misc_feature (366)..(366): n is a, c, g, or t
  misc_feature (370)..(370): n is a, c, g, or t
  misc_feature (372)..(372): n is a, c, g, or t
  misc_feature (374)..(374): n is a, c, g, or t
  misc_feature (377)..(378): n is a, c, g, or t
  misc_feature (383)..(386): n is a, c, g, or t
  misc_feature (388)..(388): n is a, c, g, or t
  misc_feature (390)..(392): n is a, c, g, or t
  misc_feature (398)..(398): n is a, c, g, or t
  misc_feature (404)..(405): n is a, c, g, or t
  misc_feature (408)..(408): n is a, c, g, or t
  misc_feature (412)..(412): n is a, c, g, or t
  misc_feature (415)..(415): n is a, c, g, or t
  misc_feature (418)..(419): n is a, c, g, or t
  misc_feature (422)..(424): n is a, c, g, or t
  misc_feature (427)..(427): n is a, c, g, or t
  misc_feature (432)..(432): n is a, c, g, or t
  misc_feature (438)..(439): n is a, c, g, or t
  misc_feature (441)..(441): n is a, c, g, or t
  misc_feature (443)..(443): n is a, c, g, or t
  misc_feature (445)..(445): n is a, c, g, or t
  misc_feature (447)..(449): n is a, c, g, or t
  misc_feature (451)..(451): n is a, c, g, or t
  misc_feature (462)..(463): n is a, c, g, or t
  misc_feature (467)..(467): n is a, c, g, or t
  misc_feature (470)..(471): n is a, c, g, or t
  misc_feature (473)..(473): n is a, c, g, or t
  misc_feature (476)..(476): n is a, c, g, or t
  misc_feature (479)..(479): n is a, c, g, or t
  misc_feature (481)..(482): n is a, c, g, or t
  misc_feature (486)..(486): n is a, c, g, or t
  misc_feature (489)..(489): n is a, c, g, or t
  misc_feature (491)..(491): n is a, c, g, or t
  misc_feature (497)..(497): n is a, c, g, or t
  misc_feature (499)..(501): n is a, c, g, or t
  misc_feature (506)..(506): n is a, c, g, or t
  misc_feature (511)..(511): n is a, c, g, or t
  misc_feature (514)..(515): n is a, c, g, or t
  misc_feature (517)..(518): n is a, c, g, or t
  misc_feature (520)..(520): n is a, c, g, or t
  misc_feature (526)..(526): n is a, c, g, or t
  misc_feature (529)..(532): n is a, c, g, or t
  misc_feature (534)..(534): n is a, c, g, or t
  misc_feature (538)..(538): n is a, c, g, or t
  misc_feature (540)..(540): n is a, c, g, or t
  misc_feature (543)..(543): n is a, c, g, or t
  misc_feature (545)..(545): n is a, c, g, or t
  misc_feature (547)..(547): n is a, c, g, or t
  misc_feature (549)..(549): n is a, c, g, or t
  misc_feature (551)..(551): n is a, c, g, or t
  misc_feature (553)..(553): n is a, c, g, or t
  misc_feature (558)..(560): n is a, c, g, or t
  misc_feature (562)..(563): n is a, c, g, or t
  misc_feature (565)..(566): n is a, c, g, or t
  misc_feature (570)..(571): n is a, c, g, or t
  misc_feature (574)..(576): n is a, c, g, or t
  misc_feature (578)..(579): n is a, c, g, or t
  misc_feature (581)..(581): n is a, c, g, or t
  misc_feature (583)..(583): n is a, c, g, or t
  misc_feature (587)..(589): n is a, c, g, or t
  misc_feature (591)..(591): n is a, c, g, or t
  misc_feature (593)..(594): n is a, c, g, or t
  misc_feature (599)..(599): n is a, c, g, or t
  misc_feature (601)..(779): n is a, c, g, or t
  Peptide Sequence Number=SeqID_12742
  Probeset Number=SeqID_21798
gagcttagagttctctctcantcctaaaacaatggcgtcttcttnagcgaggcgggtgtgtgctgctctactttctctgctcattccaatgttaattctccccgttctagcactatcctctgttctatctctaaaccttctcttaatttggttaaacctctgactggattcctttgtcttccacttgcgtnaacncgnttgaaccannttnaccnntcnatttcganaactcgnangantnncncgtacnatacntaatnccgnnagnttacncgatattnnagttagtngnnnttcnccggtcntctnngncntctccnnngnanatagctnanncgnaannnaatgncnccnntgatcncgnangctncncnganngaccnnnngngnnncatagngtgcannatntacnctncanngcnnnacnaacangacttnntntntnannngnaggcggaacannaaangtnncncgngcncnnaaanaancngacatncnnnttggncaacncannanngnaaaatngtnnnncnattntnctncncntnancnggttnnngnncnnaacnntannntnnantnttcnnncngnnataantnnnnnnnnnnnnnnnnnnnnnnnnnnnnnnnnnnnnnnnnnnnnnnnnnnnnnnnnnnnnnnnnnnnnnnnnnnnnnnnnnnnnnnnnnnnnnnnnnnnnnnnnnnnnnnnnnnnnnnnnnnnnnnnnnnnnnnnnnnnnnnnnnnnnnnnnnnnnnnnnnnnnnnnnnnnnnnnnnnn

SEQ ID NO: 7396 - DNA, 828 bp, Zea mays
  misc_feature (1)..(1): n is a, c, g, or t
  misc_feature (6)..(6): n is a, c, g, or t
  misc_feature (10)..(12): n is a, c, g, or t
  misc_feature (50)..(54): n is a, c, g, or t
  misc_feature (308)..(308): n is a, c, g, or t
  misc_feature (467)..(467): n is a, c, g, or t
  misc_feature (510)..(510): n is a, c, g, or t
  misc_feature (513)..(513): n is a, c, g, or t
  misc_feature (517)..(518): n is a, c, g, or t
  misc_feature (520)..(521): n is a, c, g, or t
  misc_feature (526)..(526): n is a, c, g, or t
  misc_feature (535)..(535): n is a, c, g, or t
  misc_feature (538)..(538): n is a, c, g, or t
  misc_feature (543)..(543): n is a, c, g, or t
  misc_feature (545)..(547): n is a, c, g, or t
  misc_feature (553)..(553): n is a, c, g, or t
  misc_feature (556)..(559): n is a, c, g, or t
  misc_feature (561)..(562): n is a, c, g, or t
  misc_feature (565)..(565): n is a, c, g, or t
  misc_feature (567)..(567): n is a, c, g, or t
  misc_feature (572)..(573): n is a, c, g, or t
  misc_feature (575)..(575): n is a, c, g, or t
  misc_feature (578)..(578): n is a, c, g, or t
  misc_feature (587)..(587): n is a, c, g, or t
  misc_feature (589)..(590): n is a, c, g, or t
  misc_feature (594)..(594): n is a, c, g, or t
  misc_feature (596)..(596): n is a, c, g, or t
  misc_feature (600)..(828): n is a, c, g, or t
  Peptide Sequence Number=SeqID_12743
  Probeset Number=SeqID_21799
nggggntttnnncccccccacagagagagagagaggagaggtcactagtnnnnnccccccccgaaaacacaatcaatcaccaacttaatcagataaacatgaaacagagagagatagggagatcacacgcggggaatccaacttaccatttgcaatggcgtcaatgaccatgacatcttcatttctccccaccgtctcaaaccttccggcaaacatctccagcaacagcagacgaagcctcacggtggtcaaagcctccgggagtgaaaacacaaccagcttggagaacaatgaagcaagaacagagncatgaaattgaggaggggatcttgtcttcacagctgcagctgcagctgtgtgctccttagctaaggtggcaatggcagacgatgagcccaagagaggaacacgaacctgccaagaataagtattgctccagcctgtggtcacaatggcctaccgtcagngatatcggcgtaacgtgagttcgctattgcaaccagcattctnaanctanntnnggctnactcttctnagngtggntnnnttatangcnnnntnnacntnaatanntnacncccctcgtntnntgtntngatnnnnnnnnnnnnnnnnnnnnnnnnnnnnnnnnnnnnnnnnnnnnnnnnnnnnnnnnnnnnnnnnnnnnnnnnnnnnnnnnnnnnnnnnnnnnnnnnnnnnnnnnnnnnnnnnnnnnnnnnnnnnnnnnnnnnnnnnnnnnnnnnnnnnnnnnnnnnnnnnnnnnnnnnnnnnnnnnnnnnnnnnnnnnnnnnnnnnnnnnnnnnnnnnnnnnnnnnnnnnnnnnnnnnn

SEQ ID NO: 7397 - DNA, 806 bp, Zea mays
  misc_feature (323)..(323): n is a, c, g, or t
  misc_feature (450)..(450): n is a, c, g, or t
  misc_feature (613)..(613): n is a, c, g, or t
  misc_feature (617)..(617): n is a, c, g, or t
  misc_feature (648)..(648): n is a, c, g, or t
  misc_feature (661)..(661): n is a, c, g, or t
  misc_feature (695)..(695): n is a, c, g, or t
  misc_feature (731)..(731): n is a, c, g, or t
  misc_feature (743)..(806): n is a, c, g, or t
  Peptide Sequence Number=SeqID_12744
  Probeset Number=SeqID_21800
gttatgaggtttttctgttgctacttcagtttctttatagcggacaagtctccatcgtgccgcagaaacacgagcctagacctaattgtggcgagagaggatgttggcacactcattgctcagccgccgttgatcttgctcttgatactctcgccgctctcgttacttcggcgtcgagcagctcgcattgctcacccagaaacaattggcaagcatggtggagaaagcctctatcgaagatgtgatgaaagttttaatagcatcaagaaagcaagacatgcatcaattttggaccacctgctctcacttagttgctaaatcanggtctcccaccagagattcttgccaagcttctccctattgacgtcgtcaccaaaatagaagagctcgtcttaaatcttctatactcgccgttctctatgcctcacaaccacaccatgatctcagcgnggctcaggacctagaagatcaaaagattagagggttgagacgagctttggattatcagacgtgaactagtggaagctgatggtaatgggagaaaggactcaatcttggatgagtccgttagcattggcattacgctgttgaaagcctgcgttagagaagttgngaanggcttgcttggagctcggacctggccgatgnagaattatccggngggtccccgcaggggaaaaccccttccccatccngggttgagatggccctccatactgggggccggtttngtacaccacctnnnnnnnnnnnnnnnnnnnnnnnnnnnnnnnnnnnnnnnnnnnnnnnnnnnnnnnnnnnnnnnn

SEQ ID NO: 7398 - DNA, 245 bp, Zea mays
  Peptide Sequence Number=SeqID_12745
  Probeset Number=SeqID_21801
cgttgctgtcgctagtgaaacaatctgatatactgaagtctaaacatgaagaatgtgaagcgtacgtggtggagatcgagagcattggccatgcctatgaagacataatgtcacaaaatcaacaattgctacagcagattattgaaagagatgatcataataccaaggtgagtacgtccccacgatccaggtgagtacgatgctgtcaaggcgcacccacgcggcagtcggcgccgacagcaacg

SEQ ID NO: 7399 - DNA, 355 bp, Zea mays
  Peptide Sequence Number=SeqID_12746
  Probeset Number=SeqID_21802
tgtcttgtttatcccgcaatttcacagtatttactttcatcgcaccagttgcattactcctcatggtcgatctgttgtgcgatttcggacatgactcctggacggacacgctgcatagctcctaagcgcgagcaacggttctccgagtccttgatgtcgagaaggtgtgcgcccggacgaggcgctccgtgccgctggaccgcatcctgcgctccatgatcgacagcgcccgctccagattcccgtccctcacctgcaccacgatgccccgagcttgctgcacctgcccgtgccaccgcctgcatatttctctttcgtctcctcccgccgccaccgcacacgctcgtctagggat

SEQ ID NO: 7400 - DNA, 355 bp, Zea mays
  Peptide Sequence Number=SeqID_12747
  Probeset Number=SeqID_21803
atccctagacgagcgtgtgcggtggcggcgggaggagacgaaagagaaatatgcaggcggtggcacgggcaggtgcagcaagctcggggcatcgtggtgcaggtgagggacgggaatctggagcgggcgctgtcgatcatggagcgcaggatgcggtccagcggcacggagcgcctcgtccgggcgcacaccttctcgacatcaaggactcggagaaccgttgctcgcgcttaggagctatgcagcgtgtccgtccaggagtcatgtccgaaatcgcacaacagatcgaccatgaggagtaatgcaactggtgcgatgaaagtaaatactgtgaaattgcgggataaacaagaca

SEQ ID NO: 7401 - DNA, 910 bp, Zea mays
  misc_feature (1)..(1): n is a, c, g, or t
  misc_feature (340)..(342): n is a, c, g, or t
  misc_feature (834)..(834): n is a, c, g, or t
  Peptide Sequence Number=SeqID_12748
  Probeset Number=SeqID_21804
ngatgaaaatatgtgccggtctggcctacaccctcaacataatcatactgcagtgatgtttttttttggaacctgaagcacaattgacgccaaaccaaatgctgacttgtcaggtttggaccaaaacccaggtaaataagaaactgaaaactggagcacatgtaaacgaatgaggaacatcaggggttcatagatgacaaggtctctcccatggtgtatggtaacacacaacgacccttcacaaacaatggatatgacacacaacaaaattacgactctttcttctcttctggttccgcttcaggcacctccttcacctccgcagcctcctcaaatgtcnnncctgggacaagctcagggacatcgtcatcatcctgtgcagctgcactggcgaccctctctctcgtggttctcccgtgctctgtgtccctagcggcgacgactgggcgatcgccgccgccttaagccaggtgctcaggtctgccacttggcacttcgccggcgacgagcacctaacagagagatggctggtggttttcgagtactgcatcttgtgaggccatttctggctttcttgccagaagtacagagtgctgataggaaaataccattcagagagaaagtgatctacacggtcatttctctcttcatttttctgtgggatcaaagattattgaagttgacaacagtgtgagggaggatcgtgctctgctgtaagtgttgttgggtagtatagacatcaaattctatatgtattggtggatactttgattatccatccttttatcaattgactgacattgtgaactgcaatgaactgcaaagctttatggnttttattcttgtatctggtgttttcatgtgattcgtagtgtactttttactcagaaatggtgcgcagaagttgctt

SEQ ID NO: 7402 - DNA, 651 bp, Zea mays
  misc_feature (177)..(177): n is a, c, g, or t
  misc_feature (210)..(211): n is a, c, g, or t
  misc_feature (242)..(242): n is a, c, g, or t
  misc_feature (247)..(247): n is a, c, g, or t
  misc_feature (256)..(256): n is a, c, g, or t
  misc_feature (289)..(289): n is a, c, g, or t
  misc_feature (316)..(316): n is a, c, g, or t
  misc_feature (320)..(320): n is a, c, g, or t
  misc_feature (324)..(325): n is a, c, g, or t
  misc_feature (327)..(327): n is a, c, g, or t
  misc_feature (332)..(332): n is a, c, g, or t
  misc_feature (335)..(336): n is a, c, g, or t
  misc_feature (340)..(340): n is a, c, g, or t
  misc_feature (342)..(342): n is a, c, g, or t
  misc_feature (347)..(347): n is a, c, g, or t
  misc_feature (355)..(355): n is a, c, g, or t
  misc_feature (357)..(358): n is a, c, g, or t
  misc_feature (361)..(361): n is a, c, g, or t
  misc_feature (368)..(368): n is a, c, g, or t
  misc_feature (370)..(370): n is a, c, g, or t
  misc_feature (377)..(377): n is a, c, g, or t
  misc_feature (382)..(382): n is a, c, g, or t
  misc_feature (385)..(385): n is a, c, g, or t
  misc_feature (387)..(387): n is a, c, g, or t
  misc_feature (397)..(398): n is a, c, g, or t
  misc_feature (400)..(401): n is a, c, g, or t
  misc_feature (404)..(404): n is a, c, g, or t
  misc_feature (406)..(407): n is a, c, g, or t
  misc_feature (410)..(410): n is a, c, g, or t
  misc_feature (417)..(417): n is a, c, g, or t
  misc_feature (420)..(420): n is a, c, g, or t
  misc_feature (431)..(432): n is a, c, g, or t
  misc_feature (438)..(438): n is a, c, g, or t
  misc_feature (440)..(440): n is a, c, g, or t
  misc_feature (443)..(444): n is a, c, g, or t
  misc_feature (448)..(448): n is a, c, g, or t
  misc_feature (452)..(452): n is a, c, g, or t
  misc_feature (454)..(454): n is a, c, g, or t
  misc_feature (464)..(464): n is a, c, g, or t
  misc_feature (466)..(466): n is a, c, g, or t
  misc_feature (470)..(470): n is a, c, g, or t
  misc_feature (477)..(478): n is a, c, g, or t
  misc_feature (480)..(480): n is a, c, g, or t
  misc_feature (483)..(483): n is a, c, g, or t
  misc_feature (485)..(485): n is a, c, g, or t
  misc_feature (489)..(489): n is a, c, g, or t
  misc_feature (491)..(492): n is a, c, g, or t
  misc_feature (494)..(494): n is a, c, g, or t
  misc_feature (496)..(497): n is a, c, g, or t
  misc_feature (500)..(500): n is a, c, g, or t
  misc_feature (504)..(504): n is a, c, g, or t
  misc_feature (506)..(506): n is a, c, g, or t
  misc_feature (510)..(510): n is a, c, g, or t
  misc_feature (512)..(512): n is a, c, g, or t
  misc_feature (514)..(514): n is a, c, g, or t
  misc_feature (518)..(518): n is a, c, g, or t
  misc_feature (520)..(520): n is a, c, g, or t
  misc_feature (523)..(524): n is a, c, g, or t
  misc_feature (526)..(526): n is a, c, g, or t
  misc_feature (531)..(532): n is a, c, g, or t
  misc_feature (538)..(538): n is a, c, g, or t
  misc_feature (540)..(540): n is a, c, g, or t
  misc_feature (547)..(547): n is a, c, g, or t
  misc_feature (550)..(550): n is a, c, g, or t
  misc_feature (552)..(552): n is a, c, g, or t
  misc_feature (555)..(556): n is a, c, g, or t
  misc_feature (558)..(558): n is a, c, g, or t
  misc_feature (560)..(560): n is a, c, g, or t
  misc_feature (563)..(563): n is a, c, g, or t
  misc_feature (565)..(569): n is a, c, g, or t
  misc_feature (571)..(571): n is a, c, g, or t
  misc_feature (592)..(593): n is a, c, g, or t
  misc_feature (599)..(599): n is a, c, g, or t
  misc_feature (601)..(601): n is a, c, g, or t
  misc_feature (606)..(606): n is a, c, g, or t
  misc_feature (608)..(608): n is a, c, g, or t
  misc_feature (610)..(610): n is a, c, g, or t
  misc_feature (612)..(612): n is a, c, g, or t
  misc_feature (614)..(615): n is a, c, g, or t
  misc_feature (617)..(617): n is a, c, g, or t
  misc_feature (619)..(622): n is a, c, g, or t
  misc_feature (624)..(624): n is a, c, g, or t
  misc_feature (627)..(629): n is a, c, g, or t
  misc_feature (637)..(637): n is a, c, g, or t
  misc_feature (639)..(639): n is a, c, g, or t
  misc_feature (641)..(641): n is a, c, g, or t
  misc_feature (647)..(647): n is a, c, g, or t
  misc_feature (650)..(650): n is a, c, g, or t
  Peptide Sequence Number=SeqID_12749
  Probeset Number=SeqID_21805
gccgaccgccgactcccgccgcgaaatcctgcgtcagaagcgccgattctcggaggtcgtccggatcctgagacaccggagcgcacctgcgagctgtagctgtagtgttcggagctgaaaatgagtgagggggatgctactcagctggaccttgagaaaggattaccccaaggggtntaatgatgatggttccgggaacccctgtcaacnntgcccaaggtgaaagtttgaccccaaaaaantggtngggaagccnaaattttgaaatccccccccactccagaaaaanctttgggaatttaaaaagcccaggggncggntgannantcgcnctnncatngnaattntttttgcngnntangtgcatnanaccgtanttttnttntnttttattctnnannatnannagnttcgagnttnttcacgtattnntctttntnttnngagnaaantntttttttttntntatnccattanntnttncnttcntnntngnntcnttcntnggtngncntttntnatnncnggggnntttatnantattatnttntnttnntngnatntnnnnngnttatatagatttttttatttnntttatnanattantncnantnntnannnntnttnnnttagtctntncngtattnctnt

SEQ ID NO: 7403 - DNA, 425 bp, Zea mays
  Probeset Number=SeqID_21806
ttttttttttttttttttttttttttttttgcttataatagcacgatacatgcatgacaccagtgaaacactacatcagcatcagctggtatgaatcctccatccagcaagcatacatgtgttgcacctgtgctgcgacaccagatctcagtcgctgtcgctgctgctgctactgtggccgccgtcgtggtcgtggccctcgccgtgcttcttctttttcttgtccttcttttccttgtggtcgccggacttgtcgccgtgctcgccggtgatcttgtccttgatcttctccacgatgccttccttgtgctccccgccgtccttcttgtggtgctccttgcgaccccttagcgccgtcttgaaacgcttaatgacgagggccatctcttcctcattgagtcgccgccgcctcaacttgtgccacc

SEQ ID NO: 7404 - DNA, 723 bp, Zea mays
  misc_feature (1)..(14): n is a, c, g, or t
  misc_feature (675)..(723): n is a, c, g, or t
  Peptide Sequence Number=SeqID_12750
  Probeset Number=SeqID_21807
nnnnnnnnnnnnnnaaaccttaagaaagggtgttgaagagtatggtgttggcaattggagggatattttagataacaatgctgaggctttggccggcaggacaccggtggacttgaaggacaagtggaggaacatgcttttccgttgatgtaacggggaaacatgtagctggacatgctttactagggtaaagtacatagcatgtagtcgtcgtacatcacagcactcttggtcaagcttttctggcagctgcagctacatgatttgtgtctcggtgtagtagcagccgcagcccaatcggttggcttttctggcagttgcacagcagcagactcttggtcaagcttttctggcagctgcagctacatgattttgtgttttggtgtagtagcagccgcagcccaaacggttggcttttctggcagctgcacagcagactcttggtcaagcttttctggcagctgcagcctgcagctacatgattttgtgtctcggtgtagcagcagccgcagcccaaacggttggtttttctggcagccgcagcccaaacggttggtttttctggcagctgcagctacagtattatgtgatgggactgtcgtatcatgtacaacgaaaatcacaagtgtattaaccgcagtgggtgggcaattatcttatgtgcatccatatcannnnnnnnnnnnnnnnnnnnnnnnnnnnnnnnnnnnnnnnnnnnnnnnn

SEQ ID NO: 7405 - DNA, 711 bp, Zea mays
  misc_feature (1)..(1): n is a, c, g, or t
  misc_feature (6)..(9): n is a, c, g, or t
  misc_feature (11)..(15): n is a, c, g, or t
  misc_feature (44)..(47): n is a, c, g, or t
  misc_feature (71)..(74): n is a, c, g, or t
  misc_feature (707)..(711): n is a, c, g, or t
  Peptide Sequence Number=SeqID_12751
  Probeset Number=SeqID_21808
nccggnnnngnnnnncccgggcttctctcgtcacgtacgccgcnnnntctgtcatcgcagcgtcacctccnnnntcggtgtcacctcgggtccgcgcgctagcaactccggctcctcaggtgagggctgagtggctgacctccgctcgtatcatccactcaggagagagaatctcactaggtcccccccccccccccggtcaatccgatccttctccacgactcttcctatcccagttttcgccgtcgctgctcgcttctccagctcccgcagtccgcacccacaggtcaccgtcgtcatctctccatagatctctccactttccagtgacggtggagcagatagccgctgtggtttttttgtgtgtgtgctggtagtggacctgtacagttctcttgcaaacaaccactcggtaattctctcatgaaccgtgggatgaccaaacagccaccgggtaattatcaagatgaggtattttctgacagggaagtaaagtgacaaggaaatcttcccctttggtatttttcactgggttaattaccctttagcttccaaactagcccttagtgccctgccccttgtacggcgcgccttccacccgcttccgtcccaaggccatggggaagtccaggccgaaggctgagcctcctagacctgtaccagtggtcgtacccaagccggagccagaaccagaggcagttccgggnnnnn

SEQ ID NO: 7406 - DNA, 722 bp, Zea mays
  misc_feature (1)..(1): n is a, c, g, or t
  misc_feature (720)..(722): n is a, c, g, or t
  Probeset Number=SeqID_21809
ngcacaagcgagagagatccggagcagccgcagtcccaccgaccccgccggcggtcgccctccatctactcgccggtggctgtcgtttctcttttcaataatcaagatgaaccgtgggggtagggccggcggtgggcaaagatctctgggttatttttttggaagcggggagccccccaaaccagcaggggcaccagctgcaagtgctccacctgttgagaaaccatctgctgcaaagactgatgcgggcaagcaggctgctggtgggggtaccagccaaaccaataactaccacagggctgatggtcagaacactggcaacttccttacggaccgtccttcaaccaaggaccacgctggtcctggcgggggctgtttcctgggctacctgttcggtggcaactgatgcccgcgctggcgcgctcaccaaagatatcctcccctgcctgctgggtgctatgtctgaatcgagaacaaccgacggtggcatttcatgtgtgtaccccccgcaatgctttgtgcgcatggatgatttccctgtgggaaacttaccgtcctgcatggggggggaagctggccttaaatatcacggaaagtcgggtgcctgcaccttcatcttaagttggtggcggatcccttcgtcttgtttcggttgcaccccgcgatggaatggattggttgctgaccactcgatctatctatccagcatgcaccttcgannn

SEQ ID NO: 7407 - DNA, 722 bp, Zea mays
  misc_feature (1)..(3): n is a, c, g, or t
  misc_feature (722)..(722): n is a, c, g, or t
  Peptide Sequence Number=SeqID_12752
  Probeset Number=SeqID_21810
nnntcgaaggtgcatgctggatagatagatcgagtggtcagcaaccaatccattccatcgcggggtgcaaccgaaacaagacgaagggatccgccaccaacttaagatgaaggtgcaggcacccgactttccgtgatatttaaggccagcttccccccccatgcaggacggtaagtttcccacagggaaatcatccatgcgcacaaagcattgcggggggtacacacatgaaatgccaccgtcggttgttctcgattcagacatagcacccagcaggcaggggaggatatctttggtgagcgcgccagcgcgggcatcagttgccaccgaacaggtagcccaggaaacagcccccgccaggaccagcgtggtccttggttgaaggacggtccgtaaggaagttgccagtgttctgaccatcagccctgtggtagttattggtttggctggtacccccaccagcagcctgcttgcccgcatcagtctttgcagcagatggtttctcaacaggtggagcacttgcagctggtgcccctgctggtttggggggctccccgcttccaaaaaaataacccagagatctttgcccaccgccggccctacccccacggttcatcttgattattgaaaagagaaacgacagccaccggcgagtagatggagggcgaccgccggcggggtcggtgggactgcggctgctccggatctctctcgcttgtgcn

SEQ ID NO: 7408 - DNA, 576 bp, Zea mays
  misc_feature (233)..(233): n is a, c, g, or t
  misc_feature (514)..(576): n is a, c, g, or t
  Peptide Sequence Number=SeqID_12753
  Probeset Number=SeqID_21811
ttttttttttttttttgcatcgataaatttatcgataattgcataaaatactaaatttaacctacgcgtcaccgaaattctacactctgcaaaatagaactagttcgaatatactcggtaactaaactcctcgaaygcakacctcgcatcccgggtaattrtaakttaaacttcatacsckaactaagcsmrttatttcacsawcataaaatttattggaayaacsacsackngmcttggattgyagtcttcgatcaaackggmgacsagtwttgyacsgygcttcactttrtrttccatrckcaactrttggaatctrtccatwttaactwyaacrrcgcataaacggcgatgattcttgttttggcctttcaccgagcacttgggcatcgaccagmggcttgcttcgctatatcttcttgggattcttttattagcgcgaacataagtcggagacaacatgtagggaccggcatcgaggmggggmgaccgaacgacaacgacaagacaaagnnnnnnnnnnnnnnnnnnnnnnnnnnnnnnnnnnnnnnnnnnnnnnnnnnnnnnnnnnnnnnn

SEQ ID NO: 7409 - DNA, 493 bp, Zea mays
  misc_feature (440)..(440): n is a, c, g, or t
  misc_feature (472)..(472): n is a, c, g, or t
  Probeset Number=SeqID_21812
ctcccattcgttacccagccgccaggcgccgccgcgtccgccccgccccgccccgccccgccccgccggcgcccccacgcccgcccacctcggcggcggcgacgaggatgacctactccagaagcagcagcaggaggaggagggaagcaaggcccagccgcgcaacaagccctccgccgccgtcgcggatgacagccactgtcgagcgctggacgacgactcccctacgaggaacgacgtctctggaatacaggtttgggacatgatagccatagtggatggcgtgaatggcctgaggatgcaagtggatggccatgagatggagggtcaggagttggggagctagtgggtcaagggaaggagaagctggtggttctggaagcgggggagttggaggatcttcatgggtccggaagccgcagagaactagtttggcacangctgcagtttggcacgacttctaggtatgttngactttgtcgaaaccctcttc

SEQ ID NO: 7410 - DNA, 471 bp, Zea mays
  misc_feature (311)..(311): n is a, c, g, or t
  misc_feature (421)..(421): n is a, c, g, or t
  Peptide Sequence Number=SeqID_12754
  Probeset Number=SeqID_21813
ttttttttttttttttgaaccgatcaggcgatgccgtgcctgttacctcctgatttaaccgagaccttgctgccttgtacagtactaataacttcaaaagtagtattacatcgatgcgagcagagcatcaagaacagcaacaagtgagtgcattgctagttgtgcaatggtcattgctttacctctccccggcaacagcctcctcttccagatcatacgaagccgaggagcacgaggacgtgccggcacttattccaccgccgcatcgctcatccgtggttgcattgcagctgcagcggcggaagtgctanagccatcgccaccgctggcggcgctactgctagtactggagctgcttgtgctgctactactacagcagcagcaggctgtcgttgtcgtcattgtggtcgtggtggcgganggagaggcggccctgctgctgctgctcgtgctcgtggcgagaccgacgag

SEQ ID NO: 7411 - DNA, 676 bp, Zea mays
  misc_feature (1)..(76): n is a, c, g, or t
  misc_feature (421)..(421): n is a, c, g, or t
  misc_feature (426)..(427): n is a, c, g, or t
  misc_feature (444)..(446): n is a, c, g, or t
  misc_feature (448)..(450): n is a, c, g, or t
  misc_feature (460)..(460): n is a, c, g, or t
  misc_feature (464)..(464): n is a, c, g, or t
  misc_feature (473)..(473): n is a, c, g, or t
  misc_feature (476)..(478): n is a, c, g, or t
  misc_feature (485)..(487): n is a, c, g, or t
  misc_feature (512)..(513): n is a, c, g, or t
  Probeset Number=SeqID_21814
nnnnnnnnnnnnnnnnnnnnnnnnnnnnnnnnnnnnnnnnnnnnnnnnnnnnnnnnnnnnnnnnnnnnnnnnnnnntcattgagttcatgctaacacgctgcaaaaacatttctctactcaaccagcgattgtcactccaaatacaacaggaaacaaatggctacaactcaagattatggacaagttgggatgaggcaaggcaagccacctcctacagccacatgcacgcagaaacagcatgcagagctgatgaactgcaaacagtgcttatggagatggtaaagcaagacagtaggcaccaattaagtgcaaagggtgaattgaaggaactttagacgtgcttgtgcccatcctcagcgcaaaacacagtggcaacgaaagatttaaggatgcatttgcatgtacttcttacttttgttnattgnncaaagagctgatgaatnnnannnaatgcttatngagntggtaaagnaannnagtaggnnncaattaagtgcaaaggtatagagtnntttcctattatttatagagaaaatattcaattaaggtctgtgtataagtggctggtacatccgcctggtagggcgcttccttcttctagtctctatttatttgtcaaaaaaacatgtcaaatacttcttcgatgatgtttattgagtactctaattcttttgc

SEQ ID NO: 7412 - DNA, 582 bp, Zea mays
  misc_feature (4)..(4): n is a, c, g, or t
  misc_feature (22)..(22): n is a, c, g, or t
  misc_feature (27)..(27): n is a, c, g, or t
  misc_feature (29)..(30): n is a, c, g, or t
  misc_feature (34)..(34): n is a, c, g, or t
  misc_feature (52)..(52): n is a, c, g, or t
  misc_feature (67)..(67): n is a, c, g, or t
  misc_feature (540)..(540): n is a, c, g, or t
  misc_feature (547)..(547): n is a, c, g, or t
  misc_feature (549)..(549): n is a, c, g, or t
  misc_feature (551)..(551): n is a, c, g, or t
  misc_feature (562)..(562): n is a, c, g, or t
  misc_feature (579)..(579): n is a, c, g, or t
  Peptide Sequence Number=SeqID_12755
  Probeset Number=SeqID_21815
aaanctaacaaagagtaagaancattntnncaanccaaaggttgttgccgtnttcgcggatcacccnaaaacagcataaaccaggtaagatgcagcagaaatcatgctgttgtggagagtgaacattctgaatctgccttccgctgcctccacaatgacagaatcttgctggccgtaaccagacgggatatcgaaagaggagaacaccatggaacgcgtgtcgagcccaaggagtttgttactcccagtcaccttccagtagcagctgctcgaaaccgtaggaggtcctcgaaaatttacaagagggaggcgcactggcatccacgctcagaattccccatcgtcccggtgtcggaacagaagaagaaggcgaccacctgtccaggtctgcgatcagcctcgcagtcgcccccgcacctaagtctccggctgctcgttattggcggcaacgaggcacggctccacgcggcgacagcgctgactgcctgggtataccgggttatttgggggcaaaaagaggtttctgaggatagccggggngtagtgngntntctctagtctnttttttctctctctctnttc

SEQ ID NO: 7413 - DNA, 582 bp, Zea mays
  misc_feature (4)..(4): n is a, c, g, or t
  misc_feature (21)..(21): n is a, c, g, or t
  misc_feature (32)..(32): n is a, c, g, or t
  misc_feature (34)..(34): n is a, c, g, or t
  misc_feature (36)..(36): n is a, c, g, or t
  misc_feature (43)..(43): n is a, c, g, or t
  misc_feature (516)..(516): n is a, c, g, or t
  misc_feature (531)..(531): n is a, c, g, or t
  misc_feature (549)..(549): n is a, c, g, or t
  misc_feature (553)..(554): n is a, c, g, or t
  misc_feature (556)..(556): n is a, c, g, or t
  misc_feature (561)..(561): n is a, c, g, or t
  misc_feature (579)..(579): n is a, c, g, or t
  Probeset Number=SeqID_21816
gaanagagagagagaaaaaanagactagaganancncactacnccccggctatcctcagaaacctctttttgcccccaaataacccggtatacccaggcagtcagcgctgtcgccgcgtggagccgtgcctcgttgccgccaataacgagcagccggagacttaggtgcgggggcgactgcgaggctgatcgcagacctggacaggtggtcgccttcttcttctgttccgacaccgggacgatggggaattctgagcgtggatgccagtgcgcctccctcttgtaaattttcgaggacctcctacggtttcgagcagctgctactggaaggtgactgggagtaacaaactccttgggctcgacacgcgttccatggtgttctcctctttcgatatcccgtctggttacggccagcaagattctgtcattgtggaggcagcggaaggcagattcagaatgttcactctccacaacagcatgatttctgctgcatcttacctggtttatgctgttttngggtgatccgcgaanacggcaacaacctttggnttgnnanaatgnttcttactctttgttagnttt

SEQ ID NO: 7414 - DNA, 1190 bp, Zea mays
  misc_feature (1)..(2): n is a, c, g, or t
  misc_feature (22)..(24): n is a, c, g, or t
  misc_feature (26)..(28): n is a, c, g, or t
  misc_feature (741)..(741): n is a, c, g, or t
  misc_feature (784)..(791): n is a, c, g, or t
  misc_feature (800)..(802): n is a, c, g, or t
  misc_feature (806)..(806): n is a, c, g, or t
  misc_feature (809)..(809): n is a, c, g, or t
  misc_feature (819)..(822): n is a, c, g, or t
  misc_feature (824)..(824): n is a, c, g, or t
  misc_feature (826)..(826): n is a, c, g, or t
  misc_feature (836)..(836): n is a, c, g, or t
  misc_feature (839)..(841): n is a, c, g, or t
  misc_feature (843)..(849): n is a, c, g, or t
  misc_feature (855)..(856): n is a, c, g, or t
  misc_feature (858)..(871): n is a, c, g, or t
  Peptide Sequence Number=SeqID_12756
  Probeset Number=SeqID_21817
nnggtaaaggcctacctgcaannngnnncctcgagccggccgggacgtactgcgaagtaaccctaacgcctggtgccagccgccgcgctctcgctcgctctaacgccgacgcctggtgccgactgccgaggccttcgctggttactagcaccgccccagctccttctcccttttccggcggaggtgaacaccgccaccactagcgcgccacgatgaggccgatcctgatgaagggccacgagcgcccgctgacgttcctgcgctacaaccgcgacggggacctcctgttctcctgcgccaaggaccacacccccacggtctggtacgccgacaacggcgatcgcctcggcacctaccgcggccacaacggcgccgtctggacctgcgacgtctcccacgactcggcgcgcctcattaccggatccgccgaccagaccgccaagctatgggaggtcagcacggggaaggagctcttcagctttcgtttcgacgcgcccgccaggtccgtcgagttcgccatcggggacgcgctcgccgtcgtcaccaccgacaacttcatggaccacgttcccaccgttcaggtcaagcgcatcgccgaggacatcgacgaccagacggaggagtctgcactcgtcatcaccggcatcaagggaaggatcaacagggccgtttggggcccgctgaacaggaccattatcactgctggggaggatgccaccattcgcatctgggactcagagnctggacagcttctgaatgagtctgataaagaatctggacatcnnnnnnnnatttcatcnnngtcnaanccttggactnnnngnantttcttactngcnnntnnnnnnntctgcnncnnnnnnnnnnnnnnctaaccctgatcctttgtttctccgcattctgcaaggtcttcaacaacacgatatttactttacacaaagagttgacgcaactggtatgcccggactaggaccattacaaaaagtttgtgcggcactgcggatacttgcttatggcttaccttctgatgcggtagacgagtatattcaaattggggaatcaacggctagggaatgccttcatcatttttgtcgcgcaatcattgattgttttagtgcctggtatttacgcactccaactcaagatgacattactcgcatcatgcataatagtgagtcgcggggttttcc

SEQ ID NO: 7415 - DNA, 245 bp, Zea mays
  misc_feature (9)..(10): n is a, c, g, or t
  misc_feature (19)..(19): n is a, c, g, or t
  misc_feature (36)..(36): n is a, c, g, or t
  Peptide Sequence Number=SeqID_12757
  Probeset Number=SeqID_21818
aaaagcacnncccaagacngctccggccccgcctgncccccccccgggggccccggaaatttatttaacttaaaaagaactcacttcgcccccccggtgcccacaatactggtgtcaacaacgcagctagcgtgtacaatatgcacgcaaattttgccacccccactgcaccctgacctactaatgatggtattgctaggataaatataatatatacgcagttatatataaaaaaaaaaaaaaaa

SEQ ID NO: 7416 - DNA, 305 bp, Zea mays
  misc_feature (51)..(54): n is a, c, g, or t
  Probeset Number=SeqID_21819
gcccccttttttttttttttttttttttttttttttttttttttttttttnnnntttttttttttttttttttttttttttttttttttttttttttttttttttagcaccatggaaatgaaatgttgttgattttttccaagccgaacatgttgtgatctttttcacagcgggagcacgcgaagaggaaagggggcccgagagattcgggagatctatctatctctatggcacgggctccccccccccccccccggtcagaagatgtcgagcacgtcgacgatggcggcgttgcagagcgggca

SEQ ID NO: 7417 - DNA, 657 bp, Zea mays
  Peptide Sequence Number=SeqID_12758
  Probeset Number=SeqID_21820
gattcggcacgacgaaggcggcatcgcggcacacccgctgtacgagcgcctcctggaggcgcacattgcctgcctactcgtcgccgcccccgtcgaccagctcccccgcatcgacgcgcagatcaccgcgcgccccctgccgctcgccgtggccgccggggccacgaccgcgggagggccgtccagcggggaggagctcgacctcttcatggactaatgagttaaaggatcaaatggaggcaacactactactcaatccatatgagctgtgtgcgcgtccggctgcatcgtcgaggagttaccagatggagcagtccatgcagtcgtacctcttgcgttcgccgacgggaaaaattgatggcagatcaaattccagaatggaaaggcagctccagctgggtgagaaagatcgtcatcaggttctaaaggatttctcaaagttgcttgatgatcagtgattaccgaaggatggatgagcatgatcagtatgagtcagttggtttagatgattcactagaggatgagaggaatcttgatgaaaccatggctgattgaagggtcgcggaagtagagcctaatgcaagggatgtgaaggactggtgcagcaggtgacaagaagtttgccatggatgctccatgaccaggggcactgtgctg

SEQ ID NO: 7418 - DNA, 657 bp, Zea mays
  Peptide Sequence Number=SeqID_12772
  Probeset Number=SeqID_21821
cagcacagtgcccctggtcatggagcatccatggcaaacttcttgtcacctgctgcaccagtccttcacatcccttgcattaggctctacttccgcgacccttcaatcagccatggtttcatcaagattcctctcatcctctagtgaatcatctaaaccaactgactcatactgatcatgctcatccatccttcggtaatcactgatcatcaagcaactttgagaaatcctttagaacctgatgacgatctttctcacccagctggagctgcctttccattctggaatttgatctgccatcaatttttcccgtcggcgaacgcaagaggtacgactgcatggactgctccatctggtaactcctcgacgatgcagccggacgcgcacacagctcatatggattgagtagtagtgttgcctccatttgatcctttaactcattagtccatgaagaggtcgagctcctccccgctggacggccctcccgcggtcgtggccccggcggccacggcgagcggcagggggcgcgcggtgatctgcgcgtcgatgcgggggagctggtcgacgggggcggcgacgagtaggcaggcaatgtgcgcctccaggaggcgctcgtacagcgggtgtgccgcgatgccgccttcgtcgtgccgaatc

SEQ ID NO: 7419 - DNA, 392 bp, Zea mays
  misc_feature (137)..(137): n is a, c, g, or t
  misc_feature (241)..(241): n is a, c, g, or t
  misc_feature (354)..(354): n is a, c, g, or t
  misc_feature (384)..(384): n is a, c, g, or t
  Peptide Sequence Number=SeqID_12773
  Probeset Number=SeqID_21822
aaatctgtcgccgctgcggggctgtgcgcctgggcatgggccgcgcccatgctgccatagccgtgcgccgccgggattcacgcccgcgtgcccgcgcggccaagcgctggggcttgtgcccaccggggccgcgcccnagccgcccatggggcccgcaccggggatggcgtcgctagggccgccgcggctacacccatgccgtcggggtcgcgcgcccatactgtcggggtcggggaaggcncgccctggccgagggcctggccgaaacgccaccggggggcgcgcccgcccgccaccgcgcgcccgaggggactgagcgccgcgccgcgacaggaggctgccgcgtcgtgctanaggggccacacccgagccgtcggggccttnggccgcac

SEQ ID NO: 7420 - DNA, 821 bp, Zea mays
  misc_feature (172)..(172): n is a, c, g, or t
  misc_feature (284)..(284): n is a, c, g, or t
  misc_feature (484)..(484): n is a, c, g, or t
  misc_feature (486)..(486): n is a, c, g, or t
  misc_feature (488)..(488): n is a, c, g, or t
  misc_feature (491)..(492): n is a, c, g, or t
  misc_feature (498)..(498): n is a, c, g, or t
  misc_feature (500)..(501): n is a, c, g, or t
  misc_feature (508)..(510): n is a, c, g, or t
  misc_feature (516)..(523): n is a, c, g, or t
  misc_feature (529)..(529): n is a, c, g, or t
  misc_feature (569)..(570): n is a, c, g, or t
  misc_feature (575)..(579): n is a, c, g, or t
  misc_feature (581)..(583): n is a, c, g, or t
  misc_feature (607)..(608): n is a, c, g, or t
  misc_feature (614)..(616): n is a, c, g, or t
  misc_feature (628)..(628): n is a, c, g, or t
  misc_feature (630)..(630): n is a, c, g, or t
  misc_feature (648)..(649): n is a, c, g, or t
  misc_feature (653)..(654): n is a, c, g, or t
  misc_feature (656)..(664): n is a, c, g, or t
  misc_feature (669)..(676): n is a, c, g, or t
  misc_feature (684)..(687): n is a, c, g, or t
  misc_feature (751)..(755): n is a, c, g, or t
  misc_feature (779)..(821): n is a, c, g, or t
  Probeset Number=SeqID_21823
gctgcgccggcgtctgtccataaaaccctaaaacctccggctgatcggttggtgttgaggcgagtgggaagcttccagttttttttttcttccttttggcttactgcgcaagaagaagggtaacaagaggaccggcggcgatggcgaagaggctgctccctctccctgaaancggggtgctggttggagaagctggtgcagcccaagaagaaccgccggcggcatcctcctcccggaaacatccaagcagctgaatgctggctaaaggggggggggctgttggnccctggtgagcgcggacaaggcaggcaatctggatcccagtttgctcctggaaggaaaggtgacactgttctcctgccagaaagtatgggggaaactgaaagttaagcttgcagctggataaagagtacctcctcttcagagagcaccgacattttgggcacaccttgtggactgattcagagcatcagcaagcctgtcncncnaanncgttgntnntttgggnnnccttgnnnnnnnnttcagngcatcagcaagcctgtccctagtcgttggttttagacttnnagtgnnnnntnnntagtatcagattttgggatcaaannccctannnactttgaactgncntgatgtcatagattttgnnatgnnannnnnnnnnccccnnnnnnnntgttgcannnnaacttttgggtttaaaatggttccctaatattgtgttcccccctctgtccctggttgcaatgcnnnnnagtttacgttggctgttgattggnnnnnnnnnnnnnnnnnnnnnnnnnnnnnnnnnnnnnnnnnnn

SEQ ID NO: 7421 - DNA, 459 bp, Zea mays
  Peptide Sequence Number=SeqID_12774
  Probeset Number=SeqID_21824
atcccggccggggtacaagcctcatcccttcggcgtggaaacattctcgctggcggcgcgcgaggctgctatggcggtctacgggacgaaggcgactccaccagtttactgtctcaccaactgaacgattgacgtcggcggcagcaagatccacgggacggaggcggcagaggcagctaaaggacggaggcgcccaagatccgtcgtggcttcttcaccgcctaatccaagcgaacaaggtcgtggtggctacttctcgccgattattcctgcaccggttcgagttggagaagacgaacttccaccgtcttgggatccaatatcctctccattagttacaaggcccaagtcatgcatgaagtagctccggtctttagaggaagaatgtcttctctatctgtcaaagatatggatccatgatctcgtcatggtcatcacattagtgatgtagtcttttgc

SEQ ID NO: 7422 - DNA, 801 bp, Zea mays
  misc_feature (16)..(16): n is a, c, g, or t
  misc_feature (485)..(485): n is a, c, g, or t
  misc_feature (513)..(513): n is a, c, g, or t
  misc_feature (585)..(585): n is a, c, g, or t
  Probeset Number=SeqID_21825
gcacgggcacggggangcgagcgtgtcacgtgcgcaccaacattccgccccgaattcggcatcccgtttccagcaacctaaaagaaaaggaaacagaaaaaaaaaatcacaggagaaaccgatttcccccttttctttattttcttcgtcctcttcgtctctactcgccgcccagtcacctcgaatcccttcgatccaatctccaaaccctaggcaatccaacatcaaagtattaggtgcccccttcctcaaaccgcggcgttgcggccatggcccacggcggcttcgccgggaaggcgaaagtgacgccgaacctggcggtggacggcgagggcacgcgcacgctcaatctcaccgtgctgcagcgcctcgaccacgccgttgaggacatcctcatcaccgcgggtcacgtcacgctctacgacttcgacaccgacatcaaccagtggagcccgaagggacgtgaggggtcgctctttgtcgtncagaggaatggctcaccccagattcagntcattgtcatgaatcgcaggaatacagataatctaggtgaagatcttttgggagattttgataaccactacnagctccttaaattatgtaccggcatgctgctcaagaagtataaggatctggttttacattcccaggagtggcaacaggtggcaatcttttcagcaggattctgatgctttctcaaaggtgcaccaaagcgaaattctctgtcaagtgattgaagtgaacacactcgtggtgatgcctgaggacgcaattgacacaccgtaagactacgttcggtga

SEQ ID NO: 7423 - DNA, 805 bp, Zea mays
  misc_feature (4)..(6): n is a, c, g, or t
  misc_feature (8)..(9): n is a, c, g, or t
  misc_feature (14)..(15): n is a, c, g, or t
  misc_feature (17)..(18): n is a, c, g, or t
  misc_feature (21)..(21): n is a, c, g, or t
  misc_feature (34)..(34): n is a, c, g, or t
  misc_feature (384)..(384): n is a, c, g, or t
  misc_feature (442)..(442): n is a, c, g, or t
  misc_feature (447)..(447): n is a, c, g, or t
  misc_feature (452)..(452): n is a, c, g, or t
  misc_feature (461)..(461): n is a, c, g, or t
  misc_feature (473)..(473): n is a, c, g, or t
  misc_feature (481)..(481): n is a, c, g, or t
  misc_feature (490)..(490): n is a, c, g, or t
  misc_feature (508)..(508): n is a, c, g, or t
  misc_feature (518)..(518): n is a, c, g, or t
  misc_feature (529)..(529): n is a, c, g, or t
  misc_feature (539)..(539): n is a, c, g, or t
  misc_feature (553)..(553): n is a, c, g, or t
  misc_feature (563)..(563): n is a, c, g, or t
  misc_feature (571)..(571): n is a, c, g, or t
  misc_feature (573)..(575): n is a, c, g, or t
  misc_feature (593)..(593): n is a, c, g, or t
  misc_feature (599)..(805): n is a, c, g, or t
  Peptide Sequence Number=SeqID_12775
  Probeset Number=SeqID_21826
gggnnngnngtttnntnncgngtaccggcccccnctcggtcagctcgtaggcccccccccctgtcttcgctcaccaaggtagtctatctcattgggctgctttgtacgctacccttgcaagtcaaggctgtgcgggcgccgagcctccttcaaaaaacgaattccctcctagagcgcatgaattataccacagaggtggcagcggcgatacgcgcagagacagattctgctctgcaccgctccattgacggtctggcgatcgcatcgggcgattatcaagcgacgatgcggaagtataacgagcaagtcttggacaagtctctatcgcgagcatcacaggcgtggtcataccaaacatggtgccttcacatgaaagctatgatncaagaccccaagactcatatcaccgacacaacggcgctgttcaagagttcatggacangagcnaccgntaacaggcntctctgtcgcantttgcggngagaagggnagcgaaactccttgagantatgtccaanattatcctacnatgctcctanattccggtcatggngatatggaangagctttntnnnttgaatcagcttaccgcntgctcnnnnnnnnnnnnnnnnnnnnnnnnnnnnnnnnnnnnnnnnnnnnnnnnnnnnnnnnnnnnnnnnnnnnnnnnnnnnnnnnnnnnnnnnnnnnnnnnnnnnnnnnnnnnnnnnnnnnnnnnnnnnnnnnnnnnnnnnnnnnnnnnnnnnnnnnnnnnnnnnnnnnnnnnnnnnnnnnnnnnnnnnnnnnnnnnnnnnnnnnnnnnnnn

SEQ ID NO: 7424 - DNA, 798 bp, Zea mays
  misc_feature (7)..(7): n is a, c, g, or t
  misc_feature (35)..(36): n is a, c, g, or t
  misc_feature (349)..(349): n is a, c, g, or t
  misc_feature (356)..(356): n is a, c, g, or t
  misc_feature (362)..(362): n is a, c, g, or t
  misc_feature (389)..(389): n is a, c, g, or t
  misc_feature (399)..(399): n is a, c, g, or t
  misc_feature (403)..(403): n is a, c, g, or t
  misc_feature (405)..(407): n is a, c, g, or t
  misc_feature (424)..(424): n is a, c, g, or t
  misc_feature (426)..(426): n is a, c, g, or t
  misc_feature (429)..(429): n is a, c, g, or t
  misc_feature (451)..(451): n is a, c, g, or t
  misc_feature (454)..(454): n is a, c, g, or t
  misc_feature (457)..(457): n is a, c, g, or t
  misc_feature (460)..(460): n is a, c, g, or t
  misc_feature (462)..(462): n is a, c, g, or t
  misc_feature (472)..(472): n is a, c, g, or t
  misc_feature (483)..(483): n is a, c, g, or t
  misc_feature (486)..(486): n is a, c, g, or t
  misc_feature (488)..(489): n is a, c, g, or t
  misc_feature (494)..(494): n is a, c, g, or t
  misc_feature (498)..(498): n is a, c, g, or t
  misc_feature (501)..(501): n is a, c, g, or t
  misc_feature (504)..(504): n is a, c, g, or t
  misc_feature (512)..(512): n is a, c, g, or t
  misc_feature (515)..(515): n is a, c, g, or t
  misc_feature (521)..(521): n is a, c, g, or t
  misc_feature (526)..(526): n is a, c, g, or t
  misc_feature (534)..(534): n is a, c, g, or t
  misc_feature (536)..(536): n is a, c, g, or t
  misc_feature (538)..(538): n is a, c, g, or t
  misc_feature (540)..(540): n is a, c, g, or t
  misc_feature (547)..(548): n is a, c, g, or t
  misc_feature (553)..(553): n is a, c, g, or t
  misc_feature (556)..(556): n is a, c, g, or t
  misc_feature (558)..(558): n is a, c, g, or t
  misc_feature (561)..(561): n is a, c, g, or t
  misc_feature (564)..(564): n is a, c, g, or t
  misc_feature (570)..(571): n is a, c, g, or t
  misc_feature (574)..(574): n is a, c, g, or t
  misc_feature (578)..(579): n is a, c, g, or t
  misc_feature (581)..(582): n is a, c, g, or t
  misc_feature (584)..(584): n is a, c, g, or t
  misc_feature (590)..(590): n is a, c, g, or t
  misc_feature (592)..(592): n is a, c, g, or t
  misc_feature (594)..(594): n is a, c, g, or t
  misc_feature (596)..(596): n is a, c, g, or t
  misc_feature (598)..(598): n is a, c, g, or t
  misc_feature (601)..(798): n is a, c, g, or t
  Probeset Number=SeqID_21827
taactgngtccgtgccccccctcgagtcagctacnnaggccccccccccgtccttaaaaggccaaaaaaacagatcatagtgacagagtgttccagagagtttgttaaagaactgtgaagaagagggtaactgcaaacaaatctagctaaacaaatgacgcagtgatggataggatgaagagggtgcttttgctgcttctggccttcactggtcttcacatgttgccagaagctactgctacaaagattactgctggaaacaaccagttttggaacccctattttatctacactgagtgggcttaaggcaaacatttctaccttggtgactggctctattatgtgtacnatatgancctatncgatcttgttggaagtgaacaatacanattattgaancatntnnntttgatcatcctctacntnttnaccaatggagactgaagatacnggntcnttngnttgtaactanatctttactcnttntnntgggnccanggntantgttaacnggntaaatnaattntttttttntnantntcgcacnntactnaangngcnttntttctnntgnggcnntnncnttttanangntntngtnnnnnnnnnnnnnnnnnnnnnnnnnnnnnnnnnnnnnnnnnnnnnnnnnnnnnnnnnnnnnnnnnnnnnnnnnnnnnnnnnnnnnnnnnnnnnnnnnnnnnnnnnnnnnnnnnnnnnnnnnnnnnnnnnnnnnnnnnnnnnnnnnnnnnnnnnnnnnnnnnnnnnnnnnnnnnnnnnnnnnnnnnnnnnnnnnnnnnn

SEQ ID NO: 7425 - DNA, 1102 bp, Zea mays
  misc_feature (1)..(8): n is a, c, g, or t
  misc_feature (45)..(47): n is a, c, g, or t
  misc_feature (707)..(707): n is a, c, g, or t
  misc_feature (714)..(714): n is a, c, g, or t
  misc_feature (720)..(720): n is a, c, g, or t
  misc_feature (745)..(745): n is a, c, g, or t
  misc_feature (806)..(806): n is a, c, g, or t
  misc_feature (835)..(835): n is a, c, g, or t
  misc_feature (843)..(843): n is a, c, g, or t
  misc_feature (849)..(849): n is a, c, g, or t
  misc_feature (890)..(890): n is a, c, g, or t
  misc_feature (908)..(909): n is a, c, g, or t
  misc_feature (914)..(914): n is a, c, g, or t
  misc_feature (924)..(924): n is a, c, g, or t
  misc_feature (929)..(930): n is a, c, g, or t
  misc_feature (933)..(934): n is a, c, g, or t
  misc_feature (946)..(946): n is a, c, g, or t
  misc_feature (953)..(953): n is a, c, g, or t
  misc_feature (956)..(958): n is a, c, g, or t
  misc_feature (964)..(964): n is a, c, g, or t
  misc_feature (975)..(975): n is a, c, g, or t
  misc_feature (980)..(980): n is a, c, g, or t
  misc_feature (984)..(984): n is a, c, g, or t
  misc_feature (986)..(987): n is a, c, g, or t
  misc_feature (991)..(991): n is a, c, g, or t
  misc_feature (996)..(996): n is a, c, g, or t
  misc_feature (1001)..(1002): n is a, c, g, or t
  misc_feature (1016)..(1016): n is a, c, g, or t
  misc_feature (1019)..(1019): n is a, c, g, or t
  misc_feature (1028)..(1102): n is a, c, g, or t
  Peptide Sequence Number=SeqID_12776
  Probeset Number=SeqID_21828
nnnnnnnnaattcggcacgaggcagagacacccacatctctcctnnncatgcctgcttcaccctacagcagctacacactagtgctcgggcttttcctcgtctccctgctgctgctgcacagccccaggccgtgctcttgtgcgaattaccacactctcgcggcgggccaggcgctcgctgtcggcgacaccctcgtctccaggaacggcaagttcgcgctcggcttcttcccgtccggcaccaccaccacccccgccgccgccgccagtaagtcctcctccgacatcaacaccaccgccgtctccaactggtacctaggcatctggttcaacaagatcccagtcttcactccggtctggattgctaaccgggatgacccgttcaccgaccccaataataagcccctccccaaaaggactctgcaaatctctagagacgggaaccttgtagtagtccaggaggacaacaacgctcctcagagaactgaaaccctagtcgtttggtccactggaataatcaccaacaacgcatcctccaagaccaccaccaccagcatcaacaccaacaccaccaacaccgtcgccgagctcacccacaatggcaacctggtggtgcgcgacgcctcggcctcggacgcgtccaaggtccggtggcagagcttcgactatccaacagacgtctacctccctggatccaagctgggcangaacaangtgacngggttgaaccgcgtcttcgtgtcgnaggaagaacagggcgaacccggcccgcggctcctactgcgtcgggtggactacggtctccnaggggatcatcctcaccagtgctcctttncgcgtgtntgggcntcggcacattctcctgtcggacttggatccaacgacagcgntttatcaggtacaacaannacacnccaagaacantactnnttnnacatccaacganccttttntgnnncggcgngaaacttggcnaaaangggncnngggnggaanaatcnnctggaaattttacncancatgaaccnnnnnnnnnnnnnnnnnnnnnnnnnnnnnnnnnnnnnnnnnnnnnnnnnnnnnnnnnnnnnnnnnnnnnnnnnnn

SEQ ID NO: 7426 - DNA, 632 bp, Zea mays
  misc_feature (601)..(632): n is a, c, g, or t
  Peptide Sequence Number=SeqID_12777
  Probeset Number=SeqID_21829
atcctcctcgggacaaggaacctcacgaacccttctcatcccagatctagcgccgcctccttcaccgcgctggccggcgagctcctcagcacggtgagtctcctttcccctctactctcctcttcccctctgctctcctcttcctttatccagctgaccggcgagctgctcggacgccgggcgcgcgcatgcggtcgcgcggcaggtagtaagcccctggaggacggacgtggcggccgtgcggagcgtccgcaccccgagcgacgcgccgtaaaggctgggaagagaacgcgcgccgcccacccatctgcttaaccaaagcggtctagagcaaattgaactggttttgagcagacccacatatctctttatttcaattatctggtggcgcaccctcacattgctagagccttcaacaaattgccattcgaccacaagttaatttgggctcgcaatttcgtcagtgaaaagttcccaggagtgtgagggcagttggtaggtaggctgacaattcttttgcttgaaccacatcgaacaatgatttgtggtctaagtacgtgtggattttgtgtagaccttgaacttgatattatttgtaagnnnnnnnnnnnnnnnnnnnnnnnnnnnnnnnn

SEQ ID NO: 7427 - DNA, 213 bp, Zea mays
  Peptide Sequence Number=SeqID_12778
  Probeset Number=SeqID_21830
aatgtatttccatggaagcgaacgcgtgctgcgcctcctgtacggcgcggaggtaggtcaagccgcggttgggacgcggtgtggcgtgggcgagccgaaccaagcggcgatcgacgcttcccaccacttccattccatgccgtccgtccgcttccttcctgtgtaatcctcctccaataatagacgtgtcatgctacaaaaaaaaaaaaaaaa

SEQ ID NO: 7428 - DNA, 980 bp, Zea mays
  misc_feature (1)..(1): n is a, c, g, or t
  misc_feature (500)..(504): n is a, c, g, or t
  misc_feature (507)..(507): n is a, c, g, or t
  misc_feature (513)..(514): n is a, c, g, or t
  misc_feature (517)..(521): n is a, c, g, or t
  misc_feature (527)..(529): n is a, c, g, or t
  misc_feature (547)..(549): n is a, c, g, or t
  misc_feature (566)..(567): n is a, c, g, or t
  misc_feature (577)..(578): n is a, c, g, or t
  misc_feature (591)..(591): n is a, c, g, or t
  misc_feature (612)..(614): n is a, c, g, or t
  misc_feature (616)..(616): n is a, c, g, or t
  misc_feature (618)..(618): n is a, c, g, or t
  misc_feature (689)..(689): n is a, c, g, or t
  misc_feature (798)..(800): n is a, c, g, or t
  misc_feature (893)..(895): n is a, c, g, or t
  misc_feature (938)..(940): n is a, c, g, or t
  Probeset Number=SeqID_21831
nagtctcggccatgaatacctacgcctcgccatgaactccgagcaagaggaagcgaaggagggagatcgaacggggagcagagaaagggagaagggaggagtctcgaatcggtgggagggtcatgacttgagcttgtgggatcatccgtgtcgcgccgcgcgttcctagcgggttgccggccgaagtcaaccactggagcttcaaggcgcgctcgccggggttggcggttgacgccacgccgtggaccggatcggtcatcgtcgctcttgccgcagtgaggtcacgagaatctgaagaccatcctgctacctgggatctcaagtctaaggcaagttgtgtccttgatcacttttctttacccaacaatgttcctgttaatcactgtgacatgctcaggttaatctgatgtgacctaataggtttccctagacctgtttatctcacaccttctctaccaccaaacttttgactacttatggcagagtgctatctggttacnnnnntgncaaganntcnnnnncggagnnnctccgcactccgctgtannncgagagccccgtgcctnnagaggccccnngagatagtaacangcggaggacgaagctggacannnancntgtcaggggagtgccgccgcccgagatcctggaaagatgcgagtttttggaacccctgtcaggtaaggcgntggaggattaccggtagctggtgtccagcgtgcagagacctcggctcggtttggttgggaatgcagaagatgtcagctgtactagacttcagagaaagattatagagcnnntgtaatgtaattgaccaaagggggtgctacttatcgttccgtatatgtttgacgatcacgttattcttatttgcggcagtggtgcgagtggtnnnggcagagaaatgggcaagcaaaatgacgagccagctgtcctgnnnctgatcagaattcagaaacatgagctcagacttcagactc

SEQ ID NO: 7429 - DNA, 772 bp, Zea mays
  misc_feature (1)..(4): n is a, c, g, or t
  misc_feature (765)..(772): n is a, c, g, or t
  Peptide Sequence Number=SeqID_12779
  Probeset Number=SeqID_21832
nnnnatacttaaccccagttggtccaacaccacttcatgtgagccctatctttgagataggtcctgttgagccacgtttctcagagtggttggtgtttgagggcatcagtgtagatgagtctgggaagcagcattttcttgatgcatccgtggcctacaagcgtgcagttctgaatgccattgagtacctttccaagtttgggtactctaaggagcaggtatatcttttactatcatgctgcccatgcgagggtaggatatctggaatagtggactctcctaatgcagtaacaactcttgccatccctacggcgatatttgatcaggatataaagccaaaacgcgtgaaggggagaccacttggaggaccacagttgagaagacttccagatcttctaagctgctcaaactatggacgccttcctgccacccaagacagaagtggtacaagcgcgccctagtatatggaaacagatgcagtatcaatcgacatgcaactgtgccaaggctataatcaagaatgcgtttgtattttttttattttcttcgtcgaataaaaattacgataaagcttttgccgtccgttagaaaaaataatcaagaatgatcctcgatttatcaggttgtcatcatgtatgagagtgagccttttggttttacacaagccaggccctttgttaaatggtacgtcgggcggggcggcgctaaggaggggagcgagcgcgggccccgggaggtcggccgggaggggaggctgggcaggcnnnnnnnn

SEQ ID NO: 7430 - DNA, 237 bp, Zea mays
  misc_feature (184)..(184): n is a, c, g, or t
  misc_feature (217)..(217): n is a, c, g, or t
  Peptide Sequence Number=SeqID_12780
  Probeset Number=SeqID_21833
aagacaagacgggtgccagacaaattcagcaaacaagcaaaaggcacgaccaccaccgccggccgggaagcaagctcaaacccctaatcgccgtccgccggcgagcccagcacgatggcccgctacgaccgcgcccatcaccgtttttctcccccgacggcaccttctttccaggttgagtacncttctcgaggcccgtccgcaaggcaaaggcccncccgtggggcgtcccgcggc

SEQ ID NO: 7431 - DNA, 436 bp, Zea mays
  misc_feature (265)..(265): n is a, c, g, or t
  misc_feature (349)..(350): n is a, c, g, or t
  misc_feature (353)..(353): n is a, c, g, or t
  misc_feature (363)..(363): n is a, c, g, or t
  misc_feature (366)..(367): n is a, c, g, or t
  misc_feature (372)..(372): n is a, c, g, or t
  misc_feature (376)..(376): n is a, c, g, or t
  misc_feature (393)..(393): n is a, c, g, or t
  misc_feature (411)..(411): n is a, c, g, or t
  Probeset Number=SeqID_21834
ctcgtgccgttttttttttttttttttggtaatgaaaaataaaagactcaggagatacaaggcagtctcgagcaacttacacattctatctctcatcccatcttctatttcaaactttattctgtgaacaatgcagtctacagcgcaaaaaatataaatggacagctagcgcaacattattaaaatttaaatatgtgttcttaatatgtgagagtttatattttttggtatttgagtgaaggtgttgagatctggcactaactgntcatttgtatttttctcataatcaagttagatctaaaacttagttcatactttactttttctttattaaaatacttcagcaaanntgnattctaactnacnntcatncttnaaagttcaaacatctanatgcttcacaaaaaaggnaaccaaatataccttcattaacttt

SEQ ID NO: 7432 - DNA, 672 bp, Zea mays
  misc_feature (1)..(12): n is a, c, g, or t
  misc_feature (178)..(187): n is a, c, g, or t
  misc_feature (214)..(216): n is a, c, g, or t
  misc_feature (246)..(246): n is a, c, g, or t
  misc_feature (307)..(308): n is a, c, g, or t
  misc_feature (334)..(336): n is a, c, g, or t
  misc_feature (344)..(344): n is a, c, g, or t
  misc_feature (359)..(360): n is a, c, g, or t
  misc_feature (672)..(672): n is a, c, g, or t
  Peptide Sequence Number=SeqID_12781
  Probeset Number=SeqID_21835
nnnnnnnnnnnncacaaagtttataagtgaatcatacccaaataatgagtctggaattatatactgcttttcaaggaaggaatgtgaacaggttgcaaaagaactgcgcgaaaggggtatttcagcagattattatcatgcagacatggatatcgttaatcgtgagaaaattcatatnnnnnnnnnncacagttctgatactcaccatggctcnnncgttgtctgaattacttgctgaagagactngtcttaagtctatgtcttctattactggtgtgagttctgacagtgtgttggccgctgctcnnaagtcaagaaacacctgtttccagcnnngtgaacantgcaaaatggccacnnatcggtcacgcaacggccttgcaacttttttggcagcctcggtggtttttcgtgcagcttgaacaaccatctccaaagccgccgcactagcaacgaaggcggctttgccagcaacggcccttgcacgcccggctgcagcgagcaaatcgcttaatcgtccgcgaccacaggacctttgcccgactccatgacaacggggaagaagccacaggcggcgaggaatcaaatggggagacgagcagagggggaagaaggaagagctcaggtggaaccctagcgtacctccggtgtgggacctggactgttttggan

SEQ ID NO: 7433 - DNA, 672 bp, Zea mays
  misc_feature (1)..(1): n is a, c, g, or t
  misc_feature (313)..(314): n is a, c, g, or t
  misc_feature (329)..(329): n is a, c, g, or t
  misc_feature (337)..(339): n is a, c, g, or t
  misc_feature (365)..(366): n is a, c, g, or t
  misc_feature (427)..(427): n is a, c, g, or t
  misc_feature (457)..(459): n is a, c, g, or t
  misc_feature (486)..(495): n is a, c, g, or t
  misc_feature (661)..(672): n is a, c, g, or t
  Peptide Sequence Number=SeqID_12782
  Probeset Number=SeqID_21836
ntccaaaacagtccaggtcccacaccggaggtacgctagggttccacctgagctcttccttcttccccctctgctcgtctccccatttgattcctcgccgcctgtggcttcttccccgttgtcatggagtcgggcaaaggtcctgtggtcgcggacgattaagcgatttgctcgctgcagccgggcgtgcaagggccgttgctggcaaagccgccttcgttgctagtgcggcggctttggagatggttgttcaagctgcacgaaaaaccaccgaggctgccaaaaaagttgcaaggccgttgcgtgaccgatnngtggccattttgcantgttcacnnngctggaaacaggtgtttcttgacttnngagcagcggccaacacactgtcagaactcacaccagtaatagaagacatagacttaagacnagtctcttcagcaagtaattcagacaacgnnngagccatggtgagtatcagaactgtgnnnnnnnnnnatatgaattttctcacgattaacgatatccatgtctgcatgataataatctgctgaaatacccctttcgcgcagttcttttgcaacctgttcacattccttccttgaaaagcagtatataattccagactcattatttgggtatgattcacttataaactttgtgnnnnnnnnnnnn

SEQ ID NO: 7434 - DNA, 436 bp, Zea mays
  Peptide Sequence Number=SeqID_12783
  Probeset Number=SeqID_21837
cttcggttaccttccctgatccgcatcatcatagcctcgtttgtgacctccccggtgccatagctgaagccaagagagagagagagatatgccacaagcgccaccggctgcggtgtacttggtcggtggttaggtgaggataatccccggactcgacagaaccgtacgtggttgaagggtggggcatcaccatttccggcgactgtctgctcacgccggagtctgcgcctcgaactgaccagcgcggtgtcatcgccgatctcgtcctcatcacctctgcgtgaggacacgtgtcacctgaagatcatcctggtacctggtatctcaagtcccaggtcaagaacaggtaccacaggatgaggcgcatggaggatgctgcgatgagttcgtgagagagatctaggccgtcgtctcccagtcaactttgggttgctgg

SEQ ID NO: 7435 - DNA, 426 bp, Zea mays
  misc_feature (1)..(3): n is a, c, g, or t
  misc_feature (128)..(128): n is a, c, g, or t
  misc_feature (164)..(164): n is a, c, g, or t
  misc_feature (313)..(313): n is a, c, g, or t
  misc_feature (324)..(324): n is a, c, g, or t
  misc_feature (387)..(387): n is a, c, g, or t
  Probeset Number=SeqID_21838
nnnctcacacctcgacgcctctctctctttccccgagctctcgaaaccctaggtgcgtgccgaccggcggcggcggcgaggtgatggcgatggacccggacgcggtggcgaaagccttcgtggagcantaactaccggacgttcgacaccaacggcgcgggcgntgggtggggctgtatcaggagacctccatgtccaccttgaaggggccagaaagttccagggcccatcccgccattgccggcaaagcttcggatctcttcccttccaggcctgcgaggcaccaggatcgtccaccgcgaactggccaagnccgtcgggggnccccaagggaggcatggctcgtctttcgtctccggttccatccgcaccggggccccgaggagnacccccatcaaggttctctcaggcattccatttgctgcc

SEQ ID NO: 7436 - DNA, 489 bp, Zea mays
  misc_feature (68)..(68): n is a, c, g, or t
  misc_feature (75)..(75): n is a, c, g, or t
  misc_feature (80)..(80): n is a, c, g, or t
  misc_feature (157)..(157): n is a, c, g, or t
  misc_feature (235)..(235): n is a, c, g, or t
  misc_feature (246)..(246): n is a, c, g, or t
  misc_feature (256)..(256): n is a, c, g, or t
  misc_feature (268)..(268): n is a, c, g, or t
  misc_feature (298)..(298): n is a, c, g, or t
  misc_feature (335)..(335): n is a, c, g, or t
  misc_feature (383)..(383): n is a, c, g, or t
  misc_feature (390)..(390): n is a, c, g, or t
  misc_feature (449)..(449): n is a, c, g, or t
  misc_feature (452)..(452): n is a, c, g, or t
  misc_feature (460)..(460): n is a, c, g, or t
  misc_feature (481)..(481): n is a, c, g, or t
  Peptide Sequence Number=SeqID_12784
  Probeset Number=SeqID_21839
ttttttttttttttttcagttcccagcgatgctcttgaagggagtttttatttcgacagggaaaaaanacaagtnttggngaggaattggaagcatctccccggcgccaaggcgtgaagcgacatttgctgaaatcatatgattgaggaatctcaanacaatgtcttttgccgacaatgaatagcgggcctcgacccttctttttccatttcatttcctatagccggatctgcanaagcgatgganaattccgcanatcttgctgganactcgtaggctcgaacaacaggccattacnactcaataaagctatccgaatcatctcctcgcaaganaattgatcccagcatgtgttttgtccgcttctgggctctctgatctgnctttggnggataggactcaccaattcggatgtcaagggtttgtctaaaaaaagccgatgatagaanaanagcagggnggactgataacatctttgganaactttgg

SEQ ID NO: 7437 - DNA, 535 bp, Zea mays
  misc_feature (385)..(385): n is a, c, g, or t
  misc_feature (462)..(462): n is a, c, g, or t
  Probeset Number=SeqID_21840
gagcgctctagccgtttttcctcgtcctctatccagccccctgccgcttccagctccgatcgatctgatccctccccaccaccacgcccatggcggaccaactcaccgacgaccagatcgccgagttcaaggaagccttcagcctcttcgacaaggacggggatggttgcatcacgaccaaggagctgggaactgtcatgcgttcactggggcaaaaccctacagaggctgagctccaggacatgatccatgaagtcgatggcgacggcaacgcaccatcgaatttccagaggttctcaaccctaatgctcgcaagatggaagacaacgactctggagagagctcaagagggctttttccgtgtgttgacaaggaacagaacggntttcatcttctgccgccgagctccgccatgcatgacaaatcttttgtgggaagagctattgatggaggaggtaaacnacgatgatccgcggagggtgaatgttcactagagggaggggcccaaaactaccccaaggggaggttgtttcgg

SEQ ID NO: 7438 - DNA, 337 bp, Zea mays
  Peptide Sequence Number=SeqID_12785
  Probeset Number=SeqID_21841
aaaaggataggagaacaaggaaaaaacaatggcggtgctactccgccgcgccgcggcgctcctcgtcgtcgctgctgtctgcgcggacggcgcctccacgttctactcctccgaccccaacctcggatccgcccgcgtcgtcttccagacgaattttggtgatattgagtttggtttctttcctcatgttgcaccaatggacatatccgtttgttttctcccaagggattttaccatgtcggtaatttcgttcaaatttgtttatggttgtattaacatttgtgttatcttggtacaatgatcatgcctttcccttctaaaaaaaaaaaaaaaaaag

SEQ ID NO: 7439 - DNA, 778 bp, Zea mays
  misc_feature (1)..(2): n is a, c, g, or t
  misc_feature (7)..(17): n is a, c, g, or t
  misc_feature (19)..(47): n is a, c, g, or t
  misc_feature (49)..(49): n is a, c, g, or t
  misc_feature (56)..(56): n is a, c, g, or t
  misc_feature (58)..(65): n is a, c, g, or t
  misc_feature (67)..(68): n is a, c, g, or t
  misc_feature (73)..(73): n is a, c, g, or t
  misc_feature (112)..(114): n is a, c, g, or t
  misc_feature (126)..(130): n is a, c, g, or t
  misc_feature (242)..(242): n is a, c, g, or t
  misc_feature (688)..(688): n is a, c, g, or t
  misc_feature (705)..(706): n is a, c, g, or t
  misc_feature (710)..(719): n is a, c, g, or t
  misc_feature (722)..(742): n is a, c, g, or t
  misc_feature (748)..(761): n is a, c, g, or t
  misc_feature (771)..(773): n is a, c, g, or t
  Peptide Sequence Number=SeqID_12786
  Probeset Number=SeqID_21842
nnatgcnnnnnnnnnnnannnnnnnnnnnnnnnnnnnnnnnnnnnnntnggaatgntnnnnnnnngnnatatngagggtttgcctcgtacatttttcatgagaatgatttcnnnctattacagcgnnnnngcgtatgataagatgtttgagatttttgctgatatggaggaactaggcgtaagacctgatggttctattatcaggatgctaggtgatgtatttcagaagttagagatgatgnacaaatatgaaaagttaaaaaagaaatacccaccaccgaaatgggattatcgacacatcaaaggcaagcgcataagaatcagagtttatcctgatagcaaccctgaagtggcggcaaaaggagaccctgacactgatgagctcgaagagttagaaagcacacaccttaataacgaattggatgaagcagcaagctcaggcctcgacaggagtgtattggacgatgcagcttctggagaccttgaatatatgtaggtcagagcttccctttggtattttttttgtgcctgcttaaccaaagcggtctagagcaaattgaaccggtaacatactctctgttttggtttgacatcccagaacccatgtcgtcatacttccaagacatctctgttttggttcgaaaaaaaaaaaaaaaagagcggccacttccaagacatgggcatcgcnatcttctgaagtatttnntttnnnnnnnnnnatnnnnnnnnnnnnnnnnnnnnngccatnnnnnnnnnnnnnnagacatcatnnngtttc

SEQ ID NO: 7440 - DNA, 902 bp, Zea mays
  misc_feature (1)..(11): n is a, c, g, or t
  misc_feature (21)..(30): n is a, c, g, or t
  misc_feature (315)..(317): n is a, c, g, or t
  misc_feature (319)..(330): n is a, c, g, or t
  misc_feature (342)..(355): n is a, c, g, or t
  misc_feature (357)..(363): n is a, c, g, or t
  misc_feature (368)..(376): n is a, c, g, or t
  misc_feature (381)..(383): n is a, c, g, or t
  misc_feature (385)..(394): n is a, c, g, or t
  misc_feature (399)..(399): n is a, c, g, or t
  misc_feature (401)..(411): n is a, c, g, or t
  misc_feature (413)..(419): n is a, c, g, or t
  misc_feature (619)..(619): n is a, c, g, or t
  misc_feature (631)..(631): n is a, c, g, or t
  misc_feature (635)..(635): n is a, c, g, or t
  misc_feature (642)..(642): n is a, c, g, or t
  misc_feature (648)..(648): n is a, c, g, or t
  misc_feature (651)..(651): n is a, c, g, or t
  misc_feature (656)..(656): n is a, c, g, or t
  misc_feature (661)..(661): n is a, c, g, or t
  misc_feature (664)..(665): n is a, c, g, or t
  misc_feature (671)..(671): n is a, c, g, or t
  misc_feature (673)..(673): n is a, c, g, or t
  misc_feature (678)..(678): n is a, c, g, or t
  misc_feature (683)..(683): n is a, c, g, or t
  misc_feature (686)..(686): n is a, c, g, or t
  misc_feature (697)..(697): n is a, c, g, or t
  misc_feature (700)..(702): n is a, c, g, or t
  misc_feature (819)..(819): n is a, c, g, or t
  misc_feature (833)..(902): n is a, c, g, or t
  Peptide Sequence Number=SeqID_12787
  Probeset Number=SeqID_21843
nnnnnnnnnnngaaacttttnnnnnnnnnntcctactgaaacaaaagaaggaaaccgtaaaaaaaagggggattgctgatgtacatgtacatctttgctggtggtaggtgcgtaaacctgtacagcaagcgttgtttttaccctggctttgttcttcgtttcttatgcgttagctcccattggtatatttctggataagatagtggaattcttttaaaaggcaaaaaatgtcggcgttctggtggttctaaaaaaaaaaaaaaaaaaaaaaaaaaaaaaaaaaaaaaaaaaaaaaaaaaaaaaaaaaaaaaaaannngnnnnnnnnnnnnaaaaaaaaaaannnnnnnnnnnnnntnnnnnnnaaaannnnnnnnnttttnnnannnnnnnnnnaaaanannnnnnnnnnncnnnnnnngcacgagaatgcacataatgtcaggtgcttgtttgaagagagagagagtaatattggctttggctatggaagcagcaggcgttggtaattagtcaatttggctaggggtttgttaaccttattcagatggggtgtctttggaacgtcgtccctcgtccatatcttgcatggtgagggaagtgtacatttatggaagaacnagcgacaacagnaggncttctgnacaagnagnaaggnacaanagnnacattncncaagnaaggntgnaagtttaaggnaannnattatctaactggggagaagaaagtgaaacttttttcttggtcctactgaaacaagagaaggaaaacataagaagaagaaaaaaaaaaagattgctgatgtacatgtctgtctttangctggtggcaggtnnnnnnnnnnnnnnnnnnnnnnnnnnnnnnnnnnnnnnnnnnnnnnnnnnnnnnnnnnnnnnnnnnnnnn

SEQ ID NO: 7441 - DNA, 377 bp, Zea mays
  Probeset Number=SeqID_21844
cggcacgaggtttttgtgtgagttgggaggtggagaagaaaggaactctagtgcatcacacaccttgtgcttgacgaaatgtttgaatcagaatttatcatcgcatccgcaatttggtttaatcatgcagcaaaggttgcctcggcacgtcgccatgtctgtctgctcgtagcagagctgggtatagttcatgtttgcaaaagtgaatcttcacattcaagctgcagtacaggaaacaacaatatacgtaagggtatggaattacgaatatattggatattgcattgaatatattgaatatattggactttgtcgaaaccctctccactagtggaggtatcgccatcactgtcactgtacccgatggtgatcacaac

SEQ ID NO: 7442 - DNA, 529 bp, Zea mays
  misc_feature (84)..(84): n is a, c, g, or t
  misc_feature (107)..(107): n is a, c, g, or t
  misc_feature (144)..(144): n is a, c, g, or t
  misc_feature (198)..(198): n is a, c, g, or t
  misc_feature (303)..(303): n is a, c, g, or t
  misc_feature (347)..(347): n is a, c, g, or t
  misc_feature (389)..(389): n is a, c, g, or t
  Peptide Sequence Number=SeqID_12788
  Probeset Number=SeqID_21845
ttttttttttttttttcataaattggcttaccaaaaccgaattgattcgataaccgcgagggcgatgacggttgtccaatttanacatttggtcgagcccctggcanatgctggacgaacttgcctcaccttttcatccaactntaggatcagtctccgggagataaagtcgacgacgagttcgataacacacacggngatgagacagggtctgtggagatgtgcacaagggaaaatgagcttgtggtgccgagagtcgacggcgagcaggacgcggatcaaggggtttgcttgggagtcaanaaggggatgacgggttcaatgactcgacggcaaatgcgagcacncgcgaaacccgatggacaaagagcgagcgcgcagcggtgacnacgagcaggcacgcaagcgccaatgcgagccgagggcaagcacgagtgctggggcgagcacaagtaggcagaacagcgggcgtcgctgcgagctccatggtcggacccgacaggaacagaggtgagcgcgcgtcgggacc

SEQ ID NO: 7443 - DNA, 1159 bp, Zea mays
  misc_feature (1)..(25): n is a, c, g, or t
  Probeset Number=SeqID_21846
nnnnnnnnnnnnnnnnnnnnnnnnncgccgcgtgggccgagcacgcgcagagccagcgcgtggcgccgtggaacgcgcccgacccaggcggcgggagcactggcggctacctgctcaacgtgtcgcagcaggcggcgcttggcggccagagccagttcttctcccagaggggaccccttcagtccagtaaccagccctccgagcgaggatggccggagaccgtcgaagccgacaacccgatgcagcagcagcatggcgggccgaccatcgggttcgcgcccggtaccggcttctccgggatccgcatccccaccaggatacagggcggcgaggagcacaacggcggcagcggcaatggcgacaagccgccgccgccgtctgtttcctcggcttctcgccagtgacagcagcagtggagcacagattactccatccaaccagcatgaccattgatcagtgcagcgtgtatcactaaaatctcacacgccagctcctcagcgtgcacccttgttgcgagagtctctctcgtgattcttcttcgttgtagcactgcattttcccacgacaggattgccgtttcttgtactactgagtttctggtgcagttatgttgtccccattccaggttagttaatttgctgctgcttcctacgacaacggatggctgcagcaaaatggaggagcaaggttgggagcgaagcactctttttgactggctggctggttggttggttggttggttggccggtcggtcggtttctctacatctctcgctgctttgtgtacgtcactggtttttgctccaagaacgaactcactcacactcactcactcggagcttctcttcttagaaattaggcatgtgagaacgcagcacattggctagccagcaggatctcttgctgcttgtccgtttgctgcgttgttacagtaggtttagttgatgttctagttgctttagtagatctcaagcaaatgcatcttaattttgctgttgttctcgctggcgctctgcacggatcgatgggggttagctagtgtgcttcctcctggggttcagggaggagctataagcggcagagcagtgccagccagcggatgatgttgttgttgttagcctgataattaagcggatggggacaggagtctttggttcttt

SEQ ID NO: 7444 - DNA, 931 bp, Zea mays
  misc_feature (3)..(3): n is a, c, g, or t
  misc_feature (251)..(251): n is a, c, g, or t
  misc_feature (263)..(263): n is a, c, g, or t
  misc_feature (395)..(395): n is a, c, g, or t
  misc_feature (419)..(419): n is a, c, g, or t
  misc_feature (421)..(421): n is a, c, g, or t
  misc_feature (431)..(431): n is a, c, g, or t
  misc_feature (487)..(487): n is a, c, g, or t
  misc_feature (558)..(558): n is a, c, g, or t
  misc_feature (601)..(931): n is a, c, g, or t
  Peptide Sequence Number=SeqID_12789
  Probeset Number=SeqID_21847
gantagagacagagagagagtccccccccccccccccccctaatcaaaatgttgctgccctataggaggagctgggaaagaagtttgatgaattaaacatagtttctatggagaatgctgaactaaaatcgcagctccagcatattgaagagattagttgcactatggaggagttagctgataaaagtgaagtaattagaagacttgtagaaaagttgattgaatcgagaactttaattgatgaaaggagngtctgtcttcanagcttgcaaaatgatttctccaaactctcagatgaaaagacatcatgtgacactgagttgcttatcttgaaagagaagctggagatgcctcaggcacttgcagaagaaagtgaagcaattgctacagaatcncggcagatagctgaggagcataangncatatgccgnaaagggaaggatgaagaagtaaaggtattggagaggtcaattttgaaaaacttganaatacctgtatgtgttttttaaaaaagcaaagggggggaaattgtccaagggaagaagccaagaccggccnaaagaatgccgcccgaggaactaaaagtggagctgcagaaagnnnnnnnnnnnnnnnnnnnnnnnnnnnnnnnnnnnnnnnnnnnnnnnnnnnnnnnnnnnnnnnnnnnnnnnnnnnnnnnnnnnnnnnnnnnnnnnnnnnnnnnnnnnnnnnnnnnnnnnnnnnnnnnnnnnnnnnnnnnnnnnnnnnnnnnnnnnnnnnnnnnnnnnnnnnnnnnnnnnnnnnnnnnnnnnnnnnnnnnnnnnnnnnnnnnnnnnnnnnnnnnnnnnnnnnnnnnnnnnnnnnnnnnnnnnnnnnnnnnnnnnnnnnnnnnnnnnnnnnnnnnnnnnnnnnnnnnnnnnnnnnnnnnnnnnnnnnnnnnnnnnnnnnnnnn

SEQ ID NO: 7445 - DNA, 586 bp, Zea mays
  misc_feature (320)..(320): n is a, c, g, or t
  misc_feature (535)..(535): n is a, c, g, or t
  misc_feature (542)..(542): n is a, c, g, or t
  misc_feature (562)..(562): n is a, c, g, or t
  misc_feature (566)..(566): n is a, c, g, or t
  Peptide Sequence Number=SeqID_12790
  Probeset Number=SeqID_21848
ttttttttttttttttaggcaaaacacgacaaacctcattctctatagtacatgatggtggctacaccataaagatagttgacgtgatcttgcaagactacaagcctttgccggtacaactcaatacaatgatgtgtgaaagcgccatggggtataggtgtctatttctcacttctaatactagggaaaacctagaacaagcgctttataaaacattctagctaacctaagcactttacaaagtacatatgctaatgactaagtggtttttgagcacttgggtgtctagatttactacggatgagcctcaactctcttgngatattccttagctcccacagatctcaaatggtcagttgggggtaatacacataacccctaagttcaaaactagacattagaagtgatgcaaactggcgcataccatatacatcagtgcatgtccacattagcaacccattgaaactagttattgctagccttctgagcatagacatctgatgctttgatcgacgttgaaccagacacatctggngctttanagctcttctcgagttgttgnggancctctctaaatgcccccatt

SEQ ID NO: 7446 - DNA, 526 bp, Zea mays
  misc_feature (86)..(86): n is a, c, g, or t
  misc_feature (189)..(189): n is a, c, g, or t
  Probeset Number=SeqID_21849
ttttttttttttttttaagcttaataacatatagtacatatattagatattaaactgataagaacatatattatatcttatcttanaaaaaaaaacttgaaaaagtatgagttgaacagtctgatccttttttatagccctttcgattgtttatccttcttcagcaagtgatgttgtactgtatatgancattgtgttatgtcatgtcgtgttaagcttgggcacgacccatctgtggtgtaacaacttatcgttaggcgagaaagagggagagaaacagaattacgcgcatgcaaaacgtgcgaaactggcgggggagagaaataagcctacacactttgtacttgacgcatggacgcacgacgcacgaaattggtgctttaaagtagagattagactatagcgttgcgctgagtcctgtcattttgggcttgggtgactcctcacgacccatttgtggtaacggcctatgatggctatcttcagcggatctcctatctcatctcatatttcaaacttcaatatg

SEQ ID NO: 7447 - DNA, 610 bp, Zea mays
  misc_feature (1)..(1): n is a, c, g, or t
  misc_feature (608)..(608): n is a, c, g, or t
  Peptide Sequence Number=SeqID_12791
  Probeset Number=SeqID_21850
ntttttttttttttttgcccctaaattctagattttattttctattctaaattccactttgggattgaatgtatttcttgtcttattaattccatgagagtatgcacaaacaaatatcacagcatgatgcacaatttgttttaggtgtcattaattaattaatgatttttttgaggtgtttatgcacatgttaataatgaatggaggcaacacatatatgtgatccaattatatcctcttttacacctttttgggtattacagtgccacacgcgcgcgcgccgccgccgccggccgggccgggctcgggccgggcgtggcgtggcgtggcaggcaggcaggcaggcgagcgagcgtggtgtggctgtgttaatttttagcactcactaaccgtgtaaacctttcaattgactgtctcttcgtcagctgcatgcgagactcttgtccttcagctgcctatcccttggcgtgcagacccttctccttctgctttcctctacgagaggttaaatagaggagaacccctgtcacttggtacacgagaacataacagagtcacaacccagccgcaagtgagagtgttcccatctcgtgactctgcgcgcacanag

SEQ ID NO: 7448 - DNA, 246 bp, Zea mays
  Probeset Number=SeqID_21851
attagatcgtacagcgaggatgacatccacgagagcgtcgtgtaccatgtgagggcaagcacaaccaacggatccaagaagcttgatgcggattaccaagaagctcagtcaaagggatctgcatgcactatattctggttcttctcactgaatacacgtgggccgtgtattagtgttgctgaaatgactggcgccgttcattttgagaaaaccctcagagtattggcaacaggacaagtggtacga

SEQ ID NO: 7449 - DNA, 359 bp, Zea mays
  misc_feature (16)..(16): n is a, c, g, or t
  misc_feature (27)..(27): n is a, c, g, or t
  misc_feature (29)..(29): n is a, c, g, or t
  misc_feature (32)..(32): n is a, c, g, or t
  misc_feature (38)..(38): n is a, c, g, or t
  misc_feature (47)..(48): n is a, c, g, or t
  misc_feature (50)..(50): n is a, c, g, or t
  misc_feature (57)..(57): n is a, c, g, or t
  misc_feature (77)..(77): n is a, c, g, or t
  misc_feature (118)..(118): n is a, c, g, or t
  misc_feature (144)..(144): n is a, c, g, or t
  misc_feature (153)..(153): n is a, c, g, or t
  misc_feature (215)..(215): n is a, c, g, or t
  misc_feature (223)..(223): n is a, c, g, or t
  misc_feature (253)..(253): n is a, c, g, or t
  misc_feature (262)..(262): n is a, c, g, or t
  misc_feature (275)..(275): n is a, c, g, or t
  misc_feature (277)..(277): n is a, c, g, or t
  misc_feature (283)..(283): n is a, c, g, or t
  misc_feature (302)..(302): n is a, c, g, or t
  misc_feature (311)..(311): n is a, c, g, or t
  misc_feature (316)..(316): n is a, c, g, or t
  misc_feature (322)..(322): n is a, c, g, or t
  misc_feature (329)..(329): n is a, c, g, or t
  misc_feature (349)..(349): n is a, c, g, or t
  misc_feature (355)..(355): n is a, c, g, or t
  Peptide Sequence Number=SeqID_12792
  Probeset Number=SeqID_21852
tttttttttttttttngcccatccgtngnccntggcanaaccggcanncngcagtanccgcccaccattaaaagaanaagcagcagcagcagacagagagagagagagagagatcgcntgacacggccacgggctgggcagcanagcgctacntatacccaccacgccacgcgcttccttgtcagtaggacagtagtcagtcgagtcctcctccntcccccgnggccccgccgcccgtcacaccaaaccttcnatccacctnttcctccggcctntnaccggnaccacacgcacctactttnagtcacctnacctntccgcnctttgtnggcgttccggcagggggacnatggcnaagg

SEQ ID NO: 7450 - DNA, 869 bp, Zea mays
  misc_feature (1)..(264): n is a, c, g, or t
  misc_feature (609)..(609): n is a, c, g, or t
  misc_feature (612)..(612): n is a, c, g, or t
  misc_feature (644)..(644): n is a, c, g, or t
  misc_feature (667)..(667): n is a, c, g, or t
  misc_feature (674)..(674): n is a, c, g, or t
  misc_feature (697)..(697): n is a, c, g, or t
  misc_feature (700)..(700): n is a, c, g, or t
  misc_feature (703)..(703): n is a, c, g, or t
  misc_feature (725)..(725): n is a, c, g, or t
  misc_feature (727)..(727): n is a, c, g, or t
  misc_feature (729)..(729): n is a, c, g, or t
  misc_feature (826)..(826): n is a, c, g, or t
  misc_feature (845)..(869): n is a, c, g, or t
  Peptide Sequence Number=SeqID_12793
  Probeset Number=SeqID_21853
nnnnnnnnnnnnnnnnnnnnnnnnnnnnnnnnnnnnnnnnnnnnnnnnnnnnnnnnnnnnnnnnnnnnnnnnnnnnnnnnnnnnnnnnnnnnnnnnnnnnnnnnnnnnnnnnnnnnnnnnnnnnnnnnnnnnnnnnnnnnnnnnnnnnnnnnnnnnnnnnnnnnnnnnnnnnnnnnnnnnnnnnnnnnnnnnnnnnnnnnnnnnnnnnnnnnnnnnnnnnnnnnnnnnnnnnnnnnnnnnnnnnnnnnnnnnnnnnnnnnnnnnggggtgtcgcgttgcggggggggtgttttctgatgggggggtgcgttgggcgccccggtccaaggggtgggtaaaccggcgccagaaatacgccccccctgggcaaaggcccacgccccacgatatgggccgggacactgtccctggagggatttaacctgagcgcgtgcttccaaagggaaagtaaagtttaggggtgcaagctggcccccgtgggcttgccaagcggcctgttagcgcgggcctcctgtgggaaggatccccccgacggcgccgcgcaggttggccatctcgaggccggcgagatacgccgcccgcgacctcaggccggcgcaccacacattnggngcccgccggcatccccacgctgcaggggctgnccgacaacaacctccaatcaaantcccccnaagcgatgcacccgccttttcgnctnccnctctttttttttttttttttantntnttttttttttttttttttttttttctacaatccaattcacttatttctgaaattctacaatccaattcacttatttctgacacagcccctcattgcncacaccaagtcacctaagnnnnnnnnnnnnnnnnnnnnnnnnn

SEQ ID NO: 7451 - DNA, 413 bp, Zea mays
  misc_feature (61)..(61): n is a, c, g, or t
  Probeset Number=SeqID_21854
acgtaggcccccccccccagacaccaatcttggctgacaacgccggcggagccattgctcnacctttcaaaaccagagcgacagagttctcggagaaagagctggctcttcgcattgcaccagagctctggcttaaacgacttgtcgtgggcggcattgataaagtctttgagatagggcctgccttccggaacgaaggtattgatggcacccacaaccccgagttcacgacttgcgaattctacagtgcctattccaacctggccgagctcattcagcagactgagcagatcatgtttggcatggcgtccgagtgccagaagctaatttcgaccgacctgtcgtcgcttccggagatcgacgttgagaaattccgtggtccttacaaacaagtcgagttcattccgagcctc

SEQ ID NO: 7452 - DNA, 790 bp, Zea mays
  misc_feature (484)..(488): n is a, c, g, or t
  misc_feature (491)..(491): n is a, c, g, or t
  misc_feature (494)..(495): n is a, c, g, or t
  misc_feature (497)..(498): n is a, c, g, or t
  misc_feature (500)..(502): n is a, c, g, or t
  misc_feature (512)..(512): n is a, c, g, or t
  misc_feature (521)..(521): n is a, c, g, or t
  misc_feature (523)..(527): n is a, c, g, or t
  misc_feature (531)..(543): n is a, c, g, or t
  misc_feature (548)..(564): n is a, c, g, or t
  misc_feature (566)..(579): n is a, c, g, or t
  misc_feature (581)..(589): n is a, c, g, or t
  misc_feature (596)..(790): n is a, c, g, or t
  Peptide Sequence Number=SeqID_12794
  Probeset Number=SeqID_21855
gtggcctgcggtccggctttgcctcccctactgtcgcgaatgtgaagcttgcggggtatggagatggcgatggccgtggggatgaaccctgtcacggcggacgttgtggaactctcgcggctgcaccggtatctgtcgccgcgtccggccgtggaggaggtggaggcagcggtggcgataccggcctcggcggaggcgaaggaggcgcgcctcactgaaatcaccagccgccagggaagagaaggcagctcgagcgttggcacagggcgtgctggtcgagctcttcgacgtggtgagctaggccggtcggctatcgtgtccctcttggcgtgcacgtggctgtcggtggcctcgacatggattgcgacagctgaggacaaggaagcactgaaggtagccatggtctgcaagacacaaaggagcaggacataagaaagggaaaggcggctcttgtttccactgaactgctgagggaggatctggnnnnnaanggnngnnannntctgaaaaanccgaaagtngnnnnntctnnnnnnnnnnnnnggcgnnnnnnnnnnnnnnnnnannnnnnnnnnnnnnannnnnnnnntgaagcnnnnnnnnnnnnnnnnnnnnnnnnnnnnnnnnnnnnnnnnnnnnnnnnnnnnnnnnnnnnnnnnnnnnnnnnnnnnnnnnnnnnnnnnnnnnnnnnnnnnnnnnnnnnnnnnnnnnnnnnnnnnnnnnnnnnnnnnnnnnnnnnnnnnnnnnnnnnnnnnnnnnnnnnnnnnnnnnnnnnnnnnnnnnnnnnnnn

SEQ ID NO: 7453 - DNA, 620 bp, Zea mays
  misc_feature (1)..(7): n is a, c, g, or t
  misc_feature (620)..(620): n is a, c, g, or t
  Probeset Number=SeqID_21856
nnnnnnngtagaatggttttgtcagcagtgatgaagaagccagcaatacaggctgcagatataatgagtgcttgtgcagtgtagttgagattcgcctttgcccaaggaaggacacggcagccaaccaactgcatcagaaaaaaaatatcatgtacatcagaaccataagcaggtaacgatccaaatcacaccatacttaaacataagggcaaaagaatgtagaagggtagctagtttttttcagtcattagtatttcaatgttcattgaatatacccaaagatttagtcttaaataaaagggaactgaaaacagctatccacgtgcctgaaccttgtttgtggattctgctgggtttcaactctaaaggtctagcctacacaacttgtttggaactaaaagactttgttgttctcgttgctgctgctgtattagaattttaatgttcatactaaactataagaggagacatcagacatgactgttggaactgtattagggtttaccctctcgtccctctgtaatgggcctaggcccaactactcttattataaatacatctcccaaccctagctagggctagggtttttcccatacttcaacatggtaccgacagcaacn

SEQ ID NO: 7454 - DNA, 620 bp, Zea mays
  misc_feature (1)..(1): n is a, c, g, or t
  misc_feature (614)..(620): n is a, c, g, or t
  Peptide Sequence Number=SeqID_12795
  Probeset Number=SeqID_21857
ngttgctgtcggtaccatgttgaagtatgggaaaaaccctagccctagctagggttgggagatgtatttataataagagtagttgggcctaggcccattacagagggacgagagggtaaaccctaatacagttccaacagtcatgtctgatgtctcctcttatagtttagtatgaacattaaaattctaatacagcagcagcaacgagaacaacaaagtcttttagttccaaacaagttgtgtaggctagacctttagagttgaaacccagcagaatccacaaacaaggttcaggcacgtggatagctgttttcagttcccttttatttaagactaaatctttgggtatattcaatgaacattgaaatactaatgactgaaaaaaactagctacccttctacattcttttgcccttatgtttaagtatggtgtgatttggatcgttacctgcttatggttctgatgtacatgatattttttttctgatgcagttggttggctgccgtgtccttccttgggcaaaggcgaatctcaactacactgcacaagcactcattatatctgcagcctgtattgctggcttcttcatcactgctgacaaaaccattctacnnnnnnn

SEQ ID NO: 7455 - DNA, 375 bp, Zea mays
  misc_feature (1)..(3): n is a, c, g, or t
  misc_feature (18)..(19): n is a, c, g, or t
  Peptide Sequence Number=SeqID_12796
  Probeset Number=SeqID_21858
nnnccggccgggccgggnncttctagtgacataaacttaaaaagctgaaacaaacggggcacagtcacctttaccgcacgccgacaaggatggcgtcgtggtcgtcgccctcatccgccgccgccgcctcgggcgcccgattcggccccttcccgagccgagcgcagcggctcgtgccgtatccgtcgctcgcccgcggaacccccgcctcgacgctcgtcctcaggcctcacccggacggccgtggtcatggctctcctcgcgcatatcggtacctcttcctcgcggtgttgcaccgtcgtcgtcgaagccgagggccttaacatcgtttaacacgttagtcatctcagcggcaagacatcaatggtatttctc

SEQ ID NO: 7456 - DNA, 674 bp, Zea mays
  misc_feature (1)..(17): n is a, c, g, or t
  misc_feature (29)..(29): n is a, c, g, or t
  misc_feature (35)..(35): n is a, c, g, or t
  misc_feature (37)..(37): n is a, c, g, or t
  misc_feature (45)..(45): n is a, c, g, or t
  misc_feature (49)..(49): n is a, c, g, or t
  misc_feature (51)..(52): n is a, c, g, or t
  misc_feature (70)..(70): n is a, c, g, or t
  misc_feature (76)..(76): n is a, c, g, or t
  misc_feature (82)..(82): n is a, c, g, or t
  misc_feature (85)..(85): n is a, c, g, or t
  misc_feature (103)..(103): n is a, c, g, or t
  misc_feature (105)..(105): n is a, c, g, or t
  misc_feature (116)..(116): n is a, c, g, or t
  misc_feature (126)..(126): n is a, c, g, or t
  misc_feature (152)..(152): n is a, c, g, or t
  misc_feature (157)..(157): n is a, c, g, or t
  misc_feature (162)..(162): n is a, c, g, or t
  misc_feature (189)..(189): n is a, c, g, or t
  misc_feature (193)..(193): n is a, c, g, or t
  misc_feature (205)..(205): n is a, c, g, or t
  misc_feature (213)..(213): n is a, c, g, or t
  misc_feature (218)..(219): n is a, c, g, or t
  misc_feature (222)..(222): n is a, c, g, or t
  misc_feature (235)..(235): n is a, c, g, or t
  misc_feature (248)..(248): n is a, c, g, or t
  misc_feature (281)..(281): n is a, c, g, or t
  misc_feature (284)..(284): n is a, c, g, or t
  misc_feature (361)..(361): n is a, c, g, or t
  misc_feature (384)..(384): n is a, c, g, or t
  misc_feature (408)..(408): n is a, c, g, or t
  misc_feature (411)..(411): n is a, c, g, or t
  misc_feature (467)..(467): n is a, c, g, or t
  misc_feature (494)..(494): n is a, c, g, or t
  misc_feature (496)..(496): n is a, c, g, or t
  misc_feature (524)..(524): n is a, c, g, or t
  misc_feature (622)..(622): n is a, c, g, or t
  misc_feature (643)..(643): n is a, c, g, or t
  misc_feature (654)..(654): n is a, c, g, or t
  misc_feature (671)..(671): n is a, c, g, or t
  misc_feature (674)..(674): n is a, c, g, or t
  Probeset Number=SeqID_21859
nnnnnnnnnnnnnnnnngccccccccccnagtcgntncccaaggngttngnncctcacgtcaaggacaanattacntatggncgnaagattgaagctatccancncaatgagacancttccaaggnatccttaacttggagagagagcccgntggangcggngcagactgacgagtacgactatgctgntgtngcagtgcctttntccaaggntcgtnntgnggaagcgaccggnttattccaacctnttgaccagggctattggaacattgaactaccancantcctgcaaagtgaataattttctgtcccttcacctgatgacaagttctaatctcctcgcaggttgccctgcactacnagacacggttctgggagacgcangagaatcccatcttcggcggctgnggntccactgaccttccgggtatcggctccgtatgctacccagcatacgagattaactncacgaggcctggcgtgattctgtcgtngnacatctcgggcacggatgcacgatccgnggcagctctcagcgatgaggaccacgttgccatggtccaacgcgccatggtcgaggtccacggccatatcgccgatgagcaatggaccggtgcctacnaccgtcagtgctgggaggtanacgagcaccangctggagcctgggctgngcn

SEQ ID NO: 7457 - DNA, 1273 bp, Zea mays
  misc_feature (1)..(18): n is a, c, g, or t
  misc_feature (1273)..(1273): n is a, c, g, or t
  Peptide Sequence Number=SeqID_12797
  Probeset Number=SeqID_21860
nnnnnnnnnnnnnnnnnntttttttttttgctgcaagtgtaatcattattcatttctcatttctcttccttctagtatgatctgaactttcatttctgcctaaccctagcaaattatttacacaaatttcagctcaagcggaagtccacaaatcctaataaaaccatcgcgaagtaaagagaaacatcctaataagaaaaattctgatcacacgagaaccggaagagcaatgaacaagaaggaacagagaaaccgcaagcacgaagcgcacgcacggacgggtgtgtccggacggacgagtcatcaaggccggaagagcgccccgatgaagctgaggcagccgagcagcatgcggcagagggagccgcgccagcggcggccgcggcggccggggtcctccctcgcggacggcgtcatctgcaggtacgcgtacgccgcgtgcttcacgagcgggtgccggatcatgtgtatgtccccgcagctgccgcacccgccgccgccgcaggccccgggcgagccgcccgccgcggcgtactccggcgacgacaggatgtcccggaggctggtgtacccgtgccccccgccgccgccgctgctgttgctgtcgtcgccgtcgctgccggcgccgccgttgggtatctcgatcaccggcggtggcgcccactgcggcgccgcgcgcttcttgggcgtgcgccagtgccgcagctcgaagtcgccggcggccaagccgttggcgagcggcgagcgcggccggcggcactgctgcgtcggcggcgtcggcgtcagcgaaagcttctgcggctccggcgcgacggcggctggcgccggcggcatagcagaagcggtgggggaggggggggcggtcgagtgaagcggcgagggcgcctcgagctggccggagaagtcgaccaggactccgctcgctggaacggtggtgtggtgcagaatgcagaggagggagtgggagcctgggaggaggtgaggaggagcaggagaccagccaccgttcttcctcctcctcctcatcctcctcctccgtgtcgcgcgccgccgccggcccgaacgcgcagttctccggtcgccgttcacgcgccgccgcatcccgtccctcgtccgcgcccgtgagttcctcgtcatcggcactgatgacaatggctcgcaggaacaggaggagggaagccatcgtccagtggaccgatcgatgggacggaatggaatggaatgtactgctcagaacgcaggtggatggagatggcagtgctcgcagctgccn

SEQ ID NO: 7458 - DNA, 193 bp, Zea mays
  misc_feature (93)..(95): n is a, c, g, or t
  Peptide Sequence Number=SeqID_12798
  Probeset Number=SeqID_21861
acacttgccctctccacctggaaccccgagcaggctccgccggccgcggcgggtgccgcgacgactcggcacgcgctagctagctagctgttnnncttcccgagggccccaccactaccaccatcctgcagtcctgctgcccggcctcgcgtggcggatgatgattccgagggagccgtggcggccagagcac

SEQ ID NO: 7459 - DNA, 502 bp, Zea mays
  Probeset Number=SeqID_21862
agtcgcatcgagagatcttaggaagcagcaaaaaatggcggtcccgttgcttaccaagaaggtcgtgaagaagaggtccgccaagttcatcagaccccagagcgaccgtagaatcactgtcaaggaaagctggaggaggccaaagggtattgattctcgggtcagaagaaagttcaaaggtgtcacgttgatgcccaatgttggttacggatctgacaagaagacccgtcactatctccccaatggattcaagaagttcgttgttcacaacacgagtgatctcgagttgttgatgatgcacaacaggacttactgcgcagagattgctcacaacgtctccaccaagaagaggaaagccattgtcgagagagcttctcagctagacattgttgttaccaacaggcttgctaggctccgtagccaagaagacgagtgaagaaaacaaggcgctggtttgttgcatttcgttatttgttactgtgttttgtgtttgcactcaaca

SEQ ID NO: 7460 - DNA, 468 bp, Zea mays
  misc_feature (262)..(262): n is a, c, g, or t
  misc_feature (417)..(417): n is a, c, g, or t
  Peptide Sequence Number=SeqID_12799
  Probeset Number=SeqID_21863
gactctgcctgcttccagcttccgtgccgccgtgcgcactacccattgccagccgccaaccctgcgccgcgcttaccctaaccaagtagccagccgcccagcccccgcgcactgcccaccggccaccgcggcacgccggcaccgcgccaccgcccaggcgcccacggccccacgcggccatgccccgacggcccgagccgccgctcgcttgcctgctcgcctggagcggctggaggccggagccgccgcccgccaagccagnggcctagagcagcagagctgccagagcactgccacaggccgcagcgacgcagccgtcggctgttgtccagccgagcagccgttgtcccacggccccacgccccgacggctcgacgcccggaccggaggccggagccccggagcaccgccgccggncgccgcacgcccgcacctcgcctagtcgcttggagcggctggagggcgaag

SEQ ID NO: 7461 - DNA, 1468 bp, Zea mays
  misc_feature (1)..(1): n is a, c, g, or t
  misc_feature (1300)..(1468): n is a, c, g, or t
  Probeset Number=SeqID_21864
ncctcgaggccggccgggcaccgccgctccagcctcctctagagccttcgccgcttcgcgcctcggcggcagtcatcggatcggaacctgcacaagtagaagtacgcaacaagccttgccactaacatgccttcagtcgaggtcgaggtccaggtgggcggcgccggcgggtggaggccgaagcagcagcaccaccatccccttgagatccgtcaggtgtgggcggacaacgtggaccgcgaattcaagctcatccgcgccgccatcgagcggttcccctacgtgtccatggacacggagttcccgggcgtcatccaccaccctcccccggccgtccaccactccacgctcaccgcgccgcagcgctacgccctgctcaagtccaacgtcgacgcgctgcacctcatccaggtcggcctggccctggcgccgtcccctggctccccgcccgcgctcgccttccagatcaacctccgcggcttcgacccgcgcgtgcaccgccacgcgccggactcggtccgcctgctcgccgccagcggcctcgacctcgccgcccaccgcgccaggggcgtccccgcgcgcgccttcgccgcgctgctcgcctcgtcgggcctcatctgcaacccggccgtcgcgtgggtcaccttcagctccgcctatgacttcgcctacctcgtcaagctgctcatgggacggaagctgccaagggcgctcccggacttcctgcgctacgtccgcgtctacttcggcgccgccgtctacgatgtcaagcacatggccagggtcgcatgcgcctcccacggcgaggtcgcgctgctgggcggcctcgagcgcgtcgccgccgcgctccgggtgcgccgcgcagcgggccaaggacaccaggcagcgtccgacagcgtgctcacctgggacaccttccgggagatggctaggatctacttccccaaggaaggcagcctggagccgtgcgccggcgtgctctacggcctcgagctcccaaactgaattcttcttgttcgtgtacagtacacagcctcccaaacgaagaaataacgattctttgattacttaaattcttaaaaaaaaaaaaaaaaagggcggcccttgcagtgcagaattctttcggatagtctcaaatatcgctactagagcgctatcaaactctttctctttccaaaagatttcagataaatctttataaaaaaggggtactttactactctcgggcgtgccatgttagttagttgcaggcctgtacagatgatgaatgttcttctacatcaacactagcagcctgcannnnnnnnnnnnnnnnnnnnnnnnnnnnnnnnnnnnnnnnnnnnnnnnnnnnnnnnnnnnnnnnnnnnnnnnnnnnnnnnnnnnnnnnnnnnnnnnnnnnnnnnnnnnnnnnnnnnnnnnnnnnnnnnnnnnnnnnnnnnnnnnnnnnnnnnnnnnnnnnnnnnnnnnn

SEQ ID NO: 7462 - DNA, 464 bp, Zea mays
  Peptide Sequence Number=SeqID_12800
  Probeset Number=SeqID_21865
agattatctggtgtgtttcgatggcgatgacagtagcagcttcgtcctctgtggcagtgatgattccacgtgtcacctccgtctccgaccgcttctccgccgttccttaccttcctccgctgcctcctcgctcttttggccgatcctctttcactgttccgccgaagctagtttcaggtaatggttcgcagaagggtgaattgatgaagatgagagcttcttcatcagatgagacctcaacgtccattgacaccaacgaactcttacagacttgaaggaaaagtgggatggtcttgagaacaagtcgactgtaataatatatggaggaggagccattgttgctgtttggttatcttccattgttgttggtgccatcaactctgttcctctgcttcccaaagttatggaacttgttggtctcggctacacaggatggttcgtctacagatacctcctcttcaagt

SEQ ID NO: 7463 - DNA, 448 bp, Zea mays
  misc_feature (283)..(283): n is a, c, g, or t
  Peptide Sequence Number=SeqID_12801
  Probeset Number=SeqID_21866
atctgacttcttcttccttgattttaatcctctctgcgacgtagggttttagcataaacctcgccgcatccttgcgccgcattctctctctgtttaatccgtctcatagctgcgacgaagaaacccttgtttgcattaccttgagaaggctcagtgatgaggaagctcaagaaccatgagaagaaggttctgaagaaagtaaatttcttggaatggaaaagggaaggcggccatcgcgaaaccctgatcacgggtcgttaccacatgggtggtcgtgacgatnacaaaaaatattcaggattgtgtaggatggtgcagaagctgaccaacgtgttgaaacagatggatgcaactgatccttttcgtattcagatgactgatacgctcctcgagaagctatacaacatgggagttataccgactaggaaaagcttggctttaactgatc

SEQ ID NO: 7464 - DNA, 321 bp, Zea mays
  Peptide Sequence Number=SeqID_12802
  Probeset Number=SeqID_21867
acaattcaactctaacctcgattcttcttcatcacaaactttctcaatcggaaaaaaatgtcgggccgtggaaagggaggaaagggtttgggcaaaggaggagccaagcgtcacaggaaggttctgagagacaacatccaagggatcaccaagccggcgattcggagactggctcgtagaggtggagtcaaacgtatcagtggtctcatctacgaggagacacgtggcgtcctcaagatctttttggagaacgtcatccgtgatgccgttacttacaccgagcacgccaggaggaagacggtgaccgccatggacgtcgtc

SEQ ID NO: 7465 - DNA, 465 bp, Zea mays
  Peptide Sequence Number=SeqID_12803
  Probeset Number=SeqID_21868
accggatgagaatctagggttccagatttactctcttctccttctcatcgatctacacatcctggatcttcaatctcaagatacctgtttagcttccatggcgaaaactcgacctggtgtcccctcgaaaatcaaaactgggaggaaggagctcgactcttacaccatcaaaggcaccaacaagctcgtcagagctggagattgcgtgttgatgcgtccctcagatgctggtaagccaccgtacgtggctcgtgttgagaagatcgaagcggacgctaggaacaacgtgaaggtgcactgtcggtggtattaccgccctgaggagtctcttggcggtaggagacagttccatggagccaaagagcttttcttgtctgaccattttgatgtccaaagcgcacacaccatcgagggaaaatgcattgttcacacctttaaaaactacacgaggcttgagaacgttgg

SEQ ID NO: 7466 - DNA, 500 bp, Zea mays
  misc_feature (342)..(342): n is a, c, g, or t
  Peptide Sequence Number=SeqID_12804
  Probeset Number=SeqID_21869
ctctcttgtacctctctctgctctcgatccagagcaagccggcgcccgaaaccacctcgtccgccggcccccacctagcccactggcgccggccccttcccctcagcccccggcgccactggccccgaccccatcccccgtcgcccctgtcggcctccgtgccccgtcccccgtcgcacgccatccacctctgtttgcgccaccggagcccactccgccaacgccaccggtcgcacgccgctcgtctgcctacgcccacacaacctgctgcaccgcccgcccgcctgcgctcgcaaccagccgctcgttgcccgcctcagccacacgcccgccttcgtgcgnctgcctgcgcggtccgcccgctggggcccgcctccaccaacgccaccagccgcaaccggcgccggcgccaccagatcgagtgcgtcccacagtgtcctacacagatagaggagcggcggatcgagaagcggttgttcgtctccaccagattgaggccg

SEQ ID NO: 7467 - DNA, 493 bp, Zea mays
  Probeset Number=SeqID_21870
aacaactttgcgatcataatcatctcagagagctcaaaccaagaaaaaaacgtcgcgaagaagatgatgcacatgaccttctactggggcatcaaagccacaatcctcttcgatttctggaaaaccgattcatggctgagttacatcctcactttagtcgcctgcttcgccttcgccgccttctaccagtacctcgagaaacgccgtgtccaattcaaatccctttcatccactcgccatcctaatcccccgcctcgcgccggcgtttccgcacctcttatccccaaatcgggcaccagatccgccgccaaagctgcgtcggtgctgcttttcggcgtcaacgcggcgatcggttacctgctgatgctggcggttatgtcgttcaacggaggcgttttcatcgcgatcgtcgtcgggttaacagtcggttacctcgttttcagatctgacgacgacggtgctgacgtggcggcggagaatccatgcgcgtgtg

SEQ ID NO: 7468 - DNA, 441 bp, Zea mays
  misc_feature (338)..(339): n is a, c, g, or t
  misc_feature (341)..(341): n is a, c, g, or t
  Peptide Sequence Number=SeqID_12805
  Probeset Number=SeqID_21871
ataatcaaaaaaataatctataccatcaaagcaaacatgaaaggcactttcactaacttgcttgtgcttctcttcattgcacttttttgtgcaaatgtcggtgctaggaaacttatttccggagatacccaattcaaggatgaaaaattccttggcggcggcggtggagccggtggtggccttggtgggatagggattggagctggtatcaatgctggtatcaatgctggaattggaggcggtttgggtggtggcggacttggcggtggcggtggtggactcctcggtggtggtggtggactcctcggtggaggcggtttagacggagggggcggtgnnanttggtggtggtggtggctttccttgaacgtatagtcaagtgtttgtgtgcggtgtgtgagctcattcacagcttattatgctactcaaatcatttccgtt

SEQ ID NO: 7469 - DNA, 463 bp, Zea mays
  Peptide Sequence Number=SeqID_12806
  Probeset Number=SeqID_21872
atttcttggtctcgcggcgcttctaacatctcttctgtgtctctcaagaagatgggattcctctctcaacagatctcaagagatgaactcaaaccaggagatcacatctattcgtggcgtaacgcttacatctacgcccatcacggaatctatgtagggaatggagaagtgatacatttcacttgtggaggtggtcttgggacaagaacagggacttccgtggacaacatcatcgttagttcggttcctaaccacggaggtgacaacccttgtcctaactgcagagaccaatcgaatctcgacggtgtgatctcttcttgccttgactgtttcctcgccggaggaaacctctatctcttcgagtacggtgtctctggacccatctttatggctaaaccgcgaggcgctatctgcacaacagcggtttcggactcctctgatgagaccgttcaccgtgcgagat

SEQ ID NO: 7470 - DNA, 436 bp, Zea mays
  misc_feature (157)..(157): n is a, c, g, or t
  misc_feature (324)..(324): n is a, c, g, or t
  Peptide Sequence Number=SeqID_12807
  Probeset Number=SeqID_21873
attcttctcttctcctctcccgataatcagatcctcgaaactctactcctcgaatcaggtctcagtttctgtgtagtttgcccatcagatcaacaaagtttcatgtctgaacttgattcccaggtccctactgccttcgacccgtttgctgatgcgnatgctgaggactcaggtgcgggaacaaaggagtacgtccacatccgtgtgcagcagcgcaatggtaggaaaagcttgacaactgtccaggggctgaagaaagagtatagttacagcaagatacttaaggacctcaagaaggagttttgttgcaacggaaccgtggtncaagactctgaactcggacaggttattcagcttcaaggcgaccagaggaagaacgtctccacgttcctagtccaggctggccttgtgaagaaggataacatcaagatacatg

SEQ ID NO: 7471 - DNA, 233 bp, Zea mays
  Peptide Sequence Number=SeqID_12808
  Probeset Number=SeqID_21874
gcgtttttcgaaggattaactgcatctagcttgtggtgggttcgagccaccaacgagtttcttggcgcccttagctgcagtcgttatatgcatattcagaaaattcaagagagtggaagctcaggatcgggaaagcaggatgagacttcgataaaccaaggcccgtatctaaacattgcagaagacgggttggtggcagcagccaacttggaggaaaacaccacacggtcaaa

SEQ ID NO: 7472 - DNA, 461 bp, Zea mays
  Peptide Sequence Number=SeqID_12809
  Probeset Number=SeqID_21875
aaaaactccacaccgaaacccgccgccgtcgctttttctctcactcacgaaagatgaagacgatcttgtcatctgagacgatggacatacccgaaggcgtcgtcatcaaggttcacgccaaggttatcgaagtcgaaggcccacgcgggaaactcactcgcgacttcaagcatctcaacctcgatttccagctcatcaaagacgccgtcaccggcaagcgacagctcaagatcgattcgtggttcggctctcgcaaagccagtgcttccatcaggactgccttgagccacgttagcaatctcatcgccggtgtcactcagggtttcctttacaagatgaggtttgtctacgctcattttccgatcaacgcttccatctccggtaacaacaagtctattgagatccgtaacttccttggggagaagaaggtgaggaaggttgatatgttggatggtgttacc

SEQ ID NO: 7473 - DNA, 400 bp, Zea mays
  Peptide Sequence Number=SeqID_12810
  Probeset Number=SeqID_21876
atctcatgctctttaccattgactacaaacatttgagacctctcaagaaaccagagtcatcacatcatctggatcgtctccgtgagagatagacatggccggcgcttacgatgcgagcttaccgagtgttcctgattggctcaacaaaggagacaacgcgtggcagctcacgtcggcgactctggtcggtctacaaagcatgccaggtctcgtcatcctctacgcctccatcgtcaagaagaaatgggccgtgaattccgctttcatggcactttacgccttcgcagccgttctcctctgttgggtcctcctctgttacaaaatggctttcggagatgagcttttgcctttctggggtaaaggtggtcccgccttcgaccaaggatacctcaagggacaa

SEQ ID NO: 7474 - DNA, 308 bp, Zea mays
  misc_feature (87)..(87): n is a, c, g, or t
  misc_feature (93)..(94): n is a, c, g, or t
  misc_feature (96)..(96): n is a, c, g, or t
  misc_feature (219)..(219): n is a, c, g, or t
  misc_feature (238)..(238): n is a, c, g, or t
  misc_feature (291)..(291): n is a, c, g, or t
  Peptide Sequence Number=SeqID_12811
  Probeset Number=SeqID_21877
tttctggaaaattagggtttgtatagtctcgagatgggtggaggaaacgcacagaaatcgaagatggctcgtgagaagaacttgganaaggcnngncaggccggaaaaggcagccaactggaagctaacaagaaagctatgtccattcagtgcatggtttgtatgcaaacattcatctgcacaacatctgaagtgaaatgcagggagcacgccgaggcnaagcatcccaaagccgatnttgtcgcttgcttccctcacctcagcaagtgatgaaactatcatttctcaccnaaaaaaggattccaatg

SEQ ID NO: 7475 - DNA, 409 bp, Zea mays
  Peptide Sequence Number=SeqID_12812
  Probeset Number=SeqID_21878
atttttttcgtctcgcaacgcaatcgcacatctcttcagcggctactatcagagagtgcccacaaaaaattgactgaccgagttaggtgttcatgcaacatcacttctcttctcctctcgtccgacgttcttctcaatctcagtagcgcgcgcttgctgcagcgtatgagaaacaggagtcatcggtgactttttggaggcatttggtgactacgaatgtgtggattgtcctccccacatgtgaccagtatattgaatgtcttttagaagcagttctggccgattacttctatcttcatgtgacgcgcgacatacactagtatatatatcgcggcgaacagctccttcgccgccgcgacgtacggggtaagcatcgcgttccacgacacgacgtcccttggccgccatc

SEQ ID NO: 7476 - DNA, 382 bp, Zea mays
  misc_feature (179)..(179): n is a, c, g, or t
  misc_feature (193)..(194): n is a, c, g, or t
  misc_feature (256)..(256): n is a, c, g, or t
  misc_feature (314)..(314): n is a, c, g, or t
  misc_feature (319)..(319): n is a, c, g, or t
  Probeset Number=SeqID_21879
acacccaggaagcgcacgacagctatagcaccaagctgataggaagcaatcattggccagtcgatcatggcgaggattcagctttctgccatagcggccttcgccgtcttcctcgcgctggccgccccctccattgccggcgaccccgacatgctccaggacgtctgcgtcgccgaccngaaatcctcgatcnngctgaacgggttcccgtgcaaggcggagatcacggcggacgacttcttcttcgccggtctcnagaagcccggcaacacaaacaacccggcggggtccaacgtcactgcggcaaacgtgcngtcantcccaggggtgaacacgcttggcgtgtccatggcgcgcatcgactacgccccgggaggccaga

SEQ ID NO: 7477 - DNA, 389 bp, Zea mays
  Peptide Sequence Number=SeqID_12813
  Probeset Number=SeqID_21880
tacgggcacataagaatttgatcccacacctttgtgacaacgcctcggcgctctggaactttctcgtcgcaacattctcttgactggctcaagtttgacctcctgttaatcgttcactgtttcagtagccatggcaaagcatcaccctgatctgatcatgtgccggaaacaacccggcattgccatcggacgactgtgtgagaaatgcgacgggaaatgcgtggtgtgtgattcttacgtgcgtccctgcactctggtgcgtatttgcgacgaatgcaactacgggtcgttccaaggacggtgtactatttgcggaggggttgggatctcggatgcttactactgcaaagagtgtacgcagcaggagaaagacagagatggttgtccca

SEQ ID NO: 7478 - DNA, 427 bp, Zea mays
  misc_feature (187)..(187): n is a, c, g, or t
  misc_feature (385)..(385): n is a, c, g, or t
  misc_feature (390)..(390): n is a, c, g, or t
  Peptide Sequence Number=SeqID_12814
  Probeset Number=SeqID_21881
atcgccctctcatattttctccacaaactctttccgaaaaaaaaaacacagttttagcatatttcacgtaaagaaaacaaagctatggcggatcagctcaccgacgatcagatctccgagttcaaggaagccttcagcttattcgacaaggatggtgatggttgcattaccacgaaggagcttggcnccgtgatgcgttccctaggtcaaaacccaacagaagctgagcttcaggacatgatcaacgaagttgatgcagatggtaacggaaccatcgattttcctgagttcttgaaccttatggctaggaaaatgaaggacacggactctgaggaggaactcaaggaagcgttcagagtctttgataaagaccagaacggtttcntctcntgctgctgagttgagacatgtgatgacgaacctaggc

SEQ ID NO: 7479 - DNA, 456 bp, Zea mays
  misc_feature (45)..(46): n is a, c, g, or t
  misc_feature (432)..(432): n is a, c, g, or t
  misc_feature (443)..(443): n is a, c, g, or t
  misc_feature (445)..(445): n is a, c, g, or t
  Peptide Sequence Number=SeqID_12815
  Probeset Number=SeqID_21882
atataatttttcgtacggttccctctacttcgctttcaaaacttnnataaaacaaaatggcgggtcgtggaaaaactctcggatctggggttgctaagaaggcgacgtctcggagcagcaaggcgggtctccagttccccgtcggccgtatcgcccggttcttgaaaaacggcaagtacgccgaacgtgtcggcgccggagctccggtctacttggccgccgtactcgaatacctcgccgcagaggttttggaattggctgggaacgcggcgagggacaacaagaagacaagaatcgtgccgcgtcacattcaattggcggtgaggaacgacgaggagctgagcaagttgcttggagacgtgacgattgctaatggaggtgtgatgccgaacattcacaatcttcttcttcccaaagaaggctggtggtgcntccaaaccttncnggtgacgacga

SEQ ID NO: 7480 - DNA, 466 bp, Zea mays
  Peptide Sequence Number=SeqID_12816
  Probeset Number=SeqID_21883
gttttgtgctcaattctgcagagatcgtcactgcttgaagacggcttgctgctttagcgtatctgatctctgcaaatcataatgtctttggtcgcaaatgatgagtttcagcatattctccgtgtgctgaacacaaatgttgatggtaagcagaagataatgttcgctcttacctctatcaaaggtattgggaggcgattggctaacatcgtctgcaagaaggctgatgtcgacatgaacaaaagggctggtgagttatctgcagctgaaatcgacaacctgatgacaattgtcgcaaatccaaaacagtacaagatcccagactggttcctgaacagacagaaagattacaaagacggaaagtactcccaagtcgtctccaatgcccttgacatgaagctcagggatgaccttgaacgtctcaagaaaatcaggaaccatcgtggtctgagacactactggggtc

SEQ ID NO: 7481 - DNA, 1030 bp, Zea mays
  misc_feature (1)..(41): n is a, c, g, or t
  misc_feature (53)..(57): n is a, c, g, or t
  misc_feature (844)..(844): n is a, c, g, or t
  misc_feature (857)..(1030): n is a, c, g, or t
  Peptide Sequence Number=SeqID_12817
  Probeset Number=SeqID_21884
nnnnnnnnnnnnnnnnnnnnnnnnnnnnnnnnnnnnnnnnnaggagcagagannnnngggaaaacaatggcgggagaaggagacatcaagctgctcggcatggtggtgagcccattcgtggtccgtgtgcgaatggcactgcacatgaagggcgtgagctatgagtacatcgagcaggacctcttcaacaagagcgagctcctcctcaggtccaacccggtgaacaagaaggtgccggtgctcatccacggcggcaagcccatctacgagtcgctcgtcatcatgcagtacgccgacgaggtgtggagcggcaagggcgcctccatcctccccgccgacccgcacgagcgcgcagtcgctcgcttttgggccgcctatgtcgacgacaaggtatgcactgtgtttgttatttccattccaagcaccagagccgtggtacaggaagagcttctcaacaaccgcgggtgccaatgtcgtggcggcgtctcttttgcagatgttccctgcttacatcggcatcatgaaagcggcgactgaggaagcaagagcggagaaggccaaggaggcgcttgtggtgttagcgaacctggaagaggccttcgcccagtgctcaaaagggaagcctttcttcgccggcgactccgtcgggtacctcgacctcgccgtcggatgcaacctgttctggctcgaggcaatacgcaagatgtttggggtgacgttctttgacgtgggcaagaccccgctcctggccgcgtgggcggagcggtttgccggaaccgagatggcgagggaggttgtgccggacgccgacaccgccgtggtgtttgccaagaagcttcaggcncggtttggctctnnnnnnnnnnnnnnnnnnnnnnnnnnnnnnnnnnnnnnnnnnnnnnnnnnnnnnnnnnnnnnnnnnnnnnnnnnnnnnnnnnnnnnnnnnnnnnnnnnnnnnnnnnnnnnnnnnnnnnnnnnnnnnnnnnnnnnnnnnnnnnnnnnnnnnnnnnnnnnnnnnnnnnnnnnnnnn

SEQ ID NO: 7482 - DNA, 376 bp, Zea mays
  misc_feature (243)..(243): n is a, c, g, or t
  misc_feature (358)..(358): n is a, c, g, or t
  Peptide Sequence Number=SeqID_12818
  Probeset Number=SeqID_21885
atcacaccaaaccttcttacttctccatattgacaaagatacccatttgcttctcttagcttcttcatcatggcggttttagtaatatctgctctcctgctgcatgtcctagcgtcttcaacctgtgttcaaggcttctaccgtcgtggcggccaccatcctgggggccatggaggaccgtggatcaacgctcatgctactttctatggcggtggtgatgcttccggcactatgggtggagcntgcgggtacgggaatctgtacagccaaggttacggaacagagacggctgcgttgagcaccgcgttatttgataacggacttagctgtggtgcctgtttcgagctgaagtgtgtcnacgatcctcagtggtgca

SEQ ID NO: 7483 - DNA, 432 bp, Zea mays
  misc_feature (95)..(96): n is a, c, g, or t
  Peptide Sequence Number=SeqID_12819
  Probeset Number=SeqID_21886
atcctctaatctatctctcaatatgtctccttcgtgaatctaaactttctcaacaaccaccaccatcacctccgacagaattatctcaatttccnncccctcgttctccactactctacctgattactctttttatttcttatatcctcaaagtttttcctttcttcagatgcagatttaaaacatgaagaagataggaaacagatcgggagggaggagtcagaagaagcttgacagcagaggaggtagaagaatcgtgatggtgggggcataagaagcctcacggcggagaaggcgtggcaagcatatgagtttgtcgctcagccgtaacaccggtggctctaccaccagactgagtcttcgcttgagccatggcaatcggagctggtggaggtggaggtgtcggtgtaaaaagctgatggagttgacgaa

SEQ ID NO: 7484 - DNA, 423 bp, Zea mays
  misc_feature (262)..(262): n is a, c, g, or t
  misc_feature (267)..(267): n is a, c, g, or t
  misc_feature (364)..(364): n is a, c, g, or t
  misc_feature (387)..(387): n is a, c, g, or t
  Probeset Number=SeqID_21887
gagaagagtcgtcgtctccggcgatcgccggaacaagaacatgttggcgattacgagagtgattagccggagaatccacggcaagggtgatgtagctgttccaaaaatctcaggattctctattgtatctcccaaaaacgttgaggtagagtatgcagatggcagcaagttcagtttctcatctgagtttctgagagtgcatagcccagctgctgatgggaaagtcagatcaatcggtggtgaaaaggtgatatctggaagncggtntgtaggaatcatgtctgcagaaccggtgggaaactatggggtaaggttagtgtttgatgacttgcacagaacaggaatatacccatgggactatttntatgagcttgggagcaataagtntggtctcatgagaagctatattaagattccttcaaa

SEQ ID NO: 7485 - DNA, 379 bp, Zea mays
  misc_feature (206)..(206): n is a, c, g, or t
  Peptide Sequence Number=SeqID_12820
  Probeset Number=SeqID_21888
agctctttaagtgtaaagtcagagagaaaaaaaaggagagaaaaggtcgtgggtttcatcctctccggcggcctccatggcgctgtgagaggagggtatagctctagggtttctttgtttgctgtgtgtagtttcttctggctaagtgttttaccatcgtgatttaaggtgaggaggggtgagaagatttgttttgagcgccgacnatatcttttggtgtcttcggagtcgatttggagtgttggttcagatctagtacggcgaggtggtaatttggagctctggtccccttcgattcagatctgggtttgttacctagggtttggtcgttttggtactgtattagtttttggccgctgattttgatcttttgactctc

SEQ ID NO: 7486 - DNA, 473 bp, Zea mays
  Probeset Number=SeqID_21889
attccaatttccagtcacaagatctaaacaatcatagaaacacgacagcaagccaagaatcaagaggctcggggaagatgcaggcggcgaaggagaaggtgaaggacggggtgagcgcggtgaaggccaagaccaagatcgcgcaggccaaggcgtcggagaaggcggaggcggccacggcgaggtcgcacgccgagcgggagctggcgcacgagcgcggcaaggccaaggtcgccgccgccaagatggagctgcaccaggacaaggtcctacaccgggaggaggccatcgagcaccgcatccacaagcacggcggccacggccaccaccaccacaagcacggcgtcggcatcgtggccgcgcccgcgccggcgcccggggcaggggcgtactactctactgctgcacgtcaccactactagcgctagctagacgggcacattcgccgactgtgcaatatgatcccgctagct

SEQ ID NO: 7487 - DNA, 480 bp, Zea mays
  Peptide Sequence Number=SeqID_12821
  Probeset Number=SeqID_21890
gcgtcgctctactcggcggtgatcaccggcgccgtcaacgtgctggccacgctggtgtcggtgtacgccgtggaccgcgccgggcggcgcgcgctgctgctggaggccggcgtgcagatgttcctgtcgcaggtggtgatcgccgtggtgctgggcatcaaggtgacggacaggtccgacaacctgggccacgggtgggccatcctggtggtggtcatggtgtgcacctacgtggcgtccttcgcctggtcctggggcccgctggggtggctcatcccgagcgagacgttcccgctggagacgcggtcggccgggcagagcgtgacggtgtgcgtcaacctgctcttcaccttcctcatcgcgcaggcgttcctctccatgctctgccacctcaagttcgccatcttcatcttcttctcggcgtgggtgctcgtcatgtccgtcttcgttgctcttcttcctcccggagaccaagaacgt

SEQ ID NO: 7488 - DNA, 474 bp, Zea mays
  misc_feature (6)..(6): n is a, c, g, or t
  misc_feature (441)..(441): n is a, c, g, or t
  Peptide Sequence Number=SeqID_12822
  Probeset Number=SeqID_21891
ctttcngatacctttctcctttgaaagcaacgccgacaactaaatcggattctcttcacttaagtctccggcgacttctcctccgttacagcttccatccgtttcgtcatccccaccccaacttaccgtcgtctctctcatctctgtcgtcaatcaaatctgagttctagtttgtacttggtttctgatctaatctgagcaaaggagattagaaaagtgctagtttctgattgagtacgtgttggagaaaccgtttgaagcaacagtacaaccgtgagagaaagagagtggccattggtaaattcacttgtgtgatttcgtgtagacggtggacctggtgctgtctaattacggtgcagaaggaacatggccatacctgattgatgagttcgttgagtatttatatgacaagagcattgttgagaagtaacctgccatctnggagaagtaatcagttctattttacaatttctc

SEQ ID NO: 7489 - DNA, 399 bp, Zea mays
  Peptide Sequence Number=SeqID_12823
  Probeset Number=SeqID_21892
atcgtcaacgcgaatcagtcaccgaagacagaagagagatgaggttgttcgatccgtggccagtgttcttcaagagggagtggaaacgttgctggccgtttctcaccggattcgccgttaccggcgtcctcatcaccaagctcacggctggattcaccgaggaagacaccaagaactccaagttcgtccaacaacacaggcggtgaacatgagaaagggaaagtcggctttcaaaactattctaataacatagaagagaggattcttgatactgttcgtctctcttttccttttttttctacttttgttctccccgtatgtttgaagtggattttgattcctccctttctccccatacatttaaataaatcttacagtcctgaaaaaaaaaaaaaaaaa

SEQ ID NO: 7490 - DNA, 458 bp, Zea mays
  Peptide Sequence Number=SeqID_12824
  Probeset Number=SeqID_21893
atcctcctctgctacacttgtttactcctgagcggcactcggaatcagtcaggaaactctttgctttgcttgctatggctcgtcgtgaggatcgttctcatcccaagcctcaggactcatgtaccatcgagtttgacggtgcttccagaggaaaccctggaagagctggtgcaggagccgttctccgtgctccagataatactgtgctcttccgttctcgcgagggtttaggctctgctacaaacaacgttgctgagtatcgagctctcaatcttggcctcgagacggctcttaacaacggctttcgaaatgtgcgcgtccagggtgattcacagcttgtttgtaaacaggttcaaggtgaatgggcaacccgacacccgaaaatggctgagctttgtggacaagcacatgagcttatgagtcagtttgactcatgtgatattcaacacgttcccagg

SEQ ID NO: 7491 - DNA, 463 bp, Zea mays
  misc_feature (33)..(33): n is a, c, g, or t
  misc_feature (439)..(439): n is a, c, g, or t
  Peptide Sequence Number=SeqID_12825
  Probeset Number=SeqID_21894
tcctttcaccaaccggccggacgggatgcacgncgcgggaaaggggggactctcctctcctcccccgccaacgtgggctcgtcggcccgcaacccgacgagcgagccgtcgccgtcgccctccgcgtccgcacccgacacggtgcgccgaacgtggcgccccacttgtggcgctccctcgctcgccgttgcctacttagccaccagctccgcgccgctgaagggctgaatcgaagcggcagtgatgatgaggcccagacccttcggttccggtgtggcatcggccgccgcggccgaggtttcggtgggcgcgggatgccgcggcggctgggcgtggaggcccaggccgagggcgcggccggggcagcgcttgagggtcagaggggcgcctagcccccacgcggccgcgccggcgagcgccgtgcacgcggagccccacnacggcgagcggttccgcccgttcg

SEQ ID NO: 7492 - DNA, 463 bp, Zea mays
  Probeset Number=SeqID_21895
accgactcggacacgccaacgccttcggtcgaagcaaagcaacatccgtccataataaaagcggaagctttgctctcacggatacaccttctcctcccatccaaattccaaagaagcaaaaaggcggagcagagcaagaccaaagcggccagtctcttgcaagcctcgccgccgtcgccgccggctgatcagctccggtgcgtgcgggatgggcagcgggaggccggctgcgtggcggacgtgcgcggcggcggcggcggctgcgtgcgccgtgccggtggccttgtcactggtgctgctctggctgcccctgctttgctgcgccgtggccgtggtccggttccggcgggcgaggaggaggatgatgcagatgtgcggcggcagcacaagaggcggcgggcgatttggggcggttgacgccggcgatcggctggggctgctgcagaagtactcgaggatcagc

SEQ ID NO: 7493 - DNA, 435 bp, Zea mays
  Peptide Sequence Number=SeqID_12826
  Probeset Number=SeqID_21896
acatcaattcacattctctcagaaaccaaacagcaaaaagagtaataaacccaaatggctcgtaccaagcaaaccgctagaaaatccaccggaggaaaggctccgaggaagcagctggcgacgaaagcggcgaggaagtcggctccggccacgggaggagtgaagaagccgcacagattccgtcccggaaccgtcgcccttcgtgagatcaggaagtaccagaagagcaccgagcttctcatccgcaagcttcccttccagcgtctggtccgtgagatcgctcaggacttcaagatggatctgaggttccagagcagcgccgtcgcggctttgcaagaggctgctgaggcttaccttgttggtttgttcgaagacaccaatctctgcgcgattcacgccaaaagagtgacgatcatgcccaaggatatcagctcg

SEQ ID NO: 7494 - DNA, 474 bp, Zea mays
  misc_feature (196)..(197): n is a, c, g, or t
  Peptide Sequence Number=SeqID_12827
  Probeset Number=SeqID_21897
aacccgtccttgtcgtagcctacctccatctctaagaatcaacatgtctggtgatgaagctgctcctgctgttgttgttcctcccgttgctgagccctctgcgattccagaggacatggatctcttaactgcattggagctcacgcttaggaaggctcgtgctcacggtggcgtggttcgtggtctccatgaatgnnctaagcttattgagaagcggtctgctcagctctgtgtcttggctgaggactgcaaccagcctgattacgtcaagctggtgaaagctctctgcgctgatcataacatcaacttgcttacggttccgagtgctaaaaccctcggtgaatgggctggtctttgcaagattgattcagagggtaatgcgaggaaggttgttggatgctcgtgccttgtagtcaaggactatggtgaagatactactgcactcaacattgtcaagaagcatattgaatcaaa

SEQ ID NO: 7495 - DNA, 445 bp, Zea mays
  misc_feature (434)..(434): n is a, c, g, or t
  Peptide Sequence Number=SeqID_12828
  Probeset Number=SeqID_21898
aaagttaacaaacattcgatcccatcatctccgattcaaagccatggctcgtacgaagcagactgcgaggaaatcgacaggaggaaaagctccgaggaagcaactcgccaccaaggctgcgaggaaatctgcaccgaccaccggaggagtcaagaagcctcaccgttaccgtcccggaaccgtcgctctccgtgagattcgtaagtaccagaagagcactgagttgctgatccgtaaacttcccttccagcgtcttgttcgtgaaatcgctcaggatttcaagacggatctgagattccagagccacgcagtgttggctctccaggaagctgcggaggcgtatttggtgggtttgttcgaagacacgaatctctgtgccattcacgccaagagagtcaccatcatgcccaaagacattcaattggctaggcgcnttcgtggagag

SEQ ID NO: 7496 - DNA, 481 bp, Zea mays
  misc_feature (436)..(436): n is a, c, g, or t
  Peptide Sequence Number=SeqID_12829
  Probeset Number=SeqID_21899
aaacaaaccttctgagatttcgccggcgagagaagagtgagagagagagatccaacggctgagatgttccttcgtgcaatcggacggccgttattggccaaagtgaagcagacgacggggatcgtggggctcgacgtcgtaccgaacgcgagggcggtgctgatcgatctctacagcaaaaccctaaaggagatccaagccgtgccggaggacgaaggataccgtaaagcggtggaatcgttcacgcgccaccgtctcaatgtgtgcaaggaagaggaagactgggaggcgatcgagaagcgtcttggctgcggtcaagtcgaggagctcatcgaggaggcgcaagatgagctcacactcattgcgaagatgatcgaatgggacccttggggtgttccagatgactacgagtgtgaagtaattgagaacgatgcanccattcccaagcacgttcctcagcatcgacctggtcctcttcctg

SEQ ID NO: 7497 - DNA, 282 bp, Zea mays
  Peptide Sequence Number=SeqID_12830
  Probeset Number=SeqID_21900
ttactttttccgttttctcttttgttaaacaatactcgacccgttggtcgtcaggatactcttctccgtttcatttccatccttcttcttgcagatctctcagtaacgctccttgcattgcttcaattctactggcttgccctcgcagcctttctcgctatcctcctgattctccctctcgctctgctttgcccattccctgctggccttaacgctttattaagtagagaaatgagaagagcttcgcttactcgtatctacgccctttggaacgcgacatct

SEQ ID NO: 7498 - DNA, 548 bp, Zea mays
  Peptide Sequence Number=SeqID_12831
  Probeset Number=SeqID_21901
gaaaaagaaggaaaaagaattaaaagcagcacgcacgagacgagagacgacgaagcgttctcgataatcaccgtgcttctttagcttagcttcgttctctctctcacaaaaaccctaaattctccgagaccgatagaccgcgataatggctaatagcaatctaccgcgaagaatcatcaaggaaacacaacgtctacttagtgaacctgctccggggataagcgcgtctccgtcagaggaaaacatgcgttatttcaatgtcatgattcttggtccttcacagtctccttatgaaggaggagttttcaagttggagctctttttgcctgaagaataccctatggcagctcccaaagttaggtttctcaccaaaatataccatcctaacattgacaagcttggaaggatctgccttgacattctgaaagacaaatggagtcctgcgctacaaataagaactgtgctcttgagtatccaagctcttctaagtgcaccaaaccctgatgatccactttctgagaacatagctcagcattggaagagtatga

SEQ ID NO: 7499 - DNA, 197 bp, Zea mays
  Peptide Sequence Number=SeqID_12832
  Probeset Number=SeqID_21902
gggaaagtttgcctgtttggttctctccatccctcgttcttctctgtcccgtgcggcgtcggcagatcgtgggctccggcgacggcggttgaagggcgacggctgcggcagggcgtaggaaacccaattttgtatctcaaatcaagagtaggttcctataaattctggagaaatggaaatgggagacaaggcagtcg

SEQ ID NO: 7500 - DNA, 637 bp, Zea mays
  misc_feature (1)..(1): n is a, c, g, or t
  misc_feature (7)..(7): n is a, c, g, or t
  misc_feature (9)..(24): n is a, c, g, or t
  misc_feature (26)..(28): n is a, c, g, or t
  misc_feature (37)..(46): n is a, c, g, or t
  misc_feature (531)..(532): n is a, c, g, or t
  misc_feature (539)..(539): n is a, c, g, or t
  misc_feature (541)..(541): n is a, c, g, or t
  misc_feature (545)..(545): n is a, c, g, or t
  misc_feature (562)..(562): n is a, c, g, or t
  misc_feature (564)..(564): n is a, c, g, or t
  misc_feature (570)..(570): n is a, c, g, or t
  misc_feature (572)..(588): n is a, c, g, or t
  misc_feature (590)..(595): n is a, c, g, or t
  misc_feature (601)..(603): n is a, c, g, or t
  misc_feature (606)..(620): n is a, c, g, or t
  misc_feature (624)..(631): n is a, c, g, or t
  misc_feature (635)..(637): n is a, c, g, or t
  Probeset Number=SeqID_21903
nccggcngnnnnnnnnnnnnnnnntnnntttggctcnnnnnnnnnntggcgtcctgcacctgtctctctcgtcggctcgcctcacacctgctctcccatccacttccctcatccacctccaccgcctcgccttctccccctctccctcgggagccgctgctgctccgacgatgccaccctcatgcatcgctcggatctctccctcgatccagccggagtagttccctttccctcctccacacgcgaccaccgtcatctcctccttccgcacccgcccctttctaaaaagtcccaaaccctaaacgacggcgactcctcctccccgcggcagcgacctgggccggaggtgccgtccggttcttgtggacgcccccagaatcgtctcgcacccgggggacggcgcaggcggtcggatcagcaacatcaccgtgacctcctacatcaaggttcatcgaggtcgctggcgcgcgcgtcatcccactcggctacgacgagccaaaggatcgcctcctcgaggtgtgcgtgctgcgnnagcgtgngncagnagtattaagctatttangntgctgngnnnnnnnnnnnnnnnnnannnnnngaaggnnntcnnnnnnnnnnnnnnnaaannnnnnnncctnnn

SEQ ID NO: 7501 - DNA, 462 bp, Zea mays
  Peptide Sequence Number=SeqID_12833
  Probeset Number=SeqID_21904
ttctccgttttcatcactagcagcagagtcttgcgtttttatcagccgacgcgaaaatggtgaagggacgccaaggagaacgtgtcagactctacgttaggggaaccatcttgggatacaaaaggtcgaagtctaaccagtacccaaacacatcccttatccagatcgagggagtcaacactacagaggaggtgacatggtacaagggaaagaggatggcttacatctacaaggctaagaccaagaagaacggtagccactaccgctgcatctggggaaaggttacaaggcctcatggtaacagcggtgttgtccgtgccaaattcacatccaacttgcctcctaagtccatgggaatgagggtcagagtcttcatgtatccgagtaacatatgaagcaaagtttgatgatgtagctgtggtttttgtccactagttcgttattttgtattttgatatttaa

SEQ ID NO: 7502 - DNA, 358 bp, Zea mays
  misc_feature (95)..(95): n is a, c, g, or t
  misc_feature (100)..(100): n is a, c, g, or t
  misc_feature (106)..(106): n is a, c, g, or t
  misc_feature (109)..(109): n is a, c, g, or t
  misc_feature (338)..(338): n is a, c, g, or t
  Peptide Sequence Number=SeqID_12834
  Probeset Number=SeqID_21905
aaattttactctgttgtgttggtttttgtgagagctgcgcagtatctatttgattttgcatccagagaaaagcaaagactgcttctatggctgancctgnaactanaanctattagacagaggaggatgcaagagctcatggctcaacatggcactcaggggaagcaaggcagtcagcagaatccagatcaagagagagcacaagaagatgctaaaagggaagctgatgaacgtagacaaatgatgcttagtcaaatattgtcttcccaagcccgagagagaattgcacgaattgcactggtgaaacctgagaaagctagagccgtagaggatgttantttgaggggctgctcaaatg

SEQ ID NO: 7503 - DNA, 466 bp, Zea mays
  misc_feature (62)..(62): n is a, c, g, or t
  misc_feature (464)..(464): n is a, c, g, or t
  Peptide Sequence Number=SeqID_12835
  Probeset Number=SeqID_21906
aatacggatcctttcgtaatttccatacttgttgtgtcgtcgtattcacgagccgtatagtntttgttccttttacctctctctctctctctctatctatcggttgtgtgttgtggaagcttgttagctttctctcttctccgtcattcgattgtcaacgcgtttatctcaactgcgatctcgttgatcagaggattccccgagcttcagatcaaaaatcatggccaccgctggaaacaagaacatcaacgccaaattggtactgcttggggatgttggagctggaaaatcaagtcttgtgcttcggttcgtcaaagatcagtttgttgaattccaggaatcaacgataggtgcagccttcttctctcaaacattggctgtgaatgatgcaactgtcaagtttgagatttgggatacagctggccaggaacgttaccatagcttggctcctatgtactacaggngt

SEQ ID NO: 7504 - DNA, 492 bp, Zea mays
  Peptide Sequence Number=SeqID_12836
  Probeset Number=SeqID_21907
accaacagagcaaatactccatagccaccatactatttcctctctcttacaatcaaaacacccactttgaaatgtccatctcgaaagtccttgggtttctgattctcacctgtctactgatcgcttcagcgatggctcagtctccttctccagctccgttcataggcggaggaaggcgagttatctctccttctccgtctaaaacaccgacaccagaatcctccgtcgcgtctcctccatcactacctcaagcggattctccttccatcgattccgcagcagtgactccgtcttccatatcagactcgccatcagaagctcctgctccatcacagcagagcagcgccgtttccaaccaatacactgttttcgctggatccatcaccgttattctatacgctgccgttttggctttctaatctctaatggagcctcatttatttatgtcatattttcagaaaactattatgtaggaagatgattcttttattt

SEQ ID NO: 7505 - DNA, 506 bp, Zea mays
  misc_feature (503)..(503): n is a, c, g, or t
  Probeset Number=SeqID_21908
aatgcagtggtgttctccgtcacgatggacttcgtctactcacacggtttcgggttcctgttggtggttgccagtatcatctggtccacagagggttactcgagcgccacgggtatagcaaagacgacaaagtactgggactgctgcaagcctacctgtgcctggcgctccaacgctggtgccgtaaccaaccccgtacgcacctgtgctgccggcggcgccactacgctgcatgagaacactcagagcggctgcaacggaggctcgtccttcgtctgcaacaaccagcgtccctttgtcaagtgggggaaggcgtacggctttgccgcagccaacgttaacggtttgccaacaagcagcctgtgctgctcgtgttacgaacttactttcactaacaccgcactcgcaggcaagactctaactgtacaggtcaccaatactggcagcgaccttggaaacaaccatttcgacctgatgatgccagctggtggtgaaggcatctntac

SEQ ID NO: 7506 - DNA, 398 bp, Zea mays
  Peptide Sequence Number=SeqID_12837
  Probeset Number=SeqID_21909
ctttctcagatttagtgtttctctcagtttcggctcggtcccagaaccaagatcgtagggcttcaagatgccgtcgcacaagtcattcatgatcaagaagaagcttgcgaagaaaatgaggcagaacaggccaatccctcactggattcgtcttcgcactgacaacaccatcaggtacaacgcaaagcgtagacactggcgcagaaccaagcttggattctaagctgtcttacttttgcctatttgtgaaagctctgttctttccaaagacattgttttcctttgtttggttctttagcgttttgttttttcagtttcgttttgtggcagttgcactactgttcacagttctgtaagaccatctttaatcaattatgtttccagaaaaaaaaaaaaaa

SEQ ID NO: 7507 - DNA, 457 bp, Zea mays
  Peptide Sequence Number=SeqID_12838
  Probeset Number=SeqID_21910
cccatcaacctcacggagaggctcttccaggtgctccgctggtccacgggctccctcgagatcttcttctccaagaacaacccgctcttcggcagcacctacctccacccgctgcagcgcgtcgcctacatcaacatcaccacctaccccttcaccgccatcttcctcatcttctacaccaccgtgccggcgctctccttcgtcaccggccacttcatcgtgcagcgccccaccaccatgttctacgtctacctgggcatcgtgctctccacgctgctcgtcatcgccgtgctggaggtcaagtgggccggggtcaccgtcttcgagtggttcaggaacggccagttctggatgacggcaagttgctccgcctacctcgccgccgtgtgccaggtgcttaccaaggtgatattccggcgtgacatctccttcaagctcacatccaagctaccgtcgg

SEQ ID NO: 7508 - DNA, 514 bp, Zea mays
  Peptide Sequence Number=SeqID_12839
  Probeset Number=SeqID_21911
ttcttcctcccctgaagccgaataatcaatcatcctaggttttttgtggcaagcagctcgctacaatgacaaagggaacagggagttttggtaagaggaggaacaagagtcacacactatgtgtgagatgtggacgtcgtagcttccacatccagaagagtcgctgctctgcctgcgcttaccccgccgctcgcaagaggacctacaactggagtgtgaaggcaatcaggaggaagacaaccggaaccggaaggatgaggtatctcaaaaatgttccccgccgtttcaagaccggtttcagagaaggtactgaagccaagccaaggaacaagggagcagctgcttcatcagcctaaaagaaacctcacttggtgttaaaggcaggaagggactaaaatttagcacttttctcttgctctatctagttttgagatttcctattcctgaatactatttatgtttttgtttcaaattttcgaacctggttgatatatcatcccttcatcttgcaatt

SEQ ID NO: 7509 - DNA, 483 bp, Zea mays
  Peptide Sequence Number=SeqID_12840
  Probeset Number=SeqID_21912
gatcgttcaatctgcgagaagaagaagaaggtgaaagatggggaaagacgcaaagtctggtgggaagggtaagggaaagcaagcaagtggcagtgatgatgctgctgcctccaagggtaaaggcaaatctggaaaagccgctgatggtcttggaacatgcacttatgttaaagctagacatgttttgtgcgaaaagcaagggaagatcaacgaggcatacaaaaagttgcaggatggttggttgagcaatggagacaaggttcctcctgctgagtttgcaaagattgcagcagagtactcggagtgcccgtccgggaaaaaaggaggagatcttggatggttccctagaggaaagatggctggtccattccaagatgttgccttcaacactcctgttggtgtcaccagtgcccccttcaaatctacgcacggataccatattatcttgtctgaaggaaggaagaactgacagattacatatct

SEQ ID NO: 7510 - DNA, 348 bp, Zea mays
  Peptide Sequence Number=SeqID_12841
  Probeset Number=SeqID_21913
attgtttgtttctggtgcttgatagatctcaagccttgcagcttctattcgccagctagctgaaatggaagatccaatcggccgtgttttagcaaaaactgagattgcagatggtcttattttagagaagacatcatcaccattaggtgttcttctgattgtttttgagtctcggcctgatgcacttgttcagatagcttcacttgctatccggagtggaaatggccttctgctgaagggtggaaaagaagctcgtcgatcaaatgctatcttacataaggtgatcactgatgcaattccaaagactgttggaggtaaactcataggactggtgacttcgagagagga

SEQ ID NO: 7511 - DNA, 401 bp, Zea mays
  misc_feature (56)..(56): n is a, c, g, or t
  Peptide Sequence Number=SeqID_12842
  Probeset Number=SeqID_21914
atccctttatcatgtcaataggagcgatgcaggagatcgaagagactgctccgttnatcgacgattctcaacccagcggcgaaacgagatcgcaatccgcgacgacgaaggtgccggaggtggagatccatctgtatcgaagtgggaaaggtccgatcgacgtgttcaaatcgaatctcggaggttgggagcaggatcagctcgaggttcgagctattctcgagaaatacggattgaaatcgatcttcgctttcaacgtcgagaaaggtcgaggcgtcccgatccgatttcaaaggaatggccggtctgtgctgacgtacagagatggtgccaccgtttacatcgacggcgaacctcaggattctatgatccaacccatcacaagaatcgtgctcggagta

SEQ ID NO: 7512 - DNA, 351 bp, Zea mays
  misc_feature (52)..(52): n is a, c, g, or t
  misc_feature (320)..(320): n is a, c, g, or t
  misc_feature (335)..(335): n is a, c, g, or t
  misc_feature (345)..(345): n is a, c, g, or t
  Peptide Sequence Number=SeqID_12843
  Probeset Number=SeqID_21915
aaaaaatccacagaggcgaaagatgggacgcgtgcgcacgaagacggtgaanaagtcctcacgccaggttatcgagaagtactactcgcgcatgacgctcgatttccacacgaacaagaagatcctcgaggaagtcgcgatcatcccttcgaagcggctccgcaacaagatcgccggattctccacgcatctgatgaagaggatccagaaggggcccgtccgcgggatctccctcaagctccaggaggaggagcgcgagcgccgcatggacttcgtccccgacgagtccgccattaaaaccgatcgcatcgaggtcgatnaggagacgctggacntgcttgcctngttggg

SEQ ID NO: 7513 - DNA, 458 bp, Zea mays
  misc_feature (130)..(130): n is a, c, g, or t
  misc_feature (255)..(255): n is a, c, g, or t
  misc_feature (331)..(331): n is a, c, g, or t
  misc_feature (408)..(408): n is a, c, g, or t
  misc_feature (415)..(415): n is a, c, g, or t
  Peptide Sequence Number=SeqID_12844
  Probeset Number=SeqID_21916
ggaaacaacacagtttctttctacctacgatgtttggtttgcgcagatccgcggcgaccttattcgaccatagccagtctctgcttcgtaatctatcgtttcatggactgcgtgtgcaaggaatccgtgngggaaacgcagaggttccaaaccacaagcccctcaagactggtcttcaagaagtttacggaataggtcgccgtaagtctcaccaggttctctgtgggctcggcatcaccaacaaacttgccaganacttaactggtaaagaactcattgacctccgtgaagaagttggcatgcaccaacatggtgatgaattgaggaggcntgttggatcggagatacagagactggtggaagtagactgttacagaggaagtagacatagacatgggatgccttgcngaggtcnaagaaccaagactaatgctcgcactaagaagggtaagagagtt

SEQ ID NO: 7514 - DNA, 427 bp, Zea mays
  Peptide Sequence Number=SeqID_12845
  Probeset Number=SeqID_21917
acacaccacacaaggtactccactttgtaagctcatttgattcctagaggcactctagtccaggacatccaccatggcacggcgctttctggctgtgctcgccgtcgccctggcgctcttgcaggccgcctcggccaagtcctggctggacaagaggttcaacacggacggcaccgtccgcactggatacgacgcctccggccagcaggtggtgatgctcaacctcaaccagcaatccggcgccgccggcttcaactccaaggagcagtacctctacggtgagttcagcatccagatgaagctcatcccgggaaactccgccggcaccgtctcctgcttctacctttcttccggtgacgacgagtggcgcgacgagatcgacatggagttcatgggcaactcgagcggccacccggtggtgctcaac

SEQ ID NO: 7515 - DNA, 363 bp, Zea mays
  Peptide Sequence Number=SeqID_12846
  Probeset Number=SeqID_21918
aagagagacagcaagcgaagccatgtccgagcagaaccccgccgccacctctcgccaccgttgtccctcctccgtcgaagccagccgccgcccaccgcccgcgaagcccgagccgccgcacccgagcccctagtcgtcgcctccttgattcggtttcgtgcaagcaactgagatctgaaccacaagatcccgagaagtgaccgtctcttccactctagatccagatctaccactgcaataagctagggtacgtagggtccaaaaattgcaggaggatgtggatacgttgaaggcaagatgttacagagcaaagccgcagctgtaaccactactgagtgggaatcattcggaaacagtgttgga

SEQ ID NO: 7516 - DNA, 491 bp, Zea mays
  Probeset Number=SeqID_21919
aacaattatctagagacatgtgagagaatattctcttttttctctctttcccgaaaaaacgttttttgtcgaaaatctattgatctgcatttagtggctggcggcggttctcttaccgtcggtcgccacccttcattgttctcatgtctgttattcaaacatgttttgttccagttttacaactccctctttcctcttcatctttagttttgtgttggattgcggtctgatccagtaaatcaaaccagatgttagatgtgtaactcaaactcttcggagtgacagcaaagtcgtggttagtcgactgcctgcaagaagcaccttttgcagaactggatcctttcagacctagtgcatgttgatgggagtctcagtctcttcagtttctaatattcctagaagagtggtggctaccaccgtttcttgccatttcaacgttctgaaaccggaatctttttgtgctttgctcgcgaaaagagaccgagtcgagc

SEQ ID NO: 7517 - DNA, 208 bp, Zea mays
  misc_feature (189)..(189): n is a, c, g, or t
  misc_feature (196)..(196): n is a, c, g, or t
  misc_feature (202)..(202): n is a, c, g, or t
  Peptide Sequence Number=SeqID_12847
  Probeset Number=SeqID_21920
tctctagaaattagggtttttgcatcgccgctaagctctctcacctccgcctctccctgagccttcgtcttcagaatggattctcagattaagcacgccgtggtggtgaaagtgatgggtcgtactggatccaggggtcaggtgacccaggtacgagtgaagttcacagactctgatcgttacattatnaggaacnttaagngaccag

SEQ ID NO: 7518 - DNA, 586 bp, Zea mays
  misc_feature (251)..(251): n is a, c, g, or t
  misc_feature (425)..(425): n is a, c, g, or t
  misc_feature (470)..(470): n is a, c, g, or t
  misc_feature (503)..(504): n is a, c, g, or t
  misc_feature (550)..(550): n is a, c, g, or t
  misc_feature (566)..(566): n is a, c, g, or t
  Peptide Sequence Number=SeqID_12848
  Probeset Number=SeqID_21921
agtatcgaatgtggtttagaaactggttataaattaagggcgggagttatgaacctgtttgagaagctaattgtctagtgcactagttaaatactacttggtcgtggtacacaattcatgagacagaaagcttcacccaaaaaaataaagccacaagtcttttcttgtttaaatttcagcttcatcatttgaatgcacatggaaatggctagttactctgccaaacttcagcagcatgtcaattactttgncctagctatttgctacaaactattgcaataatggatggcaaaatcatcgaaacggattaaagatgattgtttggactgctgcaactgcaatttatagagacaaaaacactgtagaagcagtagaagccgatacggattaaagcgaaatgaagggacgatttttttaatctcatnattcaaaaagagagcatatcaattaggccgcttgtttttgtcttnccatctgaaaaggcgtgcatgtaattaacttgnngatcttatgtcaaaaggggcttctttttgtcttcccatttatttancctcatgcgcgcttgntctacctctttattccaatc

SEQ ID NO: 7519 - DNA, 530 bp, Zea mays
  misc_feature (18)..(18): n is a, c, g, or t
  misc_feature (103)..(103): n is a, c, g, or t
  misc_feature (105)..(106): n is a, c, g, or t
  misc_feature (132)..(132): n is a, c, g, or t
  misc_feature (146)..(147): n is a, c, g, or t
  misc_feature (160)..(160): n is a, c, g, or t
  misc_feature (169)..(169): n is a, c, g, or t
  misc_feature (187)..(187): n is a, c, g, or t
  misc_feature (202)..(203): n is a, c, g, or t
  misc_feature (275)..(275): n is a, c, g, or t
  misc_feature (289)..(289): n is a, c, g, or t
  misc_feature (310)..(310): n is a, c, g, or t
  misc_feature (456)..(456): n is a, c, g, or t
  misc_feature (477)..(477): n is a, c, g, or t
  Probeset Number=SeqID_21922
ttttttttttttttttgngtcaagtgacagtctaatttctttcttactttattcattgagcaatcaactaactgaagggtgatgaatccaattgaatcaaaangnncaccactatacaatctacatatgatnaaaaagaatcgacnntgacagaaattgngaaagaatnaccatggctagtcaggcnctcgcaggtccctcnntgttgctgccaatgcgctccgcaacgccaatgcacggccatcgatctcgagtcctgctccggcaccagcgtnatctctttggctgngcagtccccccaaatcactgnctgcctcctcaacatccggcgccaatgcagagtaatcctccctggacaacagcacattgtgaagcatcgcacatgtcccaatgcacgccacagctgctcgagagctttcctcctcgtggagcctagcgatggctccccaccccatnaagctccggataacacgccgnacggggcggcacattgccctgtgcgcagcattgaactccgcctccggggagcc

SEQ ID NO: 7520 - DNA, 438 bp, Zea mays
  misc_feature (16)..(16): n is a, c, g, or t
  misc_feature (18)..(18): n is a, c, g, or t
  misc_feature (20)..(20): n is a, c, g, or t
  misc_feature (99)..(99): n is a, c, g, or t
  misc_feature (119)..(119): n is a, c, g, or t
  misc_feature (178)..(178): n is a, c, g, or t
  misc_feature (186)..(186): n is a, c, g, or t
  misc_feature (201)..(201): n is a, c, g, or t
  misc_feature (232)..(232): n is a, c, g, or t
  misc_feature (298)..(298): n is a, c, g, or t
  misc_feature (318)..(318): n is a, c, g, or t
  misc_feature (337)..(337): n is a, c, g, or t
  misc_feature (340)..(340): n is a, c, g, or t
  misc_feature (343)..(343): n is a, c, g, or t
  misc_feature (349)..(349): n is a, c, g, or t
  misc_feature (384)..(384): n is a, c, g, or t
  misc_feature (406)..(406): n is a, c, g, or t
  misc_feature (417)..(417): n is a, c, g, or t
  Peptide Sequence Number=SeqID_12849
  Probeset Number=SeqID_21923
tttttttttttttttngntntaatactaatgatttaatcatcctttaccaacatgttagtccactaattgtttcaattacaaaaaaaaaaccccaaatntagagcttccacatgtggcnacgtgttcctcccatacatcttggcccacaccattgggcccctatccgtcggcctgctntcccgcanatgttcagctgctanccaggtggcagggggacgggcacggcccttntccccctgggcctgagcctgggcccttacaaggcgccgggtcgtcggtttcatcgctcgatgcttnttttccgccgccaccgtcgngcccttggtccccgtgctnttnttntccggnggcaaccggcaaccggcaagatatcaattctccanacctacattatcttttttgggnggaatctatgntttttttgcttgcagggaaat

SEQ ID NO: 7521 - DNA, 626 bp, Zea mays
  misc_feature (280)..(280): n is a, c, g, or t
  misc_feature (601)..(626): n is a, c, g, or t
  Probeset Number=SeqID_21924
aacaaccatttcttcttcctttttctatatcgcgttacgtccctccctacccagcgatctaggccgccgcctctcctactgcatctccctcgctctcgtcgcctcgttcgcttcgcctccgccccgccccgccccgagccgagcagagcgcagccctatccggagctgggatggcggacgcgaagcagcagcagcagcagcagcagcagcagccacagcaggcggcagcggcagccaccggcgtgtggaaagacggtcaagcccttcgttaaccgcgggngcctctgggatgctcgcgacctgcgtcatccagcctatcgacatgggtcagggggaggatccagtttggggggagggctcccgctggtcagggcccaaggaacctgcctgcaaatggggggggtggccggtccttctaaaaaggtttggcccggccggattgcttggggaaggcgagcaacccaatgggccggcttgggaaccctttaggggttcaaactaaacaaagggttgaaaaaaaatggaggggaaacccttggccttttttccaaaagggttttattggggcggaacggggggggaaaatgggggcttttgtgtnnnnnnnnnnnnnnnnnnnnnnnnnn

SEQ ID NO: 7522 - DNA, 626 bp, Zea mays
  misc_feature (1)..(26): n is a, c, g, or t
  misc_feature (347)..(347): n is a, c, g, or t
  Peptide Sequence Number=SeqID_12850
  Probeset Number=SeqID_21925
nnnnnnnnnnnnnnnnnnnnnnnnnnacacaaaagcccccattttccccccccgttccgccccaataaaacccttttggaaaaaaggccaagggtttcccctccattttttttcaaccctttgtttagtttgaacccctaaagggttcccaagccggcccattgggttgctcgccttccccaagcaatccggccgggccaaacctttttagaaggaccggccaccccccccatttgcaggcaggttccttgggccctgaccagcgggagccctccccccaaactggatcctccccctgacccatgtcgataggctggatgacgcaggtcgcgagcatcccagaggcncccgcggttaacgaagggcttgaccgtctttccacacgccggtggctgccgctgccgcctgctgtggctgctgctgctgctgctgctgctgctgcttcgcgtccgccatcccagctccggatagggctgcgctctgctcggctcggggcggggcggggcggaggcgaagcgaacgaggcgacgagagcgagggagatgcagtaggagaggcggcggcctagatcgctgggtagggagggacgtaacgcgatatagaaaaaggaagaagaaatggttgtt

SEQ ID NO: 7523 - DNA, 400 bp, Zea mays
  misc_feature (98)..(98): n is a, c, g, or t
  misc_feature (201)..(201): n is a, c, g, or t
  misc_feature (225)..(225): n is a, c, g, or t
  misc_feature (259)..(259): n is a, c, g, or t
  misc_feature (291)..(291): n is a, c, g, or t
  misc_feature (297)..(297): n is a, c, g, or t
  misc_feature (340)..(340): n is a, c, g, or t
  misc_feature (364)..(364): n is a, c, g, or t
  misc_feature (376)..(376): n is a, c, g, or t
  misc_feature (381)..(381): n is a, c, g, or t
  misc_feature (392)..(392): n is a, c, g, or t
  misc_feature (395)..(395): n is a, c, g, or t
  Peptide Sequence Number=SeqID_12851
  Probeset Number=SeqID_21926
ttttttttttttttttttcttttttttaacgagtatgattatccattcataatgagaaattgatctattgaagagatagaacgctaatccatcactgngtatcaacctccatttcaccaccctcggtagctgcgccatccaacgcctccaatagcgcaccaacgtcctgtccatcatatagcttaaagttctctagcttantacccttggaggaaggtgtcgccnaatccttggggacaagtcccacaactccaaccgnggtattatcaatcctaagctccttatcctgcnaaagantctccctcaaggccttcaggccatggttaatcaactcctcgcncgaacaatccgcaaactcggccanatttctttccanataantcctcgccatntgngaccg

SEQ ID NO: 7524 - DNA, 258 bp, Zea mays
  misc_feature (19)..(20): n is a, c, g, or t
  misc_feature (25)..(26): n is a, c, g, or t
  misc_feature (29)..(29): n is a, c, g, or t
  misc_feature (32)..(32): n is a, c, g, or t
  misc_feature (51)..(52): n is a, c, g, or t
  misc_feature (106)..(106): n is a, c, g, or t
  misc_feature (180)..(180): n is a, c, g, or t
  misc_feature (237)..(237): n is a, c, g, or t
  Peptide Sequence Number=SeqID_12852
  Probeset Number=SeqID_21927
ttttttttttttttttggnnggatnnaanaanatgtaatactgacaattgnncaaataacatatgtaaaattgaagttatgaattgaagcaactatttttgccaanattttaaaaaaatgcaaaaaaaagtatttcaaatttaaagtccttataaccaaaagaagcaaactattattcanactgatttttttttttggaatctgaagcaatccagtgctcaaagaagcaaactgttnttcaaacctgaaactttttct

SEQ ID NO: 7525 - DNA, 644 bp, Zea mays
  misc_feature (1)..(202): n is a, c, g, or t
  misc_feature (205)..(205): n is a, c, g, or t
  misc_feature (210)..(210): n is a, c, g, or t
  Probeset Number=SeqID_21928
nnnnnnnnnnnnnnnnnnnnnnnnnnnnnnnnnnnnnnnnnnnnnnnnnnnnnnnnnnnnnnnnnnnnnnnnnnnnnnnnnnnnnnnnnnnnnnnnnnnnnnnnnnnnnnnnnnnnnnnnnnnnnnnnnnnnnnnnnnnnnnnnnnnnnnnnnnnnnnnnnnnnnnnnnnnnnnnnnnnnnnnnnnnnnnnnnnnnnnnnnngcnccggngcccaccacacgagcgatacgatgaaccacgcgttgagcgtcgcgaagaagcgatcaccacgcacacgaagacgacagtcagcgcgtcgctcacggcgcggatcgagctcggaatgaacagctttggcacgatggtgagcggcgagaacaagagcgcggcgccgagccagcggaggagcttgccgacgccgttgcgtacgcgctcgctcgcgcgaacgcgctcgatcaccatgttgcgggcggggacgtcgcgcgcgagcgagccggcgcgttcttcatggaacgagcggccgtcccatcgaaatacgctcacgcgctggaggccggcctcggacatcgctacgatggtacccgatgtggcgctttctcttggtgctcctcgcgatcgtcgtttcgtcgatcgcgttcttggtcgagggcatggtgcgtgatgg

SEQ ID NO: 7526 - DNA, 633 bp, Zea mays
  misc_feature (520)..(520): n is a, c, g, or t
  misc_feature (538)..(538): n is a, c, g, or t
  misc_feature (541)..(541): n is a, c, g, or t
  misc_feature (562)..(562): n is a, c, g, or t
  misc_feature (567)..(567): n is a, c, g, or t
  misc_feature (570)..(571): n is a, c, g, or t
  misc_feature (601)..(601): n is a, c, g, or t
  misc_feature (622)..(622): n is a, c, g, or t
  misc_feature (624)..(624): n is a, c, g, or t
  misc_feature (632)..(633): n is a, c, g, or t
  Peptide Sequence Number=SeqID_12853
  Probeset Number=SeqID_21929
gatgccgaccgaacgctcgtcgactgggtgggcttatagtgctggctgtcttcgcacgccgcttcaatccgttgtcgctgcctaaggccggataccaagtcggcctggccgcgctattgctattggccggtgccggatcggtgcacgacgcgaccgcgctgaaccagacccgcaccctctccttccaccacacccattccggcgaagaccttactgtcactttcaagcgcgatggccgttacgacgaagccgcgctgaagcagctcaatcacttcctgcgcgactggcgctcccaggacgagacggtgatggaccgtcatttgttcgatatcatctgggaggtctataacgacgtcggcggcaagcagccgatccagatcatctccgctatcgcgcccccgcaccaacgccatgctgcgccgccgatcctcgggcgttgcgcgccacagcagcacatgctcggccacgcgatggattcttattcctggcgtgccgctggacaaatccgtacctggctgcnctgcacgcggggtgtcgnttnttccgactcggctgccgttcntgatntcnnaccgggggattcgcattgccggcatacccngacactggtaaggggttcccnanggccgacnn

SEQ ID NO: 7527 - DNA, 741 bp, Zea mays
  misc_feature (1)..(1): n is a, c, g, or t
  misc_feature (11)..(12): n is a, c, g, or t
  misc_feature (20)..(20): n is a, c, g, or t
  misc_feature (39)..(40): n is a, c, g, or t
  misc_feature (43)..(43): n is a, c, g, or t
  misc_feature (57)..(57): n is a, c, g, or t
  misc_feature (61)..(61): n is a, c, g, or t
  misc_feature (66)..(66): n is a, c, g, or t
  misc_feature (74)..(75): n is a, c, g, or t
  misc_feature (84)..(84): n is a, c, g, or t
  misc_feature (120)..(120): n is a, c, g, or t
  misc_feature (123)..(123): n is a, c, g, or t
  misc_feature (126)..(126): n is a, c, g, or t
  misc_feature (164)..(164): n is a, c, g, or t
  misc_feature (225)..(225): n is a, c, g, or t
  Peptide Sequence Number=SeqID_12854
  Probeset Number=SeqID_21930
nttaggcaatnncatggttnccgacggccggtttgaatnnganggaaacaagggttntatngtttnatccaagnnatatgcctntttcgcgccggttatggtgcccgcgcaatacaacgnganttngacgaacttataccccacgaatgcgcgagcttggggtnaagtgagcgcaggtgtcagacatgatgaaacttcgcgatcatgcagccgtattttcttccntatatcgggttactaccagctcatcggtgcggtcgatctcttcatcgtctacgataacatcaaatacgtcaaaaagggtggatcaaccgcaatcggatgctggtcaacggcaaggacgccttgttttcactcccgttgaagaaggattcggatgcgctggacattcgcgacagggagctggcgcccgatttcgaccgtgcaaagctgctcaaccaatggcgaggggcctatcgcaccgcgcctttcttcaaggaaacctttccgctcctggaagagatcgtcggctttcaggaccccaatctatttcgttatctcttcaattcgctgcagatgacctgcgcgcatctcggcttgaagaccacgttcaagatctcgtccgaggtgccgatcgaccattcactcaagtttcaggacaaggtgctcgcactgtgcgaagcggaaggcacgcagacctatatcaacgcgatcggcggcctggagctctacgatgccaaggcgttcagcgcgcgcggaatc

SEQ ID NO: 7528 - DNA, 539 bp, Zea mays
  misc_feature (435)..(435): n is a, c, g, or t
  misc_feature (439)..(439): n is a, c, g, or t
  misc_feature (460)..(460): n is a, c, g, or t
  misc_feature (472)..(472): n is a, c, g, or t
  misc_feature (522)..(522): n is a, c, g, or t
  misc_feature (533)..(533): n is a, c, g, or t
  misc_feature (539)..(539): n is a, c, g, or t
  Peptide Sequence Number=SeqID_12855
  Probeset Number=SeqID_21931
tttatatattgtaccccatctcctatgcaatacatcaagcactatagtttcctacagtaatggaaagtccaaattgtccttgtgaatattttgttatggataatagttaaccaaccagtgttgtattgtgatatcagagtacaaatgcttaagaacatcttgatggtatgggttcattgccaagttgaaaaactattgtacaatacaagctgacttcacatgcttgaatgactcttttagaaaaaaatcacagaaaaatactaacagtgcctgagaggaatgatgatacccttccattaaaattatcccccatgatgccttgatccgtaacatccaaacttgagcctttgctaggaccgaaatggagtattggcctatccttaaaaaggaccctagccattaaaaaaccgaaaaagtgcaaaccccaaaaaatgnctangtttaacttccttaaggaacntacccacccctntttattcccatgggaaccccccccaaaggtaattttctcccttttcctanatttcccccanacgggn

SEQ ID NO: 7529 - DNA, 527 bp, Zea mays
  misc_feature (29)..(29): n is a, c, g, or t
  misc_feature (35)..(35): n is a, c, g, or t
  misc_feature (37)..(37): n is a, c, g, or t
  misc_feature (39)..(39): n is a, c, g, or t
  misc_feature (54)..(54): n is a, c, g, or t
  misc_feature (61)..(61): n is a, c, g, or t
  misc_feature (66)..(66): n is a, c, g, or t
  misc_feature (85)..(86): n is a, c, g, or t
  misc_feature (104)..(104): n is a, c, g, or t
  misc_feature (108)..(108): n is a, c, g, or t
  misc_feature (111)..(111): n is a, c, g, or t
  misc_feature (118)..(118): n is a, c, g, or t
  misc_feature (143)..(143): n is a, c, g, or t
  misc_feature (145)..(145): n is a, c, g, or t
  misc_feature (172)..(172): n is a, c, g, or t
  misc_feature (178)..(179): n is a, c, g, or t
  misc_feature (184)..(184): n is a, c, g, or t
  misc_feature (203)..(203): n is a, c, g, or t
  misc_feature (216)..(216): n is a, c, g, or t
  misc_feature (299)..(299): n is a, c, g, or t
  Probeset Number=SeqID_21932
ttaaggttttttataataccatacccttnaccccntntntagaatcccatgggnggatcgntgtanccatgtatgttaaccgttnnttattaggtattgggtgncttngtnccctagngaaaaaaaaaaccaggaggtttttngncgacttttttcccacctatactggcanccccanntgttncccgtctaggaaaagattncacttttaaatanctggcttctcatgattccatcgacataagaaaaatccagagtggacccaactagtccagctgcatagataattggcattagtncaagtgaaaaaatatcgattattgttaaaaacgtagatggaaaaaaggccacaaagtttatataggaaaaaaaaacctcccctaacatagaggaaaaaactcatagaaaaacagatatattatgtgatgtgatgtccaatatgtaagggaagtctatttatatagacgaacaagatggagttagagtcatattccaacaatcatatataccgggggggggggggggac

SEQ ID NO: 7530 - DNA, 585 bp, Zea mays
  misc_feature (252)..(252): n is a, c, g, or t
  misc_feature (254)..(254): n is a, c, g, or t
  misc_feature (260)..(260): n is a, c, g, or t
  misc_feature (262)..(262): n is a, c, g, or t
  misc_feature (265)..(265): n is a, c, g, or t
  misc_feature (270)..(271): n is a, c, g, or t
  misc_feature (273)..(276): n is a, c, g, or t
  misc_feature (283)..(283): n is a, c, g, or t
  misc_feature (285)..(285): n is a, c, g, or t
  misc_feature (287)..(288): n is a, c, g, or t
  misc_feature (292)..(292): n is a, c, g, or t
  misc_feature (303)..(303): n is a, c, g, or t
  misc_feature (307)..(307): n is a, c, g, or t
  misc_feature (309)..(309): n is a, c, g, or t
  misc_feature (315)..(315): n is a, c, g, or t
  misc_feature (319)..(319): n is a, c, g, or t
  misc_feature (322)..(323): n is a, c, g, or t
  misc_feature (325)..(328): n is a, c, g, or t
  misc_feature (338)..(338): n is a, c, g, or t
  misc_feature (341)..(341): n is a, c, g, or t
  misc_feature (343)..(344): n is a, c, g, or t
  misc_feature (348)..(348): n is a, c, g, or t
  misc_feature (352)..(353): n is a, c, g, or t
  misc_feature (358)..(358): n is a, c, g, or t
  misc_feature (360)..(360): n is a, c, g, or t
  misc_feature (365)..(365): n is a, c, g, or t
  misc_feature (377)..(379): n is a, c, g, or t
  misc_feature (382)..(383): n is a, c, g, or t
  misc_feature (388)..(388): n is a, c, g, or t
  misc_feature (390)..(391): n is a, c, g, or t
  misc_feature (394)..(395): n is a, c, g, or t
  misc_feature (399)..(399): n is a, c, g, or t
  misc_feature (401)..(405): n is a, c, g, or t
  misc_feature (408)..(408): n is a, c, g, or t
  misc_feature (411)..(411): n is a, c, g, or t
  misc_feature (414)..(416): n is a, c, g, or t
  misc_feature (418)..(418): n is a, c, g, or t
  misc_feature (426)..(426): n is a, c, g, or t
  misc_feature (434)..(435): n is a, c, g, or t
  misc_feature (439)..(439): n is a, c, g, or t
  misc_feature (441)..(441): n is a, c, g, or t
  misc_feature (443)..(443): n is a, c, g, or t
  misc_feature (445)..(446): n is a, c, g, or t
  misc_feature (449)..(449): n is a, c, g, or t
  misc_feature (459)..(459): n is a, c, g, or t
  misc_feature (463)..(463): n is a, c, g, or t
  misc_feature (473)..(473): n is a, c, g, or t
  misc_feature (476)..(476): n is a, c, g, or t
  misc_feature (478)..(478): n is a, c, g, or t
  misc_feature (483)..(483): n is a, c, g, or t
  misc_feature (492)..(492): n is a, c, g, or t
  misc_feature (495)..(495): n is a, c, g, or t
  misc_feature (504)..(504): n is a, c, g, or t
  misc_feature (507)..(507): n is a, c, g, or t
  misc_feature (509)..(509): n is a, c, g, or t
  misc_feature (511)..(513): n is a, c, g, or t
  misc_feature (515)..(515): n is a, c, g, or t
  misc_feature (523)..(523): n is a, c, g, or t
  misc_feature (526)..(529): n is a, c, g, or t
  misc_feature (531)..(532): n is a, c, g, or t
  misc_feature (534)..(535): n is a, c, g, or t
  misc_feature (538)..(538): n is a, c, g, or t
  misc_feature (540)..(541): n is a, c, g, or t
  misc_feature (544)..(544): n is a, c, g, or t
  misc_feature (546)..(546): n is a, c, g, or t
  misc_feature (548)..(548): n is a, c, g, or t
  misc_feature (558)..(558): n is a, c, g, or t
  misc_feature (560)..(560): n is a, c, g, or t
  misc_feature (564)..(564): n is a, c, g, or t
  misc_feature (567)..(567): n is a, c, g, or t
  misc_feature (569)..(569): n is a, c, g, or t
  misc_feature (572)..(572): n is a, c, g, or t
  misc_feature (575)..(575): n is a, c, g, or t
  misc_feature (577)..(577): n is a, c, g, or t
  misc_feature (579)..(579): n is a, c, g, or t
  misc_feature (581)..(581): n is a, c, g, or t
  Peptide Sequence Number=SeqID_12856
  Probeset Number=SeqID_21933
gagagagagagagagagagagttcagtttctcctcccttcactcctccattacttcctcccgccattgatatcctccttgaagacgccgaccgttctcctccccttggccaacttttcctctccctcctgctctctataaaaggtagcagagcccctctcccttctcctgcctacccaaactcgccccatctctctagctcaccagtgcactgctcgacgtcgtcgctcgttgccgttcatcgccggagttnancggagncncanacctnncnnnnccccctncncnncccncctgccggccnattnanatgcgnggtntgnngnnnnggttcgaccnccngnnctgngtcnncggcncnccccngcgccccccccnnnccnncccgncnncgnnctcncnnnnngancgnctnnnangtcacgcnccccgcgnncggncngntnncgngcccgccggncccncgccccgccngcncnctctnttcccccgngcncgccccgtngangntnnncncgccgccnggnnnntnnannctncnncangngntaccccggcncncgcnccncnacnccncncncncctc

SEQ ID NO: 7531 - DNA, 692 bp, Zea mays
  misc_feature (27)..(29): n is a, c, g, or t
  misc_feature (85)..(87): n is a, c, g, or t
  misc_feature (692)..(692): n is a, c, g, or t
  Probeset Number=SeqID_21934
ttgcgcgctctcccgccggacgcgccnnngcccttccccgtccccgcgccgttccacccccaagcccccggccccggtgggaccnnnccggccacgcccccgaacccgacccgtccgcaaccgttaacccccgccgcgccgccttcctcctcttcgacgcggccgccgcacccatgggagatctccgcgcgagcatggctagagtccttccccgacggacggccgcccaccgagcccgaggtcgacgcctacatcgacgtgcaccgccccgagctcccttccctcccccgctcccagctacaccagcgcctcctcgccctccgcggcgaccaggttctggatgcagaccagagcgcattcccgtacaggttccagcgtactgatctatggaagcctgtgtaccagtggttggaatctcttgagctggactcactagttgctacacagcagatatcagactggcttacatcgaacccaaagataatggacagaatggttgagaaacattcaaaataccatttgattcactacacccagaggatgcacttgaagatgctaaaaaagaagggaaagttgccaaagactctgcaactttctgcggctagagccacagttcgaccaattgctgctccgttcactccagaagaaaacattgtgccgttacagaaaactataactccagtgacaggtan

SEQ ID NO: 7532 - DNA, 490 bp, Zea mays
  misc_feature (5)..(5): n is a, c, g, or t
  misc_feature (7)..(7): n is a, c, g, or t
  misc_feature (55)..(55): n is a, c, g, or t
  misc_feature (61)..(62): n is a, c, g, or t
  misc_feature (66)..(66): n is a, c, g, or t
  misc_feature (70)..(71): n is a, c, g, or t
  misc_feature (73)..(73): n is a, c, g, or t
  misc_feature (75)..(75): n is a, c, g, or t
  misc_feature (77)..(77): n is a, c, g, or t
  misc_feature (79)..(79): n is a, c, g, or t
  misc_feature (81)..(81): n is a, c, g, or t
  misc_feature (88)..(89): n is a, c, g, or t
  misc_feature (115)..(115): n is a, c, g, or t
  misc_feature (117)..(117): n is a, c, g, or t
  misc_feature (122)..(122): n is a, c, g, or t
  misc_feature (136)..(136): n is a, c, g, or t
  misc_feature (141)..(141): n is a, c, g, or t
  misc_feature (155)..(155): n is a, c, g, or t
  misc_feature (157)..(157): n is a, c, g, or t
  misc_feature (167)..(167): n is a, c, g, or t
  misc_feature (171)..(171): n is a, c, g, or t
  misc_feature (174)..(174): n is a, c, g, or t
  misc_feature (177)..(178): n is a, c, g, or t
  misc_feature (181)..(181): n is a, c, g, or t
  misc_feature (189)..(189): n is a, c, g, or t
  misc_feature (195)..(195): n is a, c, g, or t
  misc_feature (197)..(197): n is a, c, g, or t
  misc_feature (200)..(201): n is a, c, g, or t
  misc_feature (203)..(203): n is a, c, g, or t
  misc_feature (220)..(220): n is a, c, g, or t
  misc_feature (227)..(227): n is a, c, g, or t
  misc_feature (230)..(230): n is a, c, g, or t
  misc_feature (233)..(233): n is a, c, g, or t
  misc_feature (235)..(236): n is a, c, g, or t
  misc_feature (241)..(241): n is a, c, g, or t
  misc_feature (251)..(251): n is a, c, g, or t
  misc_feature (266)..(266): n is a, c, g, or t
  misc_feature (270)..(270): n is a, c, g, or t
  misc_feature (299)..(299): n is a, c, g, or t
  misc_feature (304)..(304): n is a, c, g, or t
  misc_feature (323)..(323): n is a, c, g, or t
  misc_feature (326)..(326): n is a, c, g, or t
  misc_feature (341)..(341): n is a, c, g, or t
  misc_feature (361)..(361): n is a, c, g, or t
  misc_feature (411)..(411): n is a, c, g, or t
  misc_feature (417)..(418): n is a, c, g, or t
  misc_feature (427)..(427): n is a, c, g, or t
  misc_feature (433)..(433): n is a, c, g, or t
  misc_feature (450)..(450): n is a, c, g, or t
  misc_feature (465)..(465): n is a, c, g, or t
  misc_feature (469)..(469): n is a, c, g, or t
  misc_feature (473)..(473): n is a, c, g, or t
  misc_feature (479)..(479): n is a, c, g, or t
  Peptide Sequence Number=SeqID_12857
  Probeset Number=SeqID_21935
attgntnccctttgctcaagctcagagcctctttgcgacgaaagctcaaccaacncgacgnngatnatcnnananancntncgcgcanngatccgcggcataccttatcgaagangnagtangctagtgctaatanggatntcaatctcccagcncntccgtctgantgangtnccnngcntgcaagcnattatncncanncnacagagttccagggccnaggattnctntgngnntcacntttgcggagnatgcattattattgnctgntgactcgtgaaggaattgagtatcttganaactnatccttaaccttccttgangangttggtccctgactnctttgaaccataccctgctnggcccggtgggacgtccctttgtcggctccacactggggatagccacagnggaccnntatgactcngatggncaccgtccccagattcncagaccgggatgaanaccncggnggcccnctatgcggggt

SEQ ID NO: 7533 - DNA, 598 bp, Zea mays
  misc_feature (5)..(5): n is a, c, g, or t
  misc_feature (7)..(7): n is a, c, g, or t
  misc_feature (13)..(13): n is a, c, g, or t
  misc_feature (33)..(33): n is a, c, g, or t
  misc_feature (35)..(35): n is a, c, g, or t
  misc_feature (41)..(41): n is a, c, g, or t
  misc_feature (57)..(57): n is a, c, g, or t
  misc_feature (64)..(64): n is a, c, g, or t
  misc_feature (71)..(73): n is a, c, g, or t
  misc_feature (75)..(75): n is a, c, g, or t
  misc_feature (83)..(83): n is a, c, g, or t
  misc_feature (128)..(128): n is a, c, g, or t
  misc_feature (137)..(137): n is a, c, g, or t
  misc_feature (146)..(146): n is a, c, g, or t
  misc_feature (157)..(157): n is a, c, g, or t
  misc_feature (165)..(165): n is a, c, g, or t
  misc_feature (175)..(175): n is a, c, g, or t
  misc_feature (182)..(182): n is a, c, g, or t
  misc_feature (188)..(188): n is a, c, g, or t
  misc_feature (193)..(193): n is a, c, g, or t
  misc_feature (209)..(209): n is a, c, g, or t
  misc_feature (224)..(224): n is a, c, g, or t
  misc_feature (260)..(260): n is a, c, g, or t
  misc_feature (278)..(278): n is a, c, g, or t
  misc_feature (337)..(337): n is a, c, g, or t
  misc_feature (341)..(341): n is a, c, g, or t
  misc_feature (346)..(346): n is a, c, g, or t
  misc_feature (350)..(350): n is a, c, g, or t
  misc_feature (355)..(355): n is a, c, g, or t
  misc_feature (395)..(395): n is a, c, g, or t
  misc_feature (418)..(418): n is a, c, g, or t
  misc_feature (443)..(443): n is a, c, g, or t
  misc_feature (478)..(478): n is a, c, g, or t
  misc_feature (487)..(487): n is a, c, g, or t
  misc_feature (502)..(502): n is a, c, g, or t
  misc_feature (507)..(507): n is a, c, g, or t
  misc_feature (547)..(547): n is a, c, g, or t
  misc_feature (553)..(553): n is a, c, g, or t
  misc_feature (574)..(574): n is a, c, g, or t
  misc_feature (598)..(598): n is a, c, g, or t
  Probeset Number=SeqID_21936
gaaananagctcnctaattcccccccccccccnanaaatgnggggggatctgggccnttttccnaggttgnnnancgcgaatntacctgggggggaaatggttggaaaaattgtgggagaaaaaaagntggatattnccagtggangggaaaaaaanccctgganggctccttanaactccntgggcnaagangccattttggaagggnccctgggggggaaancaacccctcctttattactggggcatatgctgaaantgaaaccgatctgggggntggaatttcccaaagcgggtcacctgaatgcttgcatcgatggttatttttctcccggntcanacaancaanaatcntttgcccacatatctttcaaccagggtatggaatggccangttgattcttccccccaaaggcnttggatggaaggcaaatggccatcnaaatgggagcttccctcttgaagcatctccagacnttggaaacnaatgcttgggggggnctggngggaaactatttaaaatggagaatggatggaagagcttgnccaatnccaaattgaaaaaaaaaatgnctggccaatggtggaaaaaaattn

SEQ ID NO: 7534 - DNA, 1051 bp, Zea mays
  misc_feature (1051)..(1051): n is a, c, g, or t
  Peptide Sequence Number=SeqID_12858
  Probeset Number=SeqID_21937
attcccgggcttgcctgccatcagttcaatttgtttttctgctattttattgcatttggtcaaagttgatttcttttacatgcataacctcatgaatgcatgtaccttctctatgtaaatatatgatctaggtatctgataaagtttgaacacctttattttggtttactagttaatagcactatttttactctgggaatgccatggcatggattattgccattcacaaagtggtcatttatgtacatagcttaggtaattttttcatgaactatcttggttttcagaaggcctttgaagcaacaatattagaacaagtcttcatatttaaactgcatgttataggttttcacatttctatagggaaaactggattattatctcctagaggatataaaacaatggcattttctgatgtattagcttcatgagaggacgaattggaaataggacatccgttgggaagataagaaacatcttatttagttcaggtggctctattggcttctgtagctttttgcctatgtagtagagtaatttcaatgctcatatagatacaacttgatgttgcttttgtattcaatccaattatcaaaaattcccctttctataagtattttcctgctaaaaaggcaccatcctttatttgcagaactgttttagatgtcagtagatacacaggtgcatctacaaatgtaaagagtcagaatagttgtgtatgatactagtttacgtctaattatttcatattctatgttcatgggcatttcattttataatcatggtttttgtgttgaagtgatctcttgatgagaacctcttattctctctattttcatgagatgcttctatgttgcctgcaatatttatagttcatagttcatacatgtctattgctatacatttggatgattgggtttgccttttttttccaaatgaaactatcctctagtgaattattaattaggagtgttcttcaaatgtaaccacctactgggtatgtaatggcatctcttttcctaccctggtttctttttctcaagtagtcttn

SEQ ID NO: 7535 - DNA, 507 bp, Zea mays
  misc_feature (12)..(12): n is a, c, g, or t
  misc_feature (26)..(26): n is a, c, g, or t
  misc_feature (49)..(49): n is a, c, g, or t
  misc_feature (84)..(84): n is a, c, g, or t
  misc_feature (88)..(89): n is a, c, g, or t
  misc_feature (92)..(92): n is a, c, g, or t
  misc_feature (94)..(95): n is a, c, g, or t
  misc_feature (110)..(110): n is a, c, g, or t
  misc_feature (114)..(114): n is a, c, g, or t
  misc_feature (117)..(117): n is a, c, g, or t
  misc_feature (120)..(120): n is a, c, g, or t
  misc_feature (127)..(127): n is a, c, g, or t
  misc_feature (129)..(129): n is a, c, g, or t
  misc_feature (134)..(134): n is a, c, g, or t
  misc_feature (136)..(136): n is a, c, g, or t
  misc_feature (138)..(138): n is a, c, g, or t
  misc_feature (166)..(166): n is a, c, g, or t
  misc_feature (168)..(168): n is a, c, g, or t
  misc_feature (172)..(172): n is a, c, g, or t
  misc_feature (182)..(183): n is a, c, g, or t
  misc_feature (198)..(198): n is a, c, g, or t
  misc_feature (227)..(228): n is a, c, g, or t
  misc_feature (230)..(230): n is a, c, g, or t
  misc_feature (251)..(251): n is a, c, g, or t
  misc_feature (257)..(257): n is a, c, g, or t
  misc_feature (269)..(269): n is a, c, g, or t
  misc_feature (293)..(293): n is a, c, g, or t
  misc_feature (334)..(334): n is a, c, g, or t
  misc_feature (350)..(350): n is a, c, g, or t
  misc_feature (352)..(352): n is a, c, g, or t
  misc_feature (368)..(368): n is a, c, g, or t
  misc_feature (373)..(373): n is a, c, g, or t
  misc_feature (381)..(381): n is a, c, g, or t
  misc_feature (385)..(385): n is a, c, g, or t
  misc_feature (391)..(391): n is a, c, g, or t
  misc_feature (398)..(398): n is a, c, g, or t
  misc_feature (400)..(400): n is a, c, g, or t
  misc_feature (402)..(402): n is a, c, g, or t
  misc_feature (428)..(429): n is a, c, g, or t
  misc_feature (431)..(431): n is a, c, g, or t
  misc_feature (439)..(439): n is a, c, g, or t
  misc_feature (445)..(446): n is a, c, g, or t
  misc_feature (451)..(451): n is a, c, g, or t
  misc_feature (458)..(458): n is a, c, g, or t
  misc_feature (472)..(472): n is a, c, g, or t
  misc_feature (474)..(474): n is a, c, g, or t
  misc_feature (477)..(477): n is a, c, g, or t
  misc_feature (493)..(493): n is a, c, g, or t
  misc_feature (495)..(495): n is a, c, g, or t
  misc_feature (500)..(500): n is a, c, g, or t
  misc_feature (507)..(507): n is a, c, g, or t
  Probeset Number=SeqID_21938
agctcgctagancccccccccccctnctccctaaggccccccccccccnaggtctcacttaaatggtgactcttccgggctccncttnntcngnnatcaggatttctccntgantcnctnccccttncntcaanancntcctcctcccccattggcgtcctgccantnaaancgtttgtganntcgtgaaatgcaccnatcctaatctcgccagagaacaatgggtnncntctccatggttcgcctttgantgattncactgaattcanactctactgacctacgtgaaaggnctacttgaccccaagaattaggctgggaccggcttatcctnttgctattttatttangntaaaaagaaaatgcantgaangcttttgnttgnatgggncacgaancntngattggaggtgcgatggttatgggannanacaggaantggaanncctanaactggnataagccctaattncnggngatatctgagaccaangnataangctgggn

SEQ ID NO: 7536 - DNA, 491 bp, Zea mays
  misc_feature (417)..(417): n is a, c, g, or t
  misc_feature (441)..(441): n is a, c, g, or t
  misc_feature (447)..(447): n is a, c, g, or t
  misc_feature (450)..(450): n is a, c, g, or t
  misc_feature (464)..(464): n is a, c, g, or t
  misc_feature (473)..(473): n is a, c, g, or t
  misc_feature (476)..(476): n is a, c, g, or t
  misc_feature (488)..(489): n is a, c, g, or t
  Peptide Sequence Number=SeqID_12859
  Probeset Number=SeqID_21939
attactcaagaattacttctaagaacaacagtcgcactggatacaaacacaaactgtcgatcaactataaagaagcgatgcaaaggcaaagggtgtgcacaagatcaagcccgagttcacttctttatataagggggggatttcttacacaaaattaaaggccgactcattatgagccgggcttcttcccacttttcgatacattacattactacattacactactacactacttacactacactatactactaactactactacattattctactaatactaacactacttatctatactaatattttaagccagtggcactttgccactagccttgttgctgccgctaccgctgccgcccttgccgtcgcccttgtcgtcgccttcgtcatcgccggcgtcatcgccatcaccgncgctcccctcctcggacgagtcanaggagnccncctcgtccgagganacctccgantcntccgagccctcnnag

SEQ ID NO: 7537 - DNA, 467 bp, Zea mays
  misc_feature (251)..(251): n is a, c, g, or t
  misc_feature (259)..(259): n is a, c, g, or t
  misc_feature (276)..(276): n is a, c, g, or t
  misc_feature (298)..(298): n is a, c, g, or t
  misc_feature (307)..(307): n is a, c, g, or t
  misc_feature (312)..(312): n is a, c, g, or t
  misc_feature (342)..(342): n is a, c, g, or t
  misc_feature (353)..(353): n is a, c, g, or t
  misc_feature (356)..(356): n is a, c, g, or t
  misc_feature (362)..(362): n is a, c, g, or t
  misc_feature (376)..(376): n is a, c, g, or t
  misc_feature (392)..(392): n is a, c, g, or t
  misc_feature (394)..(394): n is a, c, g, or t
  misc_feature (403)..(403): n is a, c, g, or t
  misc_feature (407)..(408): n is a, c, g, or t
  misc_feature (418)..(418): n is a, c, g, or t
  misc_feature (420)..(421): n is a, c, g, or t
  misc_feature (439)..(439): n is a, c, g, or t
  misc_feature (449)..(449): n is a, c, g, or t
  misc_feature (466)..(467): n is a, c, g, or t
  Probeset Number=SeqID_21940
tcactagtccccccccccccccccccaccacagcatccgcagttccccgaccacaccgttcctccgagcccaggagcagccccgcgccaggaggaagtttgttcttttaacaatattgtcgagggaaggagaatgttttacatgggccaagttggctgagcaggctggaaaggtatgaggaaaatggttgagtatattggaaaaaggggctaaaaactgtaaatgggggaaaagctcactggttgaggagnggaacccntctggtctggtgggcanaaaaaaaatgggaattgggggntccccccgnccttnttgggggcctttttttttttccctttgaanaaaagaggggnggncccccnaaaaaacaaaaaanatgtgggaaccttttnanaagggaaanttcnngggaaaaaantnngggggttgaaattggaanaaaaattttnggggggggggaaatttnn

SEQ ID NO: 7538 - DNA, 516 bp, Zea mays
  Peptide Sequence Number=SeqID_12860
  Probeset Number=SeqID_21941
gttgctgtcgccctccaccatctccctcgttttacctctccccatgctctccacacaagctccaaacagcagcaatagctactgtggcctgccatccctccctctcgatgtcatgtatgttaagttgcatgcatcaaccaaatcaacctaaaagattaagctgttaggagaaggtaggcaatccacttccacttatacaattcaacacccccgctcacgtacagccagagagaaaggcgcaaacgtggaaataaggggacaatggcacaaataaagcctctgccaggattcaaacttgagacctctggctttgataccatgttaagttgcatgcaccaaccaattcaacccaaaagcttaaaatgttacgagaaagtaggcaatcaagttatacacatcaacaatatccattaataatagtggccgaattctccacttccaaaatagagacatgtggcttatatatcggtaattgtcctgtacttaagttgtaaaagagcaaacccgacagcaacg

SEQ ID NO: 7539 - DNA, 452 bp, Zea mays
  Probeset Number=SeqID_21942
atcatgggtgggctgttgtttcttcaagtacagcgcatacttaagaatattacatgttttcttcaagcaagagaacaaaaagggggtgatcatggcatgaaagcaaaaggtgatggatggttgttaacagttgctttaatcgacggaatcaaattggctccagtcgatgctactggtttatctgatccttatgtggtatttacttgcaatggcaaaacaagaacaagttcaattaagttccaaacactagagcctcagtggaacgaaatctttgaatttgacgcaatggatgatccaccgtcggtgatgagtgtacatgtatatgattttgatggaccattcgatgaagttacatcccttggacatgcggaaattaactttgtaaaatcaaacttgtcagagttagctgatgtatggattcctcttaaaggtaacctcgctcagtcttggca

SEQ ID NO: 7540 - DNA, 585 bp, Zea mays
  misc_feature (28)..(28): n is a, c, g, or t
  misc_feature (39)..(39): n is a, c, g, or t
  misc_feature (59)..(59): n is a, c, g, or t
  misc_feature (61)..(61): n is a, c, g, or t
  misc_feature (64)..(65): n is a, c, g, or t
  misc_feature (68)..(68): n is a, c, g, or t
  misc_feature (70)..(70): n is a, c, g, or t
  misc_feature (175)..(175): n is a, c, g, or t
  misc_feature (185)..(185): n is a, c, g, or t
  misc_feature (195)..(195): n is a, c, g, or t
  misc_feature (211)..(211): n is a, c, g, or t
  misc_feature (275)..(275): n is a, c, g, or t
  misc_feature (290)..(290): n is a, c, g, or t
  misc_feature (293)..(293): n is a, c, g, or t
  misc_feature (295)..(295): n is a, c, g, or t
  misc_feature (304)..(304): n is a, c, g, or t
  misc_feature (329)..(329): n is a, c, g, or t
  misc_feature (340)..(340): n is a, c, g, or t
  misc_feature (343)..(345): n is a, c, g, or t
  misc_feature (370)..(371): n is a, c, g, or t
  misc_feature (381)..(381): n is a, c, g, or t
  misc_feature (383)..(383): n is a, c, g, or t
  misc_feature (385)..(385): n is a, c, g, or t
  misc_feature (388)..(388): n is a, c, g, or t
  misc_feature (390)..(390): n is a, c, g, or t
  misc_feature (392)..(393): n is a, c, g, or t
  misc_feature (395)..(395): n is a, c, g, or t
  misc_feature (407)..(408): n is a, c, g, or t
  misc_feature (415)..(415): n is a, c, g, or t
  misc_feature (426)..(426): n is a, c, g, or t
  misc_feature (431)..(431): n is a, c, g, or t
  misc_feature (433)..(436): n is a, c, g, or t
  misc_feature (445)..(449): n is a, c, g, or t
  misc_feature (460)..(460): n is a, c, g, or t
  misc_feature (470)..(470): n is a, c, g, or t
  misc_feature (476)..(476): n is a, c, g, or t
  misc_feature (478)..(478): n is a, c, g, or t
  misc_feature (482)..(482): n is a, c, g, or t
  misc_feature (484)..(484): n is a, c, g, or t
  misc_feature (486)..(486): n is a, c, g, or t
  misc_feature (491)..(491): n is a, c, g, or t
  misc_feature (493)..(495): n is a, c, g, or t
  misc_feature (504)..(505): n is a, c, g, or t
  misc_feature (507)..(509): n is a, c, g, or t
  misc_feature (511)..(511): n is a, c, g, or t
  misc_feature (513)..(514): n is a, c, g, or t
  misc_feature (518)..(518): n is a, c, g, or t
  misc_feature (520)..(522): n is a, c, g, or t
  misc_feature (527)..(527): n is a, c, g, or t
  misc_feature (533)..(537): n is a, c, g, or t
  misc_feature (540)..(540): n is a, c, g, or t
  misc_feature (552)..(552): n is a, c, g, or t
  misc_feature (559)..(559): n is a, c, g, or t
  misc_feature (562)..(562): n is a, c, g, or t
  misc_feature (567)..(570): n is a, c, g, or t
  misc_feature (574)..(574): n is a, c, g, or t
  misc_feature (578)..(578): n is a, c, g, or t
  misc_feature (581)..(581): n is a, c, g, or t
  misc_feature (585)..(585): n is a, c, g, or t
  Peptide Sequence Number=SeqID_12861
  Probeset Number=SeqID_21943
aagctggagctccaccgtcggtggaggncgttcctcaanaggggatcccccgggctgcntntcnntcngnaccagagagctcactagtccccccccccccagtgagaaggatgagatgcatgcatgatgagactggaacgggagaactcacgggtgcaggaagtgctcgaaaagnccaggcgcgnaggatggaanacggagcgctcggggnaggccgcgcttggggccgccaggggccgcccctggattatgcccaaattgttggcaaagggggnctttttcccgggaanttngngggcccatngaaccggaagggggggaacccccanggggggggggnccnnncttggggaagggggggggatcttcnncttcccctcntnanaantncnntnttgttttctccnnccaatanacccttaccanctggntnnnnttaaataannnnncaccactcacnctacacacancttccncncgcnangntggtngnnnttcattttnntnnntntnnaacnannnccacnctcccnnnnntcnccccacatttcnctacttnctnctgtnnnngaanaatnccntttn

SEQ ID NO: 7541 - DNA, 559 bp, Zea mays
  misc_feature (3)..(3): n is a, c, g, or t
  misc_feature (30)..(30): n is a, c, g, or t
  misc_feature (33)..(33): n is a, c, g, or t
  misc_feature (38)..(38): n is a, c, g, or t
  misc_feature (43)..(43): n is a, c, g, or t
  misc_feature (46)..(46): n is a, c, g, or t
  misc_feature (50)..(50): n is a, c, g, or t
  misc_feature (55)..(56): n is a, c, g, or t
  misc_feature (78)..(78): n is a, c, g, or t
  misc_feature (94)..(94): n is a, c, g, or t
  misc_feature (102)..(102): n is a, c, g, or t
  misc_feature (104)..(104): n is a, c, g, or t
  misc_feature (108)..(108): n is a, c, g, or t
  misc_feature (114)..(114): n is a, c, g, or t
  misc_feature (146)..(146): n is a, c, g, or t
  misc_feature (151)..(151): n is a, c, g, or t
  misc_feature (155)..(155): n is a, c, g, or t
  misc_feature (178)..(178): n is a, c, g, or t
  misc_feature (188)..(188): n is a, c, g, or t
  misc_feature (195)..(195): n is a, c, g, or t
  misc_feature (201)..(201): n is a, c, g, or t
  misc_feature (207)..(207): n is a, c, g, or t
  misc_feature (210)..(210): n is a, c, g, or t
  misc_feature (213)..(213): n is a, c, g, or t
  misc_feature (238)..(238): n is a, c, g, or t
  misc_feature (240)..(241): n is a, c, g, or t
  misc_feature (253)..(253): n is a, c, g, or t
  misc_feature (255)..(255): n is a, c, g, or t
  misc_feature (258)..(258): n is a, c, g, or t
  misc_feature (263)..(264): n is a, c, g, or t
  misc_feature (266)..(267): n is a, c, g, or t
  misc_feature (285)..(285): n is a, c, g, or t
  misc_feature (317)..(317): n is a, c, g, or t
  misc_feature (339)..(339): n is a, c, g, or t
  misc_feature (360)..(360): n is a, c, g, or t
  misc_feature (388)..(389): n is a, c, g, or t
  misc_feature (391)..(391): n is a, c, g, or t
  misc_feature (394)..(395): n is a, c, g, or t
  misc_feature (413)..(414): n is a, c, g, or t
  misc_feature (420)..(421): n is a, c, g, or t
  misc_feature (423)..(423): n is a, c, g, or t
  misc_feature (425)..(427): n is a, c, g, or t
  misc_feature (432)..(432): n is a, c, g, or t
  misc_feature (437)..(438): n is a, c, g, or t
  misc_feature (440)..(440): n is a, c, g, or t
  misc_feature (446)..(446): n is a, c, g, or t
  misc_feature (448)..(448): n is a, c, g, or t
  misc_feature (454)..(454): n is a, c, g, or t
  misc_feature (461)..(462): n is a, c, g, or t
  misc_feature (468)..(468): n is a, c, g, or t
  misc_feature (472)..(472): n is a, c, g, or t
  misc_feature (483)..(484): n is a, c, g, or t
  misc_feature (493)..(493): n is a, c, g, or t
  misc_feature (496)..(496): n is a, c, g, or t
  misc_feature (504)..(505): n is a, c, g, or t
  misc_feature (509)..(509): n is a, c, g, or t
  misc_feature (522)..(522): n is a, c, g, or t
  misc_feature (525)..(525): n is a, c, g, or t
  misc_feature (528)..(529): n is a, c, g, or t
  misc_feature (533)..(533): n is a, c, g, or t
  misc_feature (536)..(536): n is a, c, g, or t
  misc_feature (539)..(539): n is a, c, g, or t
  misc_feature (541)..(541): n is a, c, g, or t
  misc_feature (547)..(547): n is a, c, g, or t
  misc_feature (551)..(551): n is a, c, g, or t
  misc_feature (554)..(554): n is a, c, g, or t
  Probeset Number=SeqID_21944
ganctcactagacccccccccccccccctnatnaatgnccccnccncccngtgannatcttgcgaaagcattagttcngtgggtgacagcgtcnacggtctncnagantaatgncaagtatcccagaatcgcgtaaggattgcccnctgtncatnaatagtcataccccctgcttccntagaactttnaatattncttcangtgctnccntgncttgttctctgcactgttatacttnanngatgctattgcntngtntgttnnannatcttttattgaggactntactgttgaatgctaagctgtgaaagctatangttacatctttgtgcccatccnattgcgtttagatattgaacnccaagattatgctctctatggaggaatnncnctnntatagctgggaagggtanntgggcnngnannncatcnccccnngnaacatntnccatcnagatgcnngatacngcanaatagtctggnnagcgggctnttnttattgannatcncatgggctggtangtnacnntcgntgntgnantccgantacntgnatgag

SEQ ID NO: 7542 - DNA, 681 bp, Zea mays
  misc_feature (374)..(374): n is a, c, g, or t
  misc_feature (387)..(387): n is a, c, g, or t
  misc_feature (404)..(405): n is a, c, g, or t
  misc_feature (427)..(428): n is a, c, g, or t
  misc_feature (434)..(434): n is a, c, g, or t
  misc_feature (438)..(438): n is a, c, g, or t
  misc_feature (455)..(455): n is a, c, g, or t
  misc_feature (457)..(457): n is a, c, g, or t
  misc_feature (477)..(477): n is a, c, g, or t
  misc_feature (480)..(484): n is a, c, g, or t
  misc_feature (489)..(489): n is a, c, g, or t
  misc_feature (497)..(497): n is a, c, g, or t
  misc_feature (502)..(502): n is a, c, g, or t
  misc_feature (504)..(504): n is a, c, g, or t
  misc_feature (508)..(509): n is a, c, g, or t
  misc_feature (516)..(516): n is a, c, g, or t
  misc_feature (518)..(519): n is a, c, g, or t
  misc_feature (521)..(522): n is a, c, g, or t
  misc_feature (527)..(528): n is a, c, g, or t
  misc_feature (530)..(530): n is a, c, g, or t
  misc_feature (533)..(534): n is a, c, g, or t
  misc_feature (536)..(537): n is a, c, g, or t
  misc_feature (540)..(540): n is a, c, g, or t
  misc_feature (548)..(548): n is a, c, g, or t
  misc_feature (554)..(554): n is a, c, g, or t
  misc_feature (561)..(561): n is a, c, g, or t
  misc_feature (566)..(566): n is a, c, g, or t
  misc_feature (569)..(569): n is a, c, g, or t
  misc_feature (579)..(580): n is a, c, g, or t
  misc_feature (582)..(584): n is a, c, g, or t
  misc_feature (591)..(591): n is a, c, g, or t
  misc_feature (595)..(595): n is a, c, g, or t
  misc_feature (598)..(598): n is a, c, g, or t
  misc_feature (600)..(600): n is a, c, g, or t
  misc_feature (605)..(605): n is a, c, g, or t
  misc_feature (609)..(609): n is a, c, g, or t
  misc_feature (616)..(616): n is a, c, g, or t
  misc_feature (618)..(618): n is a, c, g, or t
  misc_feature (621)..(621): n is a, c, g, or t
  misc_feature (625)..(626): n is a, c, g, or t
  misc_feature (634)..(634): n is a, c, g, or t
  misc_feature (636)..(636): n is a, c, g, or t
  misc_feature (643)..(643): n is a, c, g, or t
  misc_feature (646)..(647): n is a, c, g, or t
  misc_feature (653)..(653): n is a, c, g, or t
  misc_feature (656)..(658): n is a, c, g, or t
  misc_feature (660)..(660): n is a, c, g, or t
  misc_feature (664)..(664): n is a, c, g, or t
  misc_feature (675)..(675): n is a, c, g, or t
  misc_feature (677)..(678): n is a, c, g, or t
  Peptide Sequence Number=SeqID_12862
  Probeset Number=SeqID_21945
ggcctacataagcagctctagtacgatcctataggaaactagtagctgcagtacggtcggaaatccgggtcgaccacgcgtcggggtgatcaaaggaggctcgtgctagtgttcaagaggttcattttcttccgattaagccaactgataaaagaaactgcattaagctaccctgaatggggaggggagaatgcatcgtgttagcaaggggagcaccaagagcaggtccttcgtccttgcccacaacaagtcggattattgaaagaagggtcagagctgtgatcgacaaatttgctgagcgtggtctgcgagcacttggtgtggcttaccaggaagtgccagatggcaggaaagagagtcctggtggaccctgncaggttcattggnctcttgcctcttttttnnccccccgggccatgatagtgcnnaaattntcanaatttttttttcccccncncggggggggggggggggggntannnnntatcnacctttgnttttngntagnnacctgcncnntnntttgnnantgnntnnttnctatgtancccttnctatttnctttnacncaaacaaaannannngctcgcntccnttncnttccntttnccctttntntgntttnnttgtgggngntgtttcntcnntttttnccnnngngttntttccacaccntnngtc

SEQ ID NO: 7543 - DNA, 948 bp, Zea mays
  misc_feature (1)..(348): n is a, c, g, or t
  misc_feature (352)..(352): n is a, c, g, or t
  misc_feature (355)..(356): n is a, c, g, or t
  misc_feature (367)..(367): n is a, c, g, or t
  misc_feature (373)..(373): n is a, c, g, or t
  misc_feature (389)..(389): n is a, c, g, or t
  misc_feature (410)..(410): n is a, c, g, or t
  misc_feature (442)..(442): n is a, c, g, or t
  misc_feature (752)..(758): n is a, c, g, or t
  misc_feature (760)..(763): n is a, c, g, or t
  misc_feature (781)..(790): n is a, c, g, or t
  misc_feature (795)..(795): n is a, c, g, or t
  misc_feature (797)..(800): n is a, c, g, or t
  misc_feature (915)..(918): n is a, c, g, or t
  misc_feature (920)..(946): n is a, c, g, or t
  Peptide Sequence Number=SeqID_12863
  Probeset Number=SeqID_21946
nnnnnnnnnnnnnnnnnnnnnnnnnnnnnnnnnnnnnnnnnnnnnnnnnnnnnnnnnnnnnnnnnnnnnnnnnnnnnnnnnnnnnnnnnnnnnnnnnnnnnnnnnnnnnnnnnnnnnnnnnnnnnnnnnnnnnnnnnnnnnnnnnnnnnnnnnnnnnnnnnnnnnnnnnnnnnnnnnnnnnnnnnnnnnnnnnnnnnnnnnnnnnnnnnnnnnnnnnnnnnnnnnnnnnnnnnnnnnnnnnnnnnnnnnnnnnnnnnnnnnnnnnnnnnnnnnnnnnnnnnnnnnnnnnnnnnnnnnnnnnnnnnnnnnnnnnnnnnnnnnnnnnnnnnnnnnnnnnnnnnnnnnnnngcanggnnaggaggatgangacttnctggacgtgctgctgncgcttaaggaaaatgccgcgnatgggctcaagctcacagacgaccgcatcaanggcatccctcgagacttgaatagcggtgggactgaaaacacatccaaacgctggaatgggccatggctgcatgggcaaactcataacccaaccgggggtgaaggccaagctcaaggacaaatccggcgagggggcccccccaaacagcctaactctcgggaggcggttcccggggaatgggaatccctaaaggggagcggggggggccaaaaaaaattggaaccttcgggtacctctttgaggggggggtaaaagagatttttaaattaggaagaaaaagggggaaatagaagtgggaaaagggcactcnnnnnnnannnngagtttgagtccgaagannnnnnnnnngatgnannnnaggatgaggatgagatggatgaaacctacgtgtgacccagcttcaggtcatgttttagcttttattatgcatccagtatctttaacttgtgaacttagaactcctgttgtgcgcnnnntnnnnnnnnnnnnnnnnnnnnnnnnnnnag

SEQ ID NO: 7544 - DNA, 1570 bp, Zea mays
  misc_feature (309)..(309): n is a, c, g, or t
  misc_feature (311)..(311): n is a, c, g, or t
  misc_feature (327)..(327): n is a, c, g, or t
  misc_feature (355)..(355): n is a, c, g, or t
  misc_feature (415)..(418): n is a, c, g, or t
  misc_feature (439)..(443): n is a, c, g, or t
  misc_feature (457)..(459): n is a, c, g, or t
  misc_feature (1570)..(1570): n is a, c, g, or t
  Probeset Number=SeqID_21947
ctgcatggttagggataacctagaagatatttcctagagtttcattagttgtttatggctgtattattagttgtattgaccttaatgcatgccttttggtttgttggcatttttagttcaaatctcaagtgccacactattatttggaacttgcagaagttattccctttgtatatacatatatgcatctacaggttttacatcatttcaaatttataaacgattttattttcataccattttcaactatgaacatgtatgcaatatctgtttgatgtttggaaggacatggaagaactaaagaaagangntagggaagctcggagnatcaaaatgttgcatcagccaagcaagncaatggatctggaaaatgaaatacgaattttacgtaacacatttgctgagaagtctaagnnnngtgttagtcttttgaaagagnnnnnaacgcataaaaggnnnaaagaaaatggtaccatcccttcattcgatctggagggtctccaatgcttaggatcaatgctacgtatagttggtctgagtggtactcacatggatctgtcaaatatttcaatccagtggttccgtatacatccaaaagaaagcaacaaagagattatttcaggtgccacaagaccagtatatgctctagagccacatgacgtaggacgctatttgcaagctgaaatcgacgttggcggcgaaatcgcagtagcaaagactgctgggccagtagaccctggtttgtttgactggacacgttcggtgagcgttattcgcatgtgctgggtattgcatgactgacgtgtgtttcattattgttagcagatgctggattggttgattatgtggagacgctcgtaaggaaacctgaaactgaattcaatgttgttgtgcttcaatccaatggcgtcgaccagccaaaagagtcggttcatgtactaaatgtcgggaggctgcggatgaggcttactaaagggaagtcggtagtcgccaaggaattctattcctcatcgatgcagttatgtggtgtgagaggcggaggcgaagcagcctcgcaggcgatgttttggcgacccagaaacgacctcagcttggtgctagccttcgagagcactcgagaacgcaacgcagccatcatgctcgctcggcgtttcgctgtagattgcaacatcatccttgctgggccaggcgacaaaactccctggtgaacgaagatggcacctgtgctctgccgataccagataccaccacccaccccaccactcctgactgtcctgctcttcctcgcgtcgtaggttcctgaaagaaggcgccgtccgcaccattttaaccgcctgggcgccgcctttctatgtcactgtgctatgttttcccagtccgcgagggttgtaatctgttgttgctgggagatgcgacagcaatgtaagctacaagtctaattgtgtttgacatatgtttagtgtgatgtggaagcaatgacatatgttagtgttgatgttgagttaatgatgtctgagcgccaccaaatctctactatttattaaagctgcaagagaactctgtcattccn

SEQ ID NO: 7545 - DNA, 1540 bp, Zea mays
  misc_feature (1)..(1): n is a, c, g, or t
  misc_feature (39)..(41): n is a, c, g, or t
  misc_feature (1278)..(1279): n is a, c, g, or t
  misc_feature (1302)..(1303): n is a, c, g, or t
  misc_feature (1306)..(1306): n is a, c, g, or t
  misc_feature (1359)..(1360): n is a, c, g, or t
  misc_feature (1387)..(1388): n is a, c, g, or t
  misc_feature (1399)..(1400): n is a, c, g, or t
  misc_feature (1404)..(1404): n is a, c, g, or t
  misc_feature (1410)..(1414): n is a, c, g, or t
  misc_feature (1420)..(1421): n is a, c, g, or t
  misc_feature (1425)..(1433): n is a, c, g, or t
  misc_feature (1445)..(1445): n is a, c, g, or t
  misc_feature (1455)..(1455): n is a, c, g, or t
  misc_feature (1457)..(1459): n is a, c, g, or t
  misc_feature (1470)..(1474): n is a, c, g, or t
  misc_feature (1476)..(1478): n is a, c, g, or t
  misc_feature (1481)..(1481): n is a, c, g, or t
  misc_feature (1493)..(1501): n is a, c, g, or t
  misc_feature (1503)..(1506): n is a, c, g, or t
  misc_feature (1509)..(1510): n is a, c, g, or t
  misc_feature (1527)..(1540): n is a, c, g, or t
  Peptide Sequence Number=SeqID_12864
  Probeset Number=SeqID_21948
nggcaccacaacccagcgccggcagtcgccgtcatcgannnatcgccggaaaactaacccctaacgatgtctggagccggcgaggaggacaagaagcccgcggagggcggcgcccacatcaaccttaaggtcaagggacaggatggcaatgaggtgttctttcgcataaagaggtccacccagctgaagaagctgatgaacgcttattgtgaccgccagtctgtggacatgaatgccattgcgttcctgtttgatggccgcaggcttcgcggcgagcagacccctgatgagctggagatggaggacggcgacgagatcgacgccatgcttcaccagaccggaggcagcgttcctagcaccacctaaaagcctcgttttgctctccgtcctgcgtagtagtaaacaaaagggaaaaagtctttttaaggaacttgtgatgctctggctccttgtgccattgctgagggacatccttagcctttgtttagtagtatggtttggtactttgttctgtcatcactcgtttatctatccctaatacatgccgccatgattgtactcccaaaaaaaaaaaaaaaatgtggccgccggggggcttccccgaaccctaaccccgaccgccgcgccagctactcccgtttcgtcctcgcggtattcgcggcgttttctcccactgctcgaaccgcgccgacgagcgacgacaagagctgctctattcttcaaaccgccgcgccagcgccaggaactgcagtttcgtcctcgcggccttctctccctccactcgaaccgcgccgacgagcgacgacaacagctgctgcattcttcaatggcgactgtgccagttaacccaaaacctttcctgaacaacctgacagggaagcctgtaattgtcaaactcaagtggggtatggagtacaagggttatcttgcttctgtggactcctatatgaatctccagcttgccaacactgaggagtacattgatgggcaattctctggaaacctgggagagattctgatcaggtgcaacaacgttatgtatctccgaggcgttccagaggatgcagagatagaggatgcagagtgagaagatgtgaatgtaatttgattctgacatgtatgtttgaatacgccggtgacaactagacctatcggatctttattttgtcattctattgtatgggaggaatatcagatttccttgattaagctatattaggtatgatggcgtcgggccaagggtgaagctgctttcagttaggctatggtgtcattctnntgaatgtatatcagatttcttgnncanttctttgccccattgcctacaatcccggattaagttatatcagggaaaaatgnngctttttttcccgtttgcccttgaaannaaaaaaaaaanngcgngctctnnnnntccaannacgnnnnnnnnnggaatatcacgnattatttgantnnnaacttgcacgnnnnntnnnacnttatatcaatgnnnnnnnnncnnnnctnnttgctgagatcatcagnnnnnnnnnnnnnn

SEQ ID NO: 7546 - DNA, 1851 bp, Zea mays
  misc_feature (1)..(8): n is a, c, g, or t
  misc_feature (11)..(13): n is a, c, g, or t
  misc_feature (16)..(18): n is a, c, g, or t
  misc_feature (41)..(50): n is a, c, g, or t
  misc_feature (63)..(64): n is a, c, g, or t
  misc_feature (70)..(74): n is a, c, g, or t
  misc_feature (104)..(106): n is a, c, g, or t
  misc_feature (137)..(137): n is a, c, g, or t
  misc_feature (139)..(141): n is a, c, g, or t
  misc_feature (1845)..(1848): n is a, c, g, or t
  Peptide Sequence Number=SeqID_12865
  Probeset Number=SeqID_21949
nnnnnnnnaannncannnacactgctaggagtgatgcatannnnnnnnnntctgctaatggannttaatnnnnnacataatagaccttatgtagctacaacagnnntcattaactgtcttttacatagaatcaaatngnnnttggagagcttttttttttttttttgctacaatagatgtcattaactgtcttttacatagaatcaaatagtacttggagagcaaaggcgacaacattaagtagataaatactatagatggagagcaaggtatatctggtatggttaacaaggccaacacatatgccgtcagttattattaaggctctgtttggcacagcttattttcagcttctttacaaatttaagcagaagttctgccaaacagctagcttctgcagcagcttatcagttcagctgcttctcagaatacactaaaagcagccaacaagcagaagctgcttttcaccagcttattagataagctgctttttcaacaagcagcagctgtgccaaacagggcctaagaatacagaacagctgtaacagagccatacctactgaaatgaggcatacctatgtttgcacagaaccatcagtcgcacattgtcaatctctcaggtagatgcaatcctacttatcttcctccgaagccaaatcagtcgcacgtttacatttttttgcatcacaaacatctcccgattcaattcattcttgaacacctctgctgcaagggccttctcctcatccgtcaactcctccatagcatcaactgtgtcgagacacctctcgatagagtactcctcttcacgactcttcttctcaagtaacacctccacaatcttctgtgtttgcttcttcttgtgctccaaatagtcatccagaacacttgcaacttgacttttcttctgctttttccctcttctatatactgacgtaacagaaggtggtgactgaacttcacaagcctcttgatccaacattagtccatcaacattagtctcgctgcccacacttggtccagcaacattgatctcgctgccctctcttggtacatgtttgcaccggttcaacagcagatgctactatggctcttttctcttcttgcatggccgagagaatagcagggacaagtactaagaagagttcatcatcctcttcttcctcctctaacagaaatcgtctagcttccccctcccaggaactcgttatcagtgagcttgccgttcaaatcaggatgaaccttaccaacatccagatcggagacgtactgctccgcgtcttctccgtaccggctcttcttcttcagcagttaactaccctcggatccgcgtcttcttcttcagaggcggtgggtgatataggtggcgacggcgacgtcggtgggtgacagggtgagggcggcgtcggctagatccagaggaggaagccagacggggaatggaggctccgcgtctccgcggatgctctagtgatgctttcggctactggactttagccatctagggtgcggcactcaaccgcttcgcctagcagcacaactttttttttcgtgcaatacacatcaatatcgaaaatcaatatgcaacgttccatgctcatttaactacgtatctgctcataagagcatctccaagagactctttattttttactctctatttaaatctttatttgtatctctataaatattaaactctatatataacgtctcattccaacagactctccaacatacaagatagcttagatagcgagagttgctagccaaatttggctagtgagaaagttaatttagagagccagatagattagaaagttagatggctagtctgttggagagctnnnntgc

SEQ ID NO: 7547 - DNA, 2183 bp, Zea mays
  misc_feature (18)..(20): n is a, c, g, or t
  misc_feature (22)..(22): n is a, c, g, or t
  misc_feature (24)..(24): n is a, c, g, or t
  misc_feature (26)..(27): n is a, c, g, or t
  misc_feature (2042)..(2042): n is a, c, g, or t
  misc_feature (2057)..(2063): n is a, c, g, or t
  misc_feature (2069)..(2071): n is a, c, g, or t
  misc_feature (2073)..(2075): n is a, c, g, or t
  misc_feature (2084)..(2087): n is a, c, g, or t
  misc_feature (2091)..(2098): n is a, c, g, or t
  misc_feature (2102)..(2102): n is a, c, g, or t
  misc_feature (2104)..(2105): n is a, c, g, or t
  misc_feature (2112)..(2114): n is a, c, g, or t
  misc_feature (2118)..(2120): n is a, c, g, or t
  misc_feature (2122)..(2125): n is a, c, g, or t
  misc_feature (2127)..(2129): n is a, c, g, or t
  misc_feature (2182)..(2183): n is a, c, g, or t
  Peptide Sequence Number=SeqID_12866
  Probeset Number=SeqID_21950
ccggccgggctcttttgnnnananannaataaataaataaataaagccccgtctcgtgtcatttcttctcgccgattccccatctcgccctgcccgccgaagagcgcgcaagccccatctcgccctgcccgccgaagagcgcgcaagcaccaccgtcccggcagcgcggagatcggtccactccatccacgcggcgtcaggcgagcggggcgtacggacgctgcgaccgatggatctcaaggatagcctctccaaatttaagcaacagcaggagagatgtcagtcatcactggcgagcatagctgcttcgacctcaaagccaaagcacagggcccaaccagcgcatgctcctaacgtcccagcaagaccatcacaacctattaagttttcaaatgatacagaaaggctgcagcacatcaattcgattaggaaatctcctgttggagcacagatcaagcttgtcattgaacttctttacaagacaagacaagcttttactgcagagcagataaatgaagcaacttatgttgatattcacggtaataaagctgtctttgacagcttgagaaacaaccccaaagtaagctatgatgggaggcgtttctcttacaagtccaagcatgacctgaagggaaaagatcccctgggtgtgcttctcgccgattccccatctcgccctgcccgccgaagagcgcgcaagccccatctcgccctgcccgccgaagagcgcgcaagcaccaccgtcccggcagcgcggagatcggtccactccatccacgcggcgtcaggcgagcggggcgtacggacgctgcgaccgatggatctcaaggatagcctctccaaatttaagcaacagcaggagagatgtcagtcatcactggcgagcatagctgcttcgacctcaaagccaaagcacagggcccaaccagcgcatgctcctaacgtcccagcaagaccatcacaacctattaagttttcaaatgatacagaaaggctgcagcacatcaattcgattaggaaatctcctgttggagcacagatcaagcttgtcattgaacttctttacaagacaagacaagcttttactgcagagcagataaatgaagcaacttatgttgatattcacggtaataaagctgtctttgacagcttgagaaacaaccccaaagtaagctatgatgggaggcgtttctcttacaagtccaagcatgacctgaagggaaaagatcaactgcttgttttgattagaaagttcccagaaggtcttgctgttgtggaagtcaaggatgcatattcaaatgtattggaagatttgcaggctctgaaggctgctggtgaggtttggctgttatcaaacatggactcccaggaggacattgtatacccaaatgatccaaaagcaaagatcaaggttgatgatgacctgaagcaactcttccgtgaaatagagctgccacgtgacatggtcgacatagagaaggagctacagaaaaacggtttcaagcccatgacaaatactgccaaacgacgagcagctgcccagatcaatggcgtaaaacccaaggctaagcccaagaagaagcagcgtgagatcacaaaacggaccaagctcacgaatgcccatctgcctgagctgttccagaatcttaacacttaaacgtgctacagtatctgacgacggaagatggttcattttactcctatttattgctacgttgtgtgtatgtgttatgcagctatgctgtatggcttatggttatgagcgccacaaatttgtttgtcaagattctggatgatatacttatgcattctgacataataggaggcaaaacctcaagattttccttatttttattttatcaattacagcattttctgagtttgcggcaataagttaggtcgattttgggtcaattaggttggtgtgaggacaagctgaacatattttgatggattgcttagcttgtaattttaccagaatttaaacctcaaaattaaaaaaaatacagatctgcaggtttagcactcgtgctgtgatcccnctactggaatgttcnnnnnnntggagnnngnnngttcatgtnnnnaccnnnnnnnnggantnngcccaannncttnnntnnnngnnnccaaaaaaaaaaaaaaaaaaaaaaaaaaaaaaaaaaaaaaaaaaaaaaaaaann

SEQ ID NO: 7548 - DNA, 2762 bp, Zea mays
  misc_feature (4)..(6): n is a, c, g, or t
  misc_feature (14)..(14): n is a, c, g, or t
  misc_feature (425)..(425): n is a, c, g, or t
  misc_feature (454)..(454): n is a, c, g, or t
  misc_feature (470)..(470): n is a, c, g, or t
  misc_feature (484)..(484): n is a, c, g, or t
  misc_feature (486)..(490): n is a, c, g, or t
  misc_feature (503)..(504): n is a, c, g, or t
  misc_feature (506)..(508): n is a, c, g, or t
  misc_feature (510)..(517): n is a, c, g, or t
  misc_feature (520)..(530): n is a, c, g, or t
  misc_feature (543)..(547): n is a, c, g, or t
  misc_feature (2364)..(2368): n is a, c, g, or t
  misc_feature (2371)..(2374): n is a, c, g, or t
  misc_feature (2380)..(2385): n is a, c, g, or t
  misc_feature (2439)..(2439): n is a, c, g, or t
  misc_feature (2762)..(2762): n is a, c, g, or t
  Peptide Sequence Number=SeqID_12867
  Probeset Number=SeqID_21951
atgnnngtaagctnggaattcggctcgaggtgctttcacatcttcattttttattttctgtgtcatttctgctcaatgctagtatagcagctactgctttgacctatagaagataaaaaatgacacagaagaggatggtgagagtgctaatgagaaagaaaaatcatatggttccattatgatggaaaggttgaccagttcaccgaatggtcgaattgatcatgtgcttcaggagaaaacatttcagcatccatatctatctgctttgggagctcataccaactattggcgagatcatgatactgctctcttcattctcaaacatttgtatcgtgatatacccgaggatcctccaagcgatgtcattgaaaggatgcctattaaactattttatgagagagatccagttgaggaagaaacgcctntgacgttttcagatcatgcagcaattaangaattctgcagaaagntgaaagcttactcnannnnnatggaggatgatnncnnnannnnnnnngannnnnnnnnnntcgcgtccttagnnnnngttctgtcgtatgatatactttgtcatcaagaatcccttttggccccatttccaacagagtatctgaacatggaaacatctgatcgaaatcaaggagcaaaatcagccaatgaagttgctctgcatgattcaggcgcaaaggatcatgatacttctagtctagggtattcttgtgctgataatgaaaacagtgtcgttgatgaagatagcaccagaactgacatgtcatgtatggacagcattctcccatcatgtgtgcttgaggattcaccaaataaccatgacactggtgtgccacgtggggcagttgttgctgatcaaaatgaaaaagaaaataggattgagaatcatcagacggtgtatactgaggaaggaacaacttcaggtgtaagcacaaaagatgctgaagcatcacacatttcaagatctgctgaggatgtccatgaagaggtccttgacaaagaaaaaatgatcatttcactagaagaagaggtgaaacgtcttaaagctaaactagatcagcttgaacagcataagcatctagtgactgagagcaccagtggtgttgagtatcatggaggcaaaaatggcaatcatgccttgaactctggcaaacttttcgtggcacaagaaagtacaaaccagtcctactcaccgcaaatcaaatacacgaaactaaactttaaggttgatacattctttgctgttggatctcccttgggtgtcttcctttccctgcgtaatgtccgtattggtattggcaaaggacaagactattggcaagataagaacataattgaagagatgccatgctgccggcagatgttcaatatttttcatccttttgaccctgtagcatacagaattgaaccacttgtatgtgaagattatctaaagaagcgtcctgtaattgttccctaccatagaggcggaaagaggatacatgttggagtgcaggagttcacagaagatatttctgcacgttctcaagccattgcctgtcaattgaagtcactgaaggtcaaagcagtagctgctttgctagcattgagcagaaatgacacagaagaggatggtgagagtgctaatgaggaaggaagatcgtatggttccattatgatggaaaggttgaccggctcaccagatggtcgaattgatcatgtgcttcaggagaaaacatttcagcattcatacctatctgctctgggagctcataccaactattggcgagatcatgacactgctctcttcattctcaaacatttgtatcgtgatatacctgaggatcctccaagcgatgtcgttgaaaggatgcatattaaactgttttatgagagagatccggttgaggaagaaacgcccgtgacattttcggaccatgcagcaattaaggagttctgcagaaaggtgagagcctactcaacaaaaatggaggatgatgccaactgctaagcctcttgatggtgtcatttcctgatggaaaccatgttacatccccacgttcctcgccaagaaggaagatgcaggcatgggaagggagaacgattccacaaaatcgtgatcccaggataagaatcctaagaaatgtagttccacgcttgacaccagaatcaggacacttgagaaacgttgtacagagtcggttccccatgttgcttcacttgttcccgtcgtcaatgcagtgctgtacagagaacgtcctgctgtacctttctgtatatgtaatcttgcgtgctgtgcatacagaatatgatggatttagtttcaaaaaaaaaaaaacagcaaaaaaaaaaaaaaaaaaaaaaaaaacaactcgnnnnnggnnnnaaacgnnnnnngatgccaactgccaagcctcgtgatggtgttgttttctgatgaaaaaccatgtnacggcctcacacgttcctgggcaagcagaagcaagatgcagacatgggaaggaagaacgaatcgtgatcccaagaaaagaatccacgagatgcagttccacgcttcacgccagaatcagagcacttggagaatgttgtacggagtagagtcggttgccttgctcgttcctacatttataatgcagtgttgtacatagaacgtccgactgtagttttgtgcatcttgaacgtaatgttatgctgcctgctttaaatgctacagaatatatttttgcttttgcatccctagtgtgcgtcaattgcaaagtggttagctcctactn

SEQ ID NO: 7549 - DNA, 2665 bp, Zea mays
  misc_feature (2614)..(2665): n is a, c, g, or t
  Peptide Sequence Number=SeqID_12868
  Probeset Number=SeqID_21952
gccgggtcgaagtcggcacgattccccactccgtcgcgcagtcgcgcctcctcaacttcgtctgcccgcgagccgggaaacatttccctcagatccaccggccctggagctcccgccgctccactgtaagacccgcccttgcctccgcgaaatcctgcgacatcacagacgagccgggggtggtggtgggggtgggggagcggaggtaggtcgcagcagccatggcggccgcagaggagaacagctcgctgttcctgattttcgtcctcaccatgatcgcgctgcccctcgtgccctacacgatcctgcgcctgtgtcgcgctgcctccgagaaggtcaagaccatccactgccgctgttcgggttgccaccgctccggcaagtaccgcaagtcaatctacaagaggatatccaacttgtccacgtgcagtaacctaacaatccttctgctctggattgttatgatattgctggtttactacataaagcatgttagccgcgaggtccaagtttttgagcctttcagtattcttggactggaatctggggcatctgaatctgatatcaagaaatcatataggaggctttctattcagtaccatcctgataaaaatcctgatccagaggctcataagtactttgttgaatatatatccaaggcatatcaagcattaactgatcctatatctcgtgagaattatgagaaatatggtcaccctgatgggcggcaggggctgcaaatgggcattgctttgcccaagtttttactaaatattgatggtgcatctggtgggataatgcttcttggaatagtcggattttgtatattattgcctttgatgatagctgttatttatttgtcaagatcatcaaaatatactggaaactatgtcatgcatcaaactctgtccacttactactactttatgaagccatctcttgctccaagcaaagttatggatgtcttcatcaaggctgcagaatatatggagatgccagttcgacgcagtgatgatgaacccctgcaaaaattgtttgtagctgttagaagtgagttaaatctggacttaaagaacattaagacagaacaagcaaagttctggaagcagcatccatcactagtaaagatggaactgctgattcaggcgcatctcacttgtgagtcatttgctttgaccccagcacttcttaaagattacagacacatgcttgaacttgcacctcgtcttttggaagaactcgttaagattgcagttctaccaaggaatccccatggttttggatggctccggcctgcaattggtgttattgagctttctcaaaatattgtccaggctgttccactcagcgcacgaaaaactagtggaggtaactccgaaggaatagcacatttcttgcagctgccacatttcacagaagcaactgtgaaaaagattgctcgcaagaaaatccgtgccttccaagaactttgtgacatgtctgtggagggtcgtgctgcattgctcacacaagttgctgggctttctgaagaacaagttcgggatgtggagcttgtactggagatgattccttgtattgaagtagacatcaaatgcgagactgaaggtgaagagggcattcaagagggtgatgtcgtgacaatgtatgcttgggtctcgctacgacggcgtaatggactgactgctgctcttccccattgtcccaacttcccattccacaaggaagaaaacttctggctgcttctagccgatgcggcatcaaatgatgtctggttgtcacagaaagtgagcttcatggatgaggccactgccataactgcggcatcaaaagctatacaagatacccaggaagcactaggtgcaagtgcaaaggaaataggaaatgcagttaaggaggcagttgacagggtgaagaagggcagtaggctggtaatgggcaagttccaagccccagcagagggtactcacaacctcacctccttttgtttatgcgacgcttggataggctgtgacatcaagaccagcttcaagctcaaggtcctaaagcgcagccgtgctggaacaagaggccatgtgcctgaagaagggtcagcagcagccgtagaagatggtattgaggacgaagaggaggaagatgaagaggagtatgatgactatgagagcgagtacagtgatgacgaggaggatgagaagaacaaggggaaagggcaggggaaggtcgtgaacggatcggcccatcaaggggctgaatctgatatagattcaggcagcgatgagtgattctacactgtattatgttgagaaaatcatagaacttaaccccatctattttttttaatttgaacatatccctattaagttgcatgcatcaatctaacccaaaagtttaatccgataagagttgtgcaattcacttatattatattccaaaaaaaaaaaaaaaaaaaaaaaattgaagggggggccctcccaaagagccgagcaaaactagcttactatctcgagttgacctgaagactgcatggtcattctcctaagtgcaagcgtttcacccatgcctatcatctgtgtggtgtatgttcctcacatttattccgaatggcactgctgatttnnnnnnnnnnnnnnnnnnnnnnnnnnnnnnnnnnnnnnnnnnnnnnnnnnnn

SEQ ID NO: 7550 - DNA, 1504 bp, Zea mays
  misc_feature (1)..(1): n is a, c, g, or t
  misc_feature (1207)..(1207): n is a, c, g, or t
  misc_feature (1282)..(1285): n is a, c, g, or t
  misc_feature (1290)..(1290): n is a, c, g, or t
  misc_feature (1292)..(1293): n is a, c, g, or t
  misc_feature (1415)..(1415): n is a, c, g, or t
  misc_feature (1426)..(1427): n is a, c, g, or t
  misc_feature (1429)..(1429): n is a, c, g, or t
  misc_feature (1431)..(1431): n is a, c, g, or t
  misc_feature (1436)..(1448): n is a, c, g, or t
  misc_feature (1467)..(1467): n is a, c, g, or t
  misc_feature (1474)..(1504): n is a, c, g, or t
  Peptide Sequence Number=SeqID_12869
  Probeset Number=SeqID_21953
naacaagtacatggtagagctgttaagacagggcacacctctgaaactgaagttgccaatgctttgatttcactatatggaaagtgtggcagtattgaagatgccaagatgatcttttctgaaatgtcactgaggaatgaggtttcatggaatactatcataacaagttgttcacagcatggacgtggactagaagctttggatttatttgatcagatgaagcaagaaggtctgaaaccaaatgatgtcaccttcataggtgttttagctgcttgcagtcatgtgggtttggttgaggaagtccttagttacttcaaatccatgtctaatgtgtatggacttaatccaatacctgaccattatgcctgtgttgtggatattcttggacgagcaggccaacttgaccgtgcaaggagatttgttgatgaaatgcctatcactgctaatgcaatgatttggcgaacacttctcagtgcgtgtaaagtacacaagaacatcgaaattggggagcttgcagccaaacatctcctggagttagagccccatgattcggcatcatatgtcctcctatcaaatgcatatgctgttactgggaagtgggccaacagggatcaggtcagaaagatgatgaaagacagaggaattagaaaagaaccaggtcgaagctggattgaagtaaagaatgcagtccatgcattctttgttggtgatcggtcgcaccccttgtccgatcagatatacaagtttttgtctgagctaaatgataggttatccaaaataggatacaagcaagagaaccctaatttgtttcatgaaaaagagcaagagcagaaagaccctactgcttttgtccatagtgagaagttagctgttgcttttgggttaatgactttgcctccttgtattcctcttcgagtgattaagaaccttcgtgtatgtgatgactgccacagttggatgaaatgtacctctgaagtcacaagaagagaaattgtattacgagatgtgtacagatttcaccattttaacagtggcagctgttcatgtggagattactggtgaattgggctgttgcaaagtgtttacagcactttttttgatagaaaaatccccccagtgctattcctaatggttttcattttaagatgtctggggtctacccttatatctgctattgtgacatgtatgtatctggaaatggattcgncatggcaaatctagcatgtctagataaacatgtacagggctttggaaattggaagagtcattcatatctgtcgcnnnnagttnannatcggaaatcccttatatcggttgtggtgtgtatggctttgactgcagaggcaaataagcaatagaccttgatctttgctttgttattggaagagtcatttgtgtaatttttatctttgtgnttgtcattatnntntnaaaannnnnnnnnnnnnattaaaatttgggagttanaaaaaannnnnnnnnnnnnnnnnnnnnnnnnnnnnnn

SEQ ID NO: 7551 - DNA, 1257 bp, Zea mays
  misc_feature (1)..(3): n is a, c, g, or t
  misc_feature (997)..(1257): n is a, c, g, or t
  Peptide Sequence Number=SeqID_12870
  Probeset Number=SeqID_21954
nnngttggatcgtaactaacgctagagaagcactccgaagacctgctctccttcgttctgtttgttgtttttcttctcccgtccgcagtccgcttggcgtgcgcgacggctagggcgaccgccgccgccctacgccctacgtccagctgcccatgtcttcttcgggccccttgccggcgggaactcaccagaccaggaatcgtgctggcaaccggcgcaagtctggagatagggctgataaagctaattactcctacaataatgatggagagaagagcaatgttccttcattaaagaaccttcctccaattgttcatcatgaaacattcttcagcaatgttcagaatgactacaatcaaacaggattagtgcctttggagggatgttctgccagtgaggcttcacagcttctcagtgatcgctggactgctgcaatcaacatgtacaatgaccaaacaattgacccctcagagaaaccggtaatgtattctggatctagcagctcatcatggggtcacctgaagcttcctcatcagatgaacttcctcgaggagttgcgccgtgcagtggacgctcatacagaatttgcgtcgcctgtcgtcacctggaactaatcgaagtcagcatctgcatcattatgcgttatgactaatttatggaaggcaggctgttcgccaggtctatgtatgatgtatcccatacacggatgatgtgccaaaaggctttcgtctgacctgcagctgcttctggaatctgcatctgtacaattgtaccattgttacccctggccttgtagctgcaaagcagtttgttgtaacaattaaatgaggcgccggatcctcacgccatcgaaagtttgaaacagcttggttgttgtatggtagttccaagacttggtgattataatgtgcgcattttctcgaccgttgttttagctatctcttggtgagcataaagaaaacggtgggccattctggatctagcagctcatcatggnnnnnnnnnnnnnnnnnnnnnnnnnnnnnnnnnnnnnnnnnnnnnnnnnnnnnnnnnnnnnnnnnnnnnnnnnnnnnnnnnnnnnnnnnnnnnnnnnnnnnnnnnnnnnnnnnnnnnnnnnnnnnnnnnnnnnnnnnnnnnnnnnnnnnnnnnnnnnnnnnnnnnnnnnnnnnnnnnnnnnnnnnnnnnnnnnnnnnnnnnnnnnnnnnnnnnnnnnnnnnnnnnnnnnnnnnnnnnnnnnnnnnnnnnnnnnnnnnnnnn

SEQ ID NO: 7552 - DNA, 1413 bp, Zea mays
  misc_feature (1)..(72): n is a, c, g, or t
  Peptide Sequence Number=SeqID_12871
  Probeset Number=SeqID_21955
nnnnnnnnnnnnnnnnnnnnnnnnnnnnnnnnnnnnnnnnnnnnnnnnnnnnnnnnnnnnnnnnnnnnnnnncaagaggagaaaattaccccagacagcccttgatgtgtggagattcagcagaactaacagacagggcagcttcttgcttgaacctctgctgcatgggacgtgcagtgatcttcaagaaacctatgagagaaacttcccttgtgtcagtggccttgatgctgagtgtagcaatgtggctggtgtagcaaatgatgatccggatgcatcacttgaacggcagctaagcccaaatgttcctagaactgcggagctgtcttaccatgagctcaccccaacgtctccaggaaatgcagaggcacagcctgaaccacctctgccaaccctaaagtcaccaggagctgcaggtgcagtgccagacgatgatatgttgcctgagttgccccggttctcaccaatagatgtgccatcttcaataagaggaaatgatactccttacaaaactcctggcggaactccatcttggctcggaggatctgctgtttctgaaataccatcatctgatgggaactattcattacctggacaaagtactcgtgactctgataacatgtcattcctttttccaatcaatgaagatgatgaacacccagagatccctggtctcatgagtacacctggaggggtatctagtgtagctactggaactaccggattaggaagcatgtcggctaggacaagggctgttgcacttttctttaaggatcatgcgtcttcaccctcagatgatcagcctggaaaattcagtttgaacaaaattttggaagggaaaacaaggaaacaggctgcaaggatgttctttgagacaacggttctgaagagttataattacattgatgtgcaacaagaggatccatatggagccattgaaattttagttaaacccttgctgtcagctgccaaactgacataagttacttggaatcatctgcaggacctcttgtccatctgcaaaaagatagaatccccaaaggctacctgaatattgtttccgggtgatcctggagaaggggtcaaatgggcgtaaacttctgttaaatgtcggctagggactaagttagcttagtgaatatcagtgcgaatactagtgtgacatcttatacatgtttatgtctattacttttccttttcgtccattaagaaggttttcatgatattctgtaatatgacctgtttggtcgctgcttagcttgcccccttttacctaacttttctgcttaatgttagttctttaattcgagacgactaaccttagccaaagtgtggcccagttagccccgaacccaatagacccctaatccttctgtttggttggcgtgggcagccatgcgacaaattaaagcg

SEQ ID NO: 7553 - DNA, 2037 bp, Zea mays
  misc_feature (1675)..(1679): n is a, c, g, or t
  misc_feature (1686)..(1688): n is a, c, g, or t
  misc_feature (1692)..(1701): n is a, c, g, or t
  misc_feature (1710)..(1710): n is a, c, g, or t
  misc_feature (1712)..(1714): n is a, c, g, or t
  misc_feature (1716)..(1727): n is a, c, g, or t
  misc_feature (1729)..(1729): n is a, c, g, or t
  misc_feature (1734)..(1746): n is a, c, g, or t
  misc_feature (1753)..(1757): n is a, c, g, or t
  misc_feature (1776)..(1812): n is a, c, g, or t
  misc_feature (1814)..(1818): n is a, c, g, or t
  misc_feature (1821)..(1823): n is a, c, g, or t
  misc_feature (1826)..(1829): n is a, c, g, or t
  misc_feature (1833)..(1904): n is a, c, g, or t
  misc_feature (1908)..(1916): n is a, c, g, or t
  misc_feature (1934)..(1936): n is a, c, g, or t
  misc_feature (1951)..(1952): n is a, c, g, or t
  misc_feature (1956)..(1956): n is a, c, g, or t
  misc_feature (1970)..(1972): n is a, c, g, or t
  misc_feature (1983)..(1985): n is a, c, g, or t
  misc_feature (1989)..(1996): n is a, c, g, or t
  misc_feature (2011)..(2015): n is a, c, g, or t
  misc_feature (2022)..(2032): n is a, c, g, or t
  misc_feature (2036)..(2037): n is a, c, g, or t
  Peptide Sequence Number=SeqID_12872
  Probeset Number=SeqID_21956
aaacgaggatgtactaatgttgtggtaaataatatggacgatagtcgataacgtgaccagtggtggtgtggtgtatggtctgtattgattacatgcagcctaactaatttgccagcgagtgatgcggtgacgtgctgctgctgttgtagtaggtggtggagcaagcccagtccccaatcccaccctgccacccaaccttgcttcttctccgatagctatttctctgctttctctccaatcttcccgggtttccctgattaaagatggctgaatcctttgttctcaataccggctcgaggatcccatcggttgggcttggcgtatggcaaatacaacctgacgctgccaacgacgccatctacgctgctgtcaaggctgggtatcggcatattgactgtgcagcagcatacaacaatgaggaggaggtgggcctggctttgaagaaattatttgaagatggtgtggttaagcgtgatgatttgtttatcacctctaagctatgggctgctaatcatgcacctgaagatgtggaagagggaatcgacaccacacttcaagatttgcagcttgactacttggacttgtacctcatccatggtccaatccgcatcaaaaaaggaactagcacgatgacccctgaaaactttctccctacagatatccctgctacatgggcagcgatggagaagttatacgactctggcaaagctcgtgcaatcggcgtgagtaacttctcttgtaagaagctgcatgatttgcttgccgttgcacgagtgcctccagcagtcaaccaggttgagtgtcatccggtttggcagcaagacaagctccggaagctatgccaatccaatggtgttcatctttctgcattctcgcctttaggctcacctggatctccttggatcaatgggccaagtgtcctcaagaaccccattgtggtctctgttgcagacaagttgcagaaaacgcctgcccaggtcgctctacgctggggaatccaaatgggccatagtgtactcccgaaaagcgccaatgagtccaggattaaggagaacattgacatatttggctggtctattcctgaagatttgatggccaagttctctgaaatcaaacaggtcaggctgctgacagctgagtttgtagttcaccctcaggccggctacaatacattggaggacttttgggatggtgaaatataaaagcatacaaatttgttcagaataaaagagccaggcgaggaaacaaccacaaaaaaggggagatcgaatgcataggccccaatacgatgaatttgggggtttacgtgattgctgaacacaagtattgtgtgactaatctgtgttttgatgtggtaaatgtaattgggttagtcacaataagagataagtgtctttgccacaagacttttggttcattggttgaagcatgatgtaaaccgtaaaggatattcatgaaaactaaggacgctatagagcgaaaaaaaaaaaaaaaaatagctgtcactatgatatgaaaaatccgtgtagcaaaatatcactttaacactaatattatattctaaatatagactgaatgctttggtatctattcacagtcgaagatttaactgggaaaatttgattaatcattcactgcccagatgcaactgagaacacaacaagaacacaatttnnnnntggtggnnnatannnnnnnnnnaatttgttntnnnannnnnnnnnnnngnagagnnnnnnnnnnnnnaaaaggnnnnnttgaatgcataggccccannnnnnnnnnnnnnnnnnnnnnnnnnnnnnnnnnnnnannnnngtnnnccnnnnctgnnnnnnnnnnnnnnnnnnnnnnnnnnnnnnnnnnnnnnnnnnnnnnnnnnnnnnnnnnnnnnnnnnnnnnnncggnnnnnnnnncctcaacgccggtaacgnnnccagcatcccctccnngtgnggcgtcagcatccnnnacaccatcagnnnctcnnnnnnnngctccagggtgaacnnnnncctaaannnnnnnnnnngccnn

SEQ ID NO: 7554 - DNA, 1762 bp, Zea mays
  misc_feature (3)..(5): n is a, c, g, or t
  misc_feature (9)..(9): n is a, c, g, or t
  misc_feature (13)..(25): n is a, c, g, or t
  misc_feature (1584)..(1585): n is a, c, g, or t
  misc_feature (1648)..(1649): n is a, c, g, or t
  misc_feature (1698)..(1702): n is a, c, g, or t
  misc_feature (1712)..(1713): n is a, c, g, or t
  misc_feature (1715)..(1715): n is a, c, g, or t
  misc_feature (1720)..(1721): n is a, c, g, or t
  misc_feature (1733)..(1733): n is a, c, g, or t
  misc_feature (1735)..(1740): n is a, c, g, or t
  misc_feature (1742)..(1747): n is a, c, g, or t
  misc_feature (1752)..(1752): n is a, c, g, or t
  misc_feature (1754)..(1756): n is a, c, g, or t
  misc_feature (1758)..(1758): n is a, c, g, or t
  misc_feature (1761)..(1762): n is a, c, g, or t
  Peptide Sequence Number=SeqID_12873
  Probeset Number=SeqID_21957
tcnnncgcnggcnnnnnnnnnnnnncgcgcgccggacgcggccgggtcgaatctccaagcacatcatgcgcccccccgaaaaaaaattccccacgtactagaccaccacccgttggctttctcccctcgcaccggggaacgcggctgccgatccgctcccgatcccctgccctcctccttccagccgactgagattccaccaaatcggcgcccgtgcagtccccgattcgattggcaagcacgattggccgctcctgatcagctacgggacagggctggatttgatttgatcggatccccaattgggtgtccgggtccgcgcgttcgggcgggcgggcgtgcgggcggggggattgctttagggtttcagcgggtgcggtcgctgtgtaggcgggtagggttttgccatggcggagaaaggctgcctgaagcggctccagaaggagtaccatgcgctctgtaaggaaccgccgccgcaggtcgtggctcgcccactgcccaacgacatattggagtggcactatgtacttgaaggaagtaaaggcacaccctttgaaggtggatattactatgggaaactcaaatttccaccggattatccttttaagcctccaagtatcagcatgacaaccccgagcggcagatttgcgccacacaaaagaatatgcttgtcaatgagtgactttcatcctgaatcttggaatccgatgtggtctgttgcaagcattctcactgggcttctgtccttcatgatggacgatgcactgacaactggaagcatcaagacatcagatgcagaaaagaggcgtttagcaaaagcttcccttgtctacaattgtgagagcaaaaactgtccgcacttcaggaaacttttcccagagtatgttgagaagtacaatcaacagctacaattggagaacactgctgcagagccggtgcctcaggagaatcctgcacctgctccatcccctgctgtccagcaagctccgaccgtggccaatagggcacaaccactggcggaggcgcgccgtgacaagaaccagaagaaggcggtgcccttctggatggtgctggtcatgttttcagttttcggggccgtgatggcgttgcccctaatgcaactttgacaataataaagacaataagaacgtgtgatgccagggccgtaattttgtatagttttccattggtttgtctgagtgactcagttggtcccctagactacctaccacctcggagtcgtattgatgaacctgtgatggtatatctgaagaacttttgttctcagttctcactcttgagtagcagcgccagaaggtcgttcgtttttgctttctgtttccgaaatcgtatacttaattttttttgttgcctcccagttcgtctttgtgatgtgtgctgacttcaaggttgagttcgcattttcaccgtatgcacatttaactagcatattacttgaatgtaatgtgtttttggaagccatagtgtacctttagtttttcagctactgtacaatgtacatactcaaattactgctagtcaaatcaatgctctggtaatcagcaaccatttcaacttctgttnncaatatgctatgagatggaataactgaaatgatagtctcgctgttagtacttcagttatgctnntctagtgatccttcactatcgagcagtcaatatgcttcagtttaaattnnnnncatttttttnntntgttnntctgacatgtanannnnnntnnnnnngcatncnnncnggnn

SEQ ID NO: 7555 - DNA, 1778 bp, Zea mays
  misc_feature (1420)..(1422): n is a, c, g, or t
  misc_feature (1427)..(1430): n is a, c, g, or t
  misc_feature (1436)..(1448): n is a, c, g, or t
  misc_feature (1450)..(1452): n is a, c, g, or t
  misc_feature (1454)..(1457): n is a, c, g, or t
  misc_feature (1653)..(1654): n is a, c, g, or t
  misc_feature (1663)..(1664): n is a, c, g, or t
  misc_feature (1668)..(1670): n is a, c, g, or t
  misc_feature (1702)..(1702): n is a, c, g, or t
  misc_feature (1711)..(1716): n is a, c, g, or t
  misc_feature (1720)..(1720): n is a, c, g, or t
  misc_feature (1722)..(1728): n is a, c, g, or t
  misc_feature (1730)..(1730): n is a, c, g, or t
  misc_feature (1739)..(1749): n is a, c, g, or t
  misc_feature (1757)..(1757): n is a, c, g, or t
  misc_feature (1762)..(1763): n is a, c, g, or t
  misc_feature (1765)..(1774): n is a, c, g, or t
  misc_feature (1776)..(1778): n is a, c, g, or t
  Peptide Sequence Number=SeqID_12874
  Probeset Number=SeqID_21958
cccacgcgtccgcccacgcgtccgcccacgcgttctgctgcaaccctgtgttttcttcctttcattaacccccaaactcccagcgaagagcgtgcgagcactccctcgccgcccaccgcgcctcgtggcggcaactgggcggccgtcgctgccgccctacgccaggtgccgaggtgattttccgccccttggctggcgacgagcaccaccagatactctgagcctggctgccgaaacttccttttggggttcttgttacattaggattcatttttgatgacttcatcaagaagcaagagcaggagccacagtcgcagcaggagcaggagccgcagtcctcggcgaagagataggttgcgcagcgaacgtgcaccccgccgcagtcgcagtcgcagcaggagccgcagcccataccgtcgcagagaacggcgtggttacagggattttgcatgcaagaactgccggagacctgggcactttgctaaggagtgtccatctgcgcctatgtgcaataactgtaaccttccaggccactttgcagcagaatgcaccttacaaactgtttgctggaactgcaaagagtctgggcacattgccagtgagtgcaagaacgaggccctatgccacgcctgcaacaagacaggtcacttggcacgtgactgccctacttcaggtgctaacgtcaagctatgcaacaaatgctttaaatcaggccacatcgccgttgactgcaccaacgaacgggcctgcaacaactgccgtcagccagggcacatagctcgggagtgcaagaacgacccggtctgcaacctgtgcaatgtctccggccacgtcgcgcgcgtctgcccaaagacgactctggcttcagtgatacagggcggcccgttccgagatatcctgtgccgcatctgcggtcagccggggcacatcagccgcaactgcatggcgaccatcatctgcgacacatgcggtgggagggggcacatgtcttatgagtgcccttcggcaagaatattcgggctccgcaggctctgaagagcttttcgccaagagctccgctttgttctgatggctgagaattcgccaggatgtttcatttgtttctgacagtattggaacagttttccttctgccgttgtagttgaggaatgattctgtaggatgtgttgcgggtgaaaacttccttttttccccccttttaatcaggatagccctttgtgggctcaaacattgctgtaacggctcgtgtgaaaattgccaggtcatggtttaactcttgtgctcgtgctctgctgtgtcttttgaaaaaaaaaaaaaaaaaaaagcggcccgcttgttttgtgtactcacttatactgtattgtaacgtcacgtagaactgtgaaatttgtatggtgacgttggtggtttgatctggacnnngcgannnncggcannnnnnnnnnnnncnnncnnnnagtaactagactagagcatgtgtccagcgcctaacgcgcttatcctctgttggaatcgatggccctaatggtaacgggacatcatgaggcgtctgcctaaattgacttggtttctgagagagtggagcgggaatagcggatccgctaaaacaagatctttaaaagtgtccagtgcatccaaatctgaacctgcganncctttctanntttnnncttcccactttcgcgctttcgaactactggtnatgtcatcnnnnnncttngnnnnnnncnctttttggnnnnnnnnnnngctgctancctanntnnnnnnnnnncnnn

SEQ ID NO: 7556 - DNA, 2129 bp, Zea mays
  misc_feature (1)..(1): n is a, c, g, or t
  misc_feature (6)..(10): n is a, c, g, or t
  misc_feature (27)..(39): n is a, c, g, or t
  misc_feature (47)..(75): n is a, c, g, or t
  misc_feature (77)..(84): n is a, c, g, or t
  misc_feature (86)..(98): n is a, c, g, or t
  misc_feature (105)..(109): n is a, c, g, or t
  misc_feature (112)..(127): n is a, c, g, or t
  misc_feature (131)..(131): n is a, c, g, or t
  misc_feature (142)..(147): n is a, c, g, or t
  misc_feature (149)..(149): n is a, c, g, or t
  misc_feature (156)..(159): n is a, c, g, or t
  misc_feature (163)..(178): n is a, c, g, or t
  misc_feature (180)..(192): n is a, c, g, or t
  misc_feature (194)..(204): n is a, c, g, or t
  misc_feature (207)..(209): n is a, c, g, or t
  misc_feature (214)..(216): n is a, c, g, or t
  misc_feature (222)..(229): n is a, c, g, or t
  misc_feature (231)..(237): n is a, c, g, or t
  misc_feature (239)..(257): n is a, c, g, or t
  misc_feature (261)..(269): n is a, c, g, or t
  misc_feature (275)..(277): n is a, c, g, or t
  misc_feature (289)..(289): n is a, c, g, or t
  Peptide Sequence Number=SeqID_12875
  Probeset Number=SeqID_21959
nattgnnnnnctcgaggccggccgggnnnnnnnnnnnnnatgatccnnnnnnnnnnnnnnnnnnnnnnnnnnnnntnnnnnnnncnnnnnnnnnnnnntgaaacnnnnnatnnnnnnnnnnnnnnnnagancctgatgcaannnnnnanaggggannnncttnnnnnnnnnnnnnnnngnnnnnnnnnnnnncnnnnnnnnnnnaannngatgnnncttctnnnnnnnncnnnnnnnannnnnnnnnnnnnnnnnnncatnnnnnnnnngagccnnncgtccgccgcancgtccgcccacgcgtccggtttctttcaaacttagcaataccttgggattctattgttacacgatatcagaactgctgggtgaagacactgcgctgtgcaatacaatatggtcacttagagatgcagctcagcagacattcttcaatatcctgaagagtcgtggagagaagttattgcgatatcctccactagttgcagttgatctctctcctccaccagctgtaagagaaggaatttctttgctgcttgagctcatagatacctacaatagcatgatggttcctgcctctggaaaaagaccaaactttgaccctgttatttctgcattattggatccaataattcaggtgtgtgagcaagctgcagaggcacagaagtcaaaaggatcacttgcgcggcgtggtagaacaagctctgatcctagtggaaatagcagggattctatatcagttgatgctattctgtctaagaatttatctacgtcgattctgagtgccgaatcttcatccaaagtctacctcatcaactgcttgtcagctattcaggagccattgatgggccaggaggtcgctacaagctatgtaaacaacctgcgctctatgattgaagcacatatttgtgtccttgtcgataaagaagttgactgcattcttaggaaatgtggactatcaaataagatgccgtacataaaggagtatggtagcaaggctgatgcaaggcctctggcagatattatcgagacgtcgccacaaatgcttatggaatgcttgaaggcattctatggtattgtgactggaacagaaggttccttgcctgaatttgagcaactgcaggttccaaggttacgttcagatgcctgcaatggtttggcaagagctctagcagaatcttatgagctcatttacagcgcagtcatggatccgaataacagttatcctgacccaaggtctttggttaagcactctcctgaacagataagaactatactggaagcctgaggtcttcgcacgatgccttatggtacatgttaagtagaggtctttcgtgcatgaaactttgtcatgtaaatttccgactacaagctgtgggttcaattgattacagaaatatggaagcggtgactctctgaactcatgtatcggtatctagtgtctcgttgtcctatattccttttttctttatgtatcaagttattgtatacttcatgatgtaatttgaggtacaacttaagtgcttaaaagaaaaatataaaagcaagcagaaaacgggcgcgaactccatggtttttacatgcgagacggtggtcgcttccaagatttcgtgcatactgcggggcctaggttacgtcgtgttcctttggattggtttcgcatgcgctctggcagacttccgcagacctacctagcagcgcagctcgctattcatctgcctgatctactacctcaaggagttcaggaacggacacgggggactgggttctgattatgctcccatctgcctgcccaggcacgatatggaatagtttcagctcgaggtggaacgcctgtgcggggagctctagccgaccgagtcccatgcatatgcatgtgtacggtgtacgcatgcacggcaccgaatgaatagtagcccaccaggatacactcataataatacgatgtacaaccgtacgtcgatagtaaaacgtcatggagcacggagaccatactatacgtaatacgtgtgctgttttcctactgtacactgccgtacctgctcgacaaaatacgatggtggtgtgctcacatgttttgtgtaaggtaactctgtaaacgattcatatactacttgcagatttgtaat

SEQ ID NO: 7557 - DNA, 1686 bp, Zea mays
  misc_feature (1)..(1): n is a, c, g, or t
  Peptide Sequence Number=SeqID_12876
  Probeset Number=SeqID_21960
ntcccacgggttacgtcccgggccgcggctagcagtcgtggtggcagcctctccaatcctcgacgcgacgagaaccttccaggttctccatcccacgggttacgtcccgggccgcggctagcagtcgtggtggcagcctgcaatgccggcgcctgtgtcccacctttcctccctctcctcggaccttgcggtgtcgttccattccaccccccgactaaacgccgccgtcaagtttccccctcccccaccatctacagccgccgccgacgcccaccagggctgttgccccagccgccaccagggaggcaccaccgaggagcgcgccaaggtgccggccgcgctcacgcggaggggcctgcccgcctctgctagggccgaggctgaggccggatccacactgacggtcagcgtggcagggacgtgcccgcttgcgcagaggagcagagcgcccgttcaggcgtccgcccgtacgagcgtccgtgcccacgctggcaactgaccgcgtccgagccgggggacggccgcagcgtgcccgccggggcgctcggctgccggggaaagctgcaatccgcaggcccaatccatcctcttttttcaaatttcttttagttaaaattttgtttttcaacaaaaaccagagaaagatcttaatcttgttagggagtttggcttaaaatccacctctacaatgtcaccatcggcctctgcatgctcgattggtgggagcgctacctcttcagtatccttctcccgattgcttctctggcggtcgtgccccccttccccttatcctcctgaaatcagttggctaattcagcgccgggctcagtcccgttgcctttttttactggttttgctttgcaaaatctgagcaagctgtgaggattgggatgtatcgaatctatatatctgtcactatcagtgcccattcccttaacgcgctgttggaccgctgatttgcatcactgcgtatatcgggctgcttcagccccactctgatgatatgtcccgagttgtggaccaactcttaaagttgttcgccacctttagaggtttctgtctcgttaaagtagatttggaattatctggtgtattaatgtgttcacttgcctgttcgggcttgttatggtcgctcattcgagtgttagagcattcgggcggcttaataatcttaattcagtgactatgctgtcgatattccgaccgtccgtttatctgatcaccgtttaaacactattccctagtactcaacagagcgtaccgcgtttccttctcctcccagtcccatgcatgttctttttcaaacctgctttggccgtaacgatgctggtttcctcgtgctgttgaaagcatcccattcctccttgggtgctggggcaaactagagtatgatccccgtgaatccgacaatcattgcccccccttattggtgctttgattataatttggcgcccgtccgatccttttcgcgtttcgtctttattattcggctcgttgattcgttttcacgggcgttgttattttcttcaaaacgttgggggctctgagccccctccagtcgtaagattttggagagtccgcacgctggttcattccgtcattacagcgcccttttcacgtttgctaccctaccattcttttttaggaaaggtagcgcccggttacggacgactgctccttcgtgcc

SEQ ID NO: 7558 - DNA, 2925 bp, Zea mays
  misc_feature (3)..(9): n is a, c, g, or t
  misc_feature (18)..(20): n is a, c, g, or t
  misc_feature (25)..(29): n is a, c, g, or t
  misc_feature (32)..(38): n is a, c, g, or t
  misc_feature (43)..(44): n is a, c, g, or t
  misc_feature (49)..(53): n is a, c, g, or t
  misc_feature (57)..(60): n is a, c, g, or t
  misc_feature (62)..(64): n is a, c, g, or t
  misc_feature (69)..(73): n is a, c, g, or t
  misc_feature (75)..(77): n is a, c, g, or t
  misc_feature (79)..(80): n is a, c, g, or t
  misc_feature (98)..(99): n is a, c, g, or t
  misc_feature (105)..(107): n is a, c, g, or t
  misc_feature (111)..(112): n is a, c, g, or t
  misc_feature (117)..(123): n is a, c, g, or t
  misc_feature (131)..(135): n is a, c, g, or t
  misc_feature (138)..(140): n is a, c, g, or t
  misc_feature (142)..(144): n is a, c, g, or t
  misc_feature (154)..(155): n is a, c, g, or t
  misc_feature (158)..(163): n is a, c, g, or t
  misc_feature (165)..(172): n is a, c, g, or t
  misc_feature (183)..(185): n is a, c, g, or t
  misc_feature (207)..(212): n is a, c, g, or t
  misc_feature (233)..(235): n is a, c, g, or t
  misc_feature (250)..(252): n is a, c, g, or t
  misc_feature (2632)..(2646): n is a, c, g, or t
  misc_feature (2649)..(2925): n is a, c, g, or t
  Probeset Number=SeqID_21961
cgnnnnnnncggaagccnnnggcgnnnnntcnnnnnnncaganngcgannnnntggnnnngnnntcttnnnnngnnncnnatcgtgtgggattgagcnnagatcnnngtcnncttcnnnnnnncgctgggnnnnncgnnngnnnaggaaagcanntannnnnncnnnnnnnncgcgtccggtnnntactattagcgattggttgtcnnnnnnggtgtcgggtgtccaatgttnnntttttttacaggagnnntacggaaggatcggcattgaggcaggcgtccggagatggaccgtcggagctggctgtggcggcgcaagtcgacggacaagagccccgcagagacggagacctcggcgtcctcggcgtccgagaggatcactgatgaacaggatactgccaagagctccccaaactcgactcagtcgccggaggtcacatcgaaggaactggaggacggtaacgatgtgaaggtgaaggtattgagtgagaggctctcatccgtagttctggatatccgtgcgaaggatgatctcgtgaagcagcattccaaggttgcagaggaggctgttctaggatgggagaaggccgagacagagatcgcgtcactgaaggcgcagttgaacgctgcggcggccaagaactctgcgctggaggaccgcctcgtccacctggacggcgccctcaaggaatgcgtccggcagctccggtgcgccaaggacgagcaggaccagacggtgcagggcgcgctggcacagcaagcgcggcagtgggagtcgcacaaggccgacctcgaccagttcaggatcgacaggagcggcgcgagcagcagggccgccagcctcgcgaccgcggacatcggcgtgatggacgacttcctcgagatggagaagctcgcctctgcgtcgaaaggcgacgccgtcgaggacgcgagcgggcaggtgctcaggctcgaggagaaggtcaagaagctggcagccgagaaggccgagcgggagaaggcgctgcacgaggctcagcgcgagatgaggacttcccgccagcgggtaatggtggcagaggagagatcagctgagctacagcggcagctgaaccttgccaatggcgagaaacatgccatgggggccgaggtgaaagcggctgaggcgaagagaggagagctggagggccagctcgagctcgcccacgccgagatcgcggggttgctggacaaggggcgcatcctggaggaacgtctcgagtctgagaaggcgctgacacttgagctcgcagccaagtaccaggacatggaggcgctgagggcagagaagagggagctgagcgctcagctggagacgtcacggtccgaagccaagaagctcggtgacaagatcgccctgatggagaggaagctggaggtggagaaggccttgtcgatccgactggcgacgaaatgccatggcattgatgctctggaagcaaagaagaagggcgtcgagctcgagctggagacggcgcgcgaggaaatcgcttcgctgcaaaacaaggctagcagcttggaactgcgacgagtcgaggaagagaaagcgtcgtctgctgcactcgcactgcggtgccaagaactggatgagcttagatcccagctggagtcttcgaattcacggatcgttgagctgaatgagaaggttaaaacgctcgaggatgtagtcgaggaacagaggtcagtgacggtggaattggagtctcagctccggtcgaggcgcgctgaaatcagtagcctgaaggaggatataagcctgttgcagaagaagctggagagccagaagaacctgtcatcagcttacatatctgcacttggtgcttctgaaaccgagaagaaggagctggctagtcggtttgagctcggagagaaagaagccgaggaattacgtgggaagatgagcttgcttgaggaacagatccgtaaagagagggcacggtcatccgagtttgcggtaaaatgtcagaagatggaggaacagatctcctgcagatctcttcttggccaccaaccagtgaaatcatctgcggcgataaaagatcttcagctcagaaaggagacagagctggccaaggctgccgggaaactggccgactgccagaagacgatagcttcactgagcagccagctgaaatcgttggccgatttcgacgagttcctccctgaaaccgagactagtggcgccgactcagccgacgcctgggacggcgacctgaagctgctccaccctgcaagctatcccacgcagattggctgtttggcagtcacatgagtcacgatcctcgttggcaggtgggcggagaaactgtttttgttcgggttccgccgcatgattgctgtggtgagattgccatgatcttccaccacatgccatatagagttaagtttataatagtctataggtgagaaaatgttcatatgaaagctgtttatagagttgtttggtgaagcctcaaaggaactcatattgaatattatctttgatcttccattcttcctgtcccttggaaccggcctgtaaccaccagcatgtgttccaccttgattgtctcggctattttatattctgcaggagttcattgtgcaatgaaatgaatggaatattcagttggnnnnnnnnnnnnnnnggnnnnnnnnnnnnnnnnnnnnnnnnnnnnnnnnnnnnnnnnnnnnnnnnnnnnnnnnnnnnnnnnnnnnnnnnnnnnnnnnnnnnnnnnnnnnnnnnnnnnnnnnnnnnnnnnnnnnnnnnnnnnnnnnnnnnnnnnnnnnnnnnnnnnnnnnnnnnnnnnnnnnnnnnnnnnnnnnnnnnnnnnnnnnnnnnnnnnnnnnnnnnnnnnnnnnnnnnnnnnnnnnnnnnnnnnnnnnnnnnnnnnnnnnnnnnnnnnnnnnnnnnnnnnnnnnnnnnn

SEQ ID NO: 7559 - DNA, 2492 bp, Zea mays
  misc_feature (1769)..(1772): n is a, c, g, or t
  misc_feature (1780)..(1781): n is a, c, g, or t
  misc_feature (2413)..(2433): n is a, c, g, or t
  misc_feature (2435)..(2437): n is a, c, g, or t
  misc_feature (2439)..(2443): n is a, c, g, or t
  misc_feature (2448)..(2448): n is a, c, g, or t
  misc_feature (2453)..(2453): n is a, c, g, or t
  misc_feature (2456)..(2461): n is a, c, g, or t
  misc_feature (2464)..(2472): n is a, c, g, or t
  misc_feature (2479)..(2492): n is a, c, g, or t
  Peptide Sequence Number=SeqID_12877
  Probeset Number=SeqID_21962
cacattcttctccaagccccagcagcagatctcttgagagtaatcaatctaccccaatgagtggccatcatcattcatccatcagagctcagcagaataggctcacagataaacaccatgggagggccagatgtccacctagcccaaattctgcagtactgagcttattgtcaggtcatggcacacatccctgtccagagaacggtcataattatgttgggttgggtctcagcaatgtttctttagcctcagactctctaggttcttcctctagaagttgtagaagacatgaaatagttggagatgaagagactagatggaagattgaagatgttgtccatcattgttctcgtaggctttttacagacagtgataacattgggaaacatttcttcacatcaaataacaaagattccatgtgtaatgatcctgaacagagcagtggcttggattgtgaaaattttgagtcactaatatctgatgctgtgatggatacagctagaaatggcagtaggtcacctgattgtttcttggaggatattgagacatcccgtgaatttcctcgaatcccatattcatgtccacttcccatcatagattcagcagctaaagagattggcaccactagtactgaggctggagataattttattggtacagctgcaaaagtaagtaagaattctagcctaaaccaatctgccctgaatgccactgagaatcctccccgatattctgcaaagtttagtgataggatgcctgatcgccatcaaggttctgtgatgaatcgagtgagccgcagctctagcctcaaggagtcaccacatgctcgacaacccaatgtagttcctcctgttgataagacaggagatcggtcatcacccaacagcaaaggtaggcgaagcccattgaggaggatgttagatccaatattaaagccaagacattctagtccaatacgaccttcatttgttccaaaatgtcatcttccagtcaataccaccaagcaatctctggacttagggggatcagtgccacagaatatgcagcgaaggtcagttgatttggtagtcaattcgaattatcgaattgaagcaaatacaaatcagccacctcgtgtgctattgaacagtgcaagatacatccagaaagaaaaggattcaacaacaacaagacaagcatttctgcagctagcatggaagaatggcttgcctttattcatgctgtcttatggcgattctgatatcctggcagccactgttagaaggaagggcatctctgaaaaggatgatctggaaagcacatatgctgtattcactgttgaagaacctaagaaaaaaagtggagcttggatcaaggcagggggcaagaacaagaaacaccaccttttgtctagcatagttggggaaataaaggttgcacgtcgaaaatcaagatgtcaccatacagcagatgttcatgtatacagggaatttgtgttgcttggttccggatttctaccatcatctgaagaatcgggtgattcacatgttagtggagagtttgcggcttttattagtgcacttcctcagcaagaagcagaaacttcgaatcaatcatcttcacagaataccagacaaaaaaatttagcaccaactggctgtggttgccccccactgggaaacttccagcctagttctgcttcagccaatgttattgcagtacttcctgatggcttccatggcaaatcaacgtctgggcagccgttgcctttgattgagagccaggcaaannnnagccagcnnttgaacttctagctcagggtcacgaccgagaagataggcatgccttcagtatgacttcattcaaagaggggctttatacagtggaattcagatcatccattgcattacttcaagcttttgcaatgtgtatagtgatgctacatgggaggtaccctgacaggctgcaagttggttcgcaagcagcgcaggagcatgacctccttgctggtcatgaggtcaaggccatggtagccagtcaaggaagagctccgaccagctatgtgccccaccgtccacctctttctcctgtgggccgagcctagcttatcgcgattaaatgtatgttctttctgtgtctgtgtcctctttctccttcagtcgcgtagtgctggtgggattgatataccatggtcctcaggcccatatgcaatacgcatattgaaagtgacaatctcagaacaatcaatcggctttagaggtagctacctgtacatgttgtgatgttgatgttgtatgactgtactatgatgcggctgcaaggcccatctcggtgattactcacccgttatatgttctcttatcagttgcttctgtatatgttgaaatatgtgattactgattcgtcacccgttatgtgttctctctgcgtgtgnnnnnnnnnnnnnnnnnnnnngnnnannnnnccttncgggnatnnnnnnccnnnnnnnnnttttttnnnnnnnnnnnnnn

SEQ ID NO: 7560 - DNA, 1788 bp, Zea mays
  misc_feature (1)..(25): n is a, c, g, or t
  misc_feature (688)..(688): n is a, c, g, or t
  Peptide Sequence Number=SeqID_12878
  Probeset Number=SeqID_21963
nnnnnnnnnnnnnnnnnnnnnnnnngactttgcctttttttcttgaaagcgtcgtcgcacatgtacagcagctgccgggtgacctatgtcctcggcgtccgctccacgatcacttgctggattttctggaagaccagccacgccgcgtccgcgctctccataatcccagaaacccatccgctctctagatatgagagcgtgacccattcgctctacagaattgccgcgtgacccattcgctctacagaattgccgccccagcctcctctcgatccacgtgatccacgtctgcgctgtccagggaatgcgaccgtccgcgctgacgccctagatcgtcgccccagcctccatggaaggggatatgcacgccccagcctctatggaaggggagggtccgatgccccgggtctgcgtcccagcctccatggaaggcgcggatctgcagtttccatcgacgacaccctagccccttcaatccgctaaccttccatggacagcgcggatctgcagtttccatcgacggcatcatcgggtatacgcctataaaatgccaagcgtgtacgcccctacaacccatagacgcttatcggcgcacacaaataatctactactgccaggttatgcatggtgcttttggagttcggttacatgccggaaagcaggcagaggtgctgaatcaaattgtctntgagctgccagagtaacacccattatcagagacaaagccactgcgtgaaatccttggacatactgttcctcaggtcatggccggttgcatccttggaatcctcatggctgtcgttatgcttttggctctcgggaggtcttagtcaagtgttgttcacctaatatctcgctggtgatggctacaaagcataaaaacatgatctccccatggttctggctgtccaagtgttcgatagtacaaagttctaaccgaatttagatctggactgtaggttttaggttgtagctcgagttggttgctgtaaatctgaaagggtcactttcaattccaaccacggtgtaatggaagctttgttatacaatcagcagcggtaagatcattttgcggatcagtatggtcgataccatgccgtcgcatttgctttatactcctttaattgaaaactgcgagtcattttggctcttccagacatgttgtttttgctacgtatttaaaagcaatgtatttgaatatacattatatctagatatatagttagactcatgcatttagaaaaggccaaccattgaaatggagggggtaagcggttcattgcccccttgagttgcgggatgatgccattgttgtttagtttccagtgatccatgatagctccagtttccaaacaacccttgtttgatatttctggtgaacttatgatttgagatccaccatgatttctaatttccatgtaacgaattggtggcccccatctcaccactctttatattcaatctgcagaactatcagaaactgcatagcttgaaatttttagccatgttctgtcccctatcgtcttcctcaagttgaagaaatcgactggttctcctccccctgatctagcccttcttgaaagtattgctgacaaggtaagttcgaatcaatttctaataatagtccaacacatttgtatataaaatgttcccgttgcaacgcacgggcactcccctagtatcaataataagacctttcctaagggattcatattgtaattttccttggcaccagttacctttattggtatttttctttggtggtgcaaaaaaaaaaaaaaaaaaaaa

SEQ ID NO: 7561 - DNA, 3603 bp, Zea mays
  misc_feature (1)..(1): n is a, c, g, or t
  Peptide Sequence Number=SeqID_12879
  Probeset Number=SeqID_21964
ncgcggtgctctccccagctcaggtcggccgagcgctcagccgtccctcctctatctaccctctgcgcgcttcatctccctggccagagcttccctgcacgcgcgcctgctcccatgccgcgcgcccctcccctgctcactcctcttcttctcccacgcgcataggctcctccatttgcgcatctccctacgtccggccgagttctccacaccgtgctccactgctcggccaaccactgcccaagtccggccagccgaagtgctccatctcccagccaagctccgtgcacgcgcattctccctgcgcccagccgctcctctacttccctctctactcgccgtggagcttcctctgccggcgctctcttcctctcatttatctgtggctcgccggcgtcgagtccctgctcatcttcctccacgtgacgcgcgcccacccgagcagctccctggcgcgcgcccagatctttttcctccctgtgcccctctctctggctgctctctgcgccggatctccttctctggtgctcaccgactccttggctcaccccctcatctcgccgctcaccgagctccttgcgcgccatggccgccttgcttgctccctggccggcgtttggcttcaggctcgcccacgatgcccggcgtcctgcctgctctgctcgccgcgcccatgtcgagctcccctgcgcgctggtcgccgagtcctctccctgcttttcccctggtcgtcgcatcgctgtgcgcagcggaagcgtggtgggttttggtcgcgggcatggtcgtgcgacgcgggatctgggcatgccgttgtggactccccattgatgcgcctcctgtcctaactggaccatcctagcctgcgcacgtcatcgaatcgtcggattccatcccccatggcgcttccatttcctcgccattccacgtcgccagcttcgttccagttcactggccatctttctctccacgtcgtagttctgttaagggaaacgatgttgcttgagtagtggttaggatgtgtgtggagatgagcttgaagatgggactgtggatagggaagacagtgaagttccgtatgtcactcatcagatgttcgacgaaaaccccgaaccaaaaaaaatcatcggcgttcttgcaaatttgaaccgggtatagttcgggagaagtctaaggatgttaattggtaaagaagcgaggcccgtgtgcatcgctcatcaagtgctcggtcgaagacatcaatcgaaggtcgtcatcattcgtgtgatgatcgagtcaaattgcaatatggtgagttgattcgctatttctattattagttcgatgattggattagctagatttattactcgtgatgattctcgtgtttagcaggtgtgctgtgtgatgagctctatattcttactattttaggtacgataattaatcgtgtgatgcggaagacgacccaagtcgaccccaagatgatgtaacggctggattaatttcaaggtaatgcggatgatgatcctgaagatggatgacccgaacaagtgtcagaccaaaagctaatcgtcaagtgatcgacgtctaacaacactaacgtagtgttatccaggttacgagtcactttgattgtgattggtgttaagcgctggtgggcacgaccttcttataagtctaagtacttcttctatacttcttattgaggactgtcactgagccagcatatatttcaaacttataaataatttataacagttcaaagtttattctttgaaccacttttgtaaccactccgataaatataatgtaaatttgttgtaacttgtaaaatttggtaataagatttccgctgcaaattgttggtgtgtgatttgtgtttacttaatcctgtggtcctagttgtaagtggtttatccggggtccatgggacactcgaacatatcctcttaagttatctggtgcacatgcatagccatctgaggtctttgagacaagggcaggtgcatatgggcccaattacttgggaggttctgccacacgatccacatggatcactcagggggctgcatttaacggatgcgctcgcgcgcaccggaagtcctgaacaacaacaaagtacagaattgcaacaggctagtgctctaagcgcgtcgaccatcgtaggaagggtccgctcctaaactgcactcccgccgagtggaccccatgcgacccacatggtttactcaggggcatggggacaacatccaacagcagcgcttgcgcgcacccaagatcccaaccacaggaggaagccaagaaattatggacccacgatcagcgcatggcgacaatcgcaggaggggtctgtccccaaactactccgtcactgagcaaaccccaacaatccttatggatcactcgggggctcaggggctacttctagcagatgcacttgcatgcaactaagcgtatagggcaccgagcataagcctccgtgcaactccaaggattcgcccaatggctcgggggctgttgtcggatacctaggaatggggtacccaaggtaaggcccataacctctttccggcccatttgtcgagcaagtctgcgaggctgacgaccaagtatccgtaaagcaagtccacgagacggagcggacgaccaagaccccacctagcaagtccccgaggcatggcgcacgacggtgttcccaccgcgtgggcccacaaggaaggaaccacgtcctgacgctgctggcccacgaaggctacgacgggagacaccatacttaggcgacacccgggcaaatgtgcggcgcaccaaagtctagccgagcggtcgccatcagaacatgaactgtgcgcccctgcatacagacttaggcacgccatctctgtgttgttctgcccctcaagcccagcagtagattgaactcagtaccaaaattccaacaatgacccaaacacctgggaggtcattagttgtatcatgctaataccccataccatcacagctttacgacaaaagtcatacaccgaaaatggcctttgcttatacaagatatattggttcattcgacttggttgtcatgattattgggataaaaatgagagtgcaacttatcatagggccatgaatttgcttttaaagtagatattaggagccattttcgaggtctacttgtgggggccttcgtcttccgaaggtcctcaaaaacatgattaacaatgtttcccaagtgtaatatatgtacaggaacctcctgacttggaatgaagctgtacacgatatgaaaagcgtggtccggatgaaggttgaaccagctccgaagctacgcgcagggaagcttcggattagcagcggaaaaaggagccgacttaaagaggaaaaggctgtctagtccttgatagattgtccctaagtcaatatcaaatatgaaggacatgaatgtaattttacacaggctacgtcttgtgcctataaatagatgaacagtaacctcgtactgttcacgctgacttgtattcactcgcacgtcacgcttggattttcgccttctgtcaagccgaatgtacaaatgtaattcaatattgttcatattcattcatgatgatataaaaaagatatattagtaatgtc

SEQ ID NO: 7562 - DNA, 3150 bp, Zea mays
  misc_feature (1)..(1): n is a, c, g, or t
  misc_feature (121)..(129): n is a, c, g, or t
  misc_feature (136)..(140): n is a, c, g, or t
  misc_feature (148)..(165): n is a, c, g, or t
  misc_feature (184)..(190): n is a, c, g, or t
  misc_feature (354)..(358): n is a, c, g, or t
  misc_feature (384)..(384): n is a, c, g, or t
  misc_feature (393)..(395): n is a, c, g, or t
  misc_feature (2858)..(2863): n is a, c, g, or t
  misc_feature (2909)..(2916): n is a, c, g, or t
  misc_feature (2920)..(2920): n is a, c, g, or t
  misc_feature (2930)..(2931): n is a, c, g, or t
  misc_feature (2933)..(2935): n is a, c, g, or t
  misc_feature (2937)..(2948): n is a, c, g, or t
  misc_feature (2950)..(2950): n is a, c, g, or t
  misc_feature (2956)..(2958): n is a, c, g, or t
  misc_feature (2964)..(2967): n is a, c, g, or t
  misc_feature (2997)..(2998): n is a, c, g, or t
  misc_feature (3003)..(3004): n is a, c, g, or t
  misc_feature (3009)..(3009): n is a, c, g, or t
  misc_feature (3020)..(3021): n is a, c, g, or t
  misc_feature (3103)..(3104): n is a, c, g, or t
  misc_feature (3136)..(3136): n is a, c, g, or t
  misc_feature (3138)..(3138): n is a, c, g, or t
  Peptide Sequence Number=SeqID_12880
  Probeset Number=SeqID_21965
ncactatcgaagagctatgacgtcgcatgcacgcgtacgtaagctcggaattcggctcgagcccaaatctaccttatcatattataagcgcgcgtagccttggcaggtcgacgcatcttcnnnnnnnnncaacgcnnnnncacgcccnnnnnnnnnnnnnnnnnnccccgccgccgcccgccgnnnnnnnccccaccgcccacgaaatcttcttccggaagacgcgcgagccccgccggagacgagaggcatggacgccaagtcggtgacgccgggcgccgtggccctcatcctcgccaaccccacgccggcgtcgcccgacgacgtgccggagatcgtcgtgcaggtcgtcgnnnnnagcccatcgcccgcttcactttcatntgcctcggnnnaaaacgcgcaaaacctcgagcgccgctcgcctcccgccatttccttcccaaatctaccttatcatattataagcgcgcgtagccttggcaggtcgacgcatcttcgcctccgctcaacgctcgcccacgcccccagcccccaaccgatccacgagaaaccttctcgcctccgcgggacgattcgccagggagagcaaaggtagcagagccgccatggacgctgccaagttggtgacgccgggcgccgtgtcctacatcctggcgcacccgtctacgggctccgatggcgccgtgtcggatctcgtcgttcaggtcctcgatctcaagtccatcggcatgggcagccggttcagtttcacggcaaccgatgggaacgacaaaatcaaggcgatgctccccacttactttgcgtcggaggtccactccggcaatctgaagaatttcggtctcatccgcatcctcgactacacttgcaactccgtcaaaggcaacgctgacaaagtcctgattgtcgtcaaatgcgagactgtgtgcgaagcgctcgacgccgagatcaacggcgaggccaagaaagaggatcctccaattgtgctgaagcctaaagacgaaggctcagtcgtggctgaggaaacaaattctcccccactcgtgatgaagcctaagcaagaggtgaagtccgcgtcccagatcgtgactgagcagcgtggaaatgctgctcctgccacgcgcctttccatgacaaggagggtccatcccttgatcactctgaacccctaccagggtaactgggtcattaaggtgcgggtcacgagcaaaggcaatctgagaacctacaggaatgctcgtggagaaggctgcgtcttcaacgtagaacttactgatgaggatggcacccagatccaggccaccatgtttaacgaggctgcaaagaagttctatccaatttttgagctgggaaaggtctattatgtctcaaaaggatctcttagaattgccaacaagcagttcaagacagtcaaaaatgactatgagttgtcactaaacgagaatgctattgttgaagaagcagagggggagactttccttccaccagtgcaatacaaccttgtcaagattgatcagctaggaccatacgtcggtggcagggagcttgtagatattgttggtgtggttcagagcgtatctcccacactcagtgttaggagaaagattgacaacgagacaataccgaagcgtgatattgttgtagcagatgactctggcaaaactgttactatttctctctggaatgatcttgctactacgactggccaagagcttttggacatggttgacagttcgcctgttgttgcgataaagagcctaaaagtatctgacttccaaggcgtgtctctttcaactattggcagaagtactctcgagattaatcctgacctgcctgaggctaagaatctgaagtcctggtatgactctgaaggcaaagatacttcactggcaccaatcagtgcagaagtgggtgccacacgcgctggtggtttcaagtccatgtattctgatagagtttttctgtctcacatcaccagtgatcctgctatgggccaggaaaagcctgttttcttcagtctgtatgccatcataagccacatcaagcctgatcagaatatgtggtaccgtgcttgcacgacctgtaacaagaaggtgactgaagcttttgggtctggatactggtgcgaggggtgccaaaagaattactctgagtgctcgctgagatacatcatggtgatcaagctctccgatcccactggcgaggcttgggtgtctgtgttcaatgagcatgcagagaagatcattggctgcagcgccgacgagcttgatcggatcaggaaagaggagggggacgacagctacgttctcaagctcaaggaagccacctgggttcctcacctgttccgtgtcagcgtcacgcagcatgaatacatgaacgagaagaggcagagaatcaccgtgaggggtgaagcaccggtcgacttcgcagctgagtccaagtacttgcttgaagagatcgcgaagctcaccgcttgctagaagacgcagtctttctggtggttcttgaaggactggcccccgatgtctccctcgcagtttttcttttgagctccagtaacttgattactgttctgtgtgttgctctcactgggttttagcacttctgtaaggtatatgtagatgctagattaccttggtgtcaaggaacagatgctatgataagccttgcaaaattgcagttccaattccgtgtatctgcaactttgagcaaataggaaaagattgagtattgccagctttatagctctctaccaggagtcggaaggtgtttggtttttagtgactactgtttagtccctgtattttattctattttagtattttaaaaaaaaaaaaaaaaaaaaaaaaaaaaaaaannnnnnaaaaaaaaaaaaaagggcggccgccgactagtgagctcgtcgaccnnnnnnnntgcngaccggtcanngnnncnnnnnnnnnnnnangtatcnnnagtcannnntattaaccattccctgctctaatagtcatnnatcannagtcngatgtatttanncattccctgcttaatagctctctaccaggagtcggaagtttttaaccattccctgctttaagacaagataaattgctcgatnnacatcgttgtgccacgtattcagtcttttccncnacatgtatcccg

SEQ ID NO: 7563 - DNA, 3025 bp, Zea mays
  misc_feature (3025)..(3025): n is a, c, g, or t
  Peptide Sequence Number=SeqID_12881
  Probeset Number=SeqID_21966
ggcagagaaaaggaagtgcaacccgtctccgtcgtcgtcctattcatcgattcggtgggttcttatcgaggaaggcgaaactcaacatccaaagagcagcagcaatgttccagttcaaagttcaagtgcgtcgaagatcgttctggagaaaacattgagcaaatgcacgaccgagaacagcagcctttccatcgaatcgtcaagcgattcgtcttcctcctatccgtgcacgtccttctcctccctcgatggcaacaaatcagtccaacaggagcttccttacaccagcgaggagctctttgcgcagaggccactgaagagctcgccgagtctgagggaacctgacatgaacgccaagtctggccatcctaatgtgggtttcagagacatagtgaaggactgcatcaaccgggactccgtaggcctgacagtaaaaacttcggtgcaggaggcaaggagaaatgggcagcacaaggactcaccgaggccactgctgctgtccaaatcaatggatgggacctgtatcattgggatcgataggaccacaaaggttcctgcaaatgtcaatggatctagaaggtgtttgcaggaacagtcacgcttttcttgtgatgaccgaagactcctgcggccagctgaaacccaggaatgcaagaggccttcctcgaggctaaaagagcttcctagattgtccttggacagtagaaaggagtctctgagtccaggctcacgtcagaagaacctcagttacaagagaacggatgatattcttaagaatactttgaggcctcaagattcccccagcaacaggagagctaacagtgtcattgccaagctgatggggttggaagaagcaacaaatggtctcagtactgaaaaccaagccttccccacgaattctcacagaagcagctccttggaggcagcaggaaagaagtgccaccaatatctgtcgagaagctgaagggaggccaagaattgcatctgtctatgctgatatagagagaagggttgggggcttcgactttttagagtgtaataacaaggacttcagggctctcagaatattgggtgcattgaacgcgaaagatgccaagagcaagaatgacagcagtggcggatctgtggctattcacaggacagggtatgatctaaccacctctggaagttttcaggctcctattgtggtcatgaagcctgcaagaaccactgagaaacatggggtttcacttgcttctgttgcccccatagcaggcctaagaagccttagaaagttgccagctagatattcatctttcactggcacaaatgagaccagcacaaatgagaatattcatcttcggatgtcaagagctcaattgaagtctgaagaaactgtcagcagtgccaactcgccaaggcctacaagctcatcaagtcccagaaatgtgctaaagaatgcagagcctgaaaggagatcccgtccacctgtttcaccaaaatctccaagcaagaagtccaatgaagccgtctccccaaaaggaagaacaagatcgaagccttctcaggtgaaatgccaccgtgatgaggtcttgcagatcacagggaacagaataagcttggcaaaacaggttgatgtcagcattatagattgtccaaagcctttgggtggcaactcaaccttcgttccaccaagcaatgctgctgcaacagcaagtcaaaaggctccttcaattctggattcagaccaaaacattcattcactggacaacattccaagccctgtctctgtccttgatacatccttctatcataaaaggatctcagattcattcaaagatggtgagacacattcttcagaggaatgctggaacccaaacagcttgcctgacacgccacagtcaaaggcgaacagtgaagtcaaccagattaaaccagaaaatctggaagttctgatccagaagctcgagcaactgcaatccatgagcgaagaagacgcaagtatcaaagaagtcatggcgtcagtcgctgcaaataaagatcaccagtatatctacgagataatgttggcatctggtcttctgcacaaagaacatagtgtcacagcactacctggccaactccaaccatcaaactacccaatcaatccggagctcttcctcatccttgagcaaacaagaccagtctcagtttccgcattccaaactgtcagtggagctaagaaaagctgtaagccttgcgcagggaagcttcaccgaagacttgtgttcgacctggtaaacgaaacaatagctcaaaagatgatcatctgcagatctggaagccagccagtaaagtttcttcaatcaaggaagttaagtgggtggcaactattcaaggatttgtgcactgaggttgacaggcaaataaaatgccccgaggaggaggagaatggaaacatgatatcagatgaggatacagtcaatggaacgaaagactggatgagcttcgacactatgctacatggcatggtttgggagattgaacgatccatcttcaagggtcttatcgacgaggttatcggcggtgagactatagagaagatgcaatttgggcaaaggaaactgcagaggcagctttctttcagtagtataaactgaatatgcgtagcagtcatttccatggagaagcttataacaattagtaaatgtgacagtttctatttttttctatgaagactaaactgtacaagtataaatgatcctcaacactagtcttgctgcctgactattgcaattcgagagttgtgcgacatgactactgtttgacactactaccggtcaaggcgattgaagtgcacagtaccccgtgtgtgcatggtggatccataatatcaagtgtttataggaatgtcgggtagttgagaacttgagataaagttctcgttttttttcatttattgttacggacgatgttgcggtcaaaatacgtcactgtaggcggcagatgtaccaagcactatattgtccatgcggctacaacggctactgactgtgtcgtactcaan

SEQ ID NO: 7564 - DNA, 1333 bp, Zea mays
  misc_feature (1)..(10): n is a, c, g, or t
  misc_feature (12)..(15): n is a, c, g, or t
  misc_feature (47)..(49): n is a, c, g, or t
  misc_feature (57)..(59): n is a, c, g, or t
  misc_feature (429)..(429): n is a, c, g, or t
  misc_feature (431)..(433): n is a, c, g, or t
  misc_feature (1333)..(1333): n is a, c, g, or t
  Peptide Sequence Number=SeqID_12882
  Probeset Number=SeqID_21967
nnnnnnnnnnannnnttgccatatatttgtccttgccttggcgccannntctctcgnnngccggttgccggtccggggccggtttttgaaggatttggcgcctaaggaggtggtgtttttcgcggacgacgagatcctggtgctcggattctccaaggacctggtgctcggtgagggcgtgctcagtatgaagttcaacggcacgctcaacgaccagatgagggggttctaccggagcaagtaccagtataagggaaagatgaagaatatggcagtgacacaatttgagtctgtggatgctcggcggtgcttcccatgctgggatgagcctgcattcaaggctaagttcaagctaacacttgaagtaaatgttgggatggtggcattgtccaatatgccaatagctaatcagacagttgctggtcctancnnnactgttcactatgtggatccgcctcttatgtctacttatttagtggctatagttattggtttgtttgaatatatagagggtgtaacaccagaaggcacaaaagttcgtgtatacactcaagttggcaagagtagccaagggaagtttgcactagatgttggaatcaaatcattgcatctttataaagattactttggtactccttatccgcttcccaaattggatatggttgctatccctgattttgctgctggagccatggagaactatgggcttgttactttccgcgaagtggctttgctttttgatgaggagtcttcaatggaatccagcaaacagagtattgcaattactgtagcacatgagctggctcatcagtggtttggcaatcttgtaaccatggagtggtggacccacttgtggctaaatgaaggttttgctacatggatgagtaatctagctgtaaattctttctttccgcaatggaatatctggacacaatttcttgatgacacaaccgctggtctcaaattggattcacttgaagagtctcaccctattgaggttgaaatacatcatgccactgaagttgatgaaatctttgatgccataagctacgataagggtgcttctgttattcgcatgctacataattaccttggtgcagagcgttttcagaaagcgttggcttcatatataagaaaatttgcctactcaaatgctaaaaccgaggacctttgggctgttcttgaagagaattctggtgaacctatcaagaatatgatgactacatggacaaagcaacaagggtaccctgttattaatgcaaagcttcaagggaattatctggaacttgaacaggcacagtttttgttagatgggtcctctggccccagaatn

SEQ ID NO: 7565 - DNA, 1307 bp, Zea mays
  misc_feature (1)..(2): n is a, c, g, or t
  Peptide Sequence Number=SeqID_12883
  Probeset Number=SeqID_21968
nnaagaacattgtaagttgtaaccctagcttctcatgtctccgcgcctccacctccagtctccagccccaaggagtggcggcggcgcatcgtcagttagcttcgtcaccgttagagcccgaaggactctccctcggccctcgccgcctcgccggctcactgtcattggctgcatccgaagccggcagctcacaacgcctcttgtcaaacttcgacgactgctatctatctgtgctgctcatcgccttgttcgttgccgttgccggcgtgccccacggccacgcgccccacttcccggagtcctgagtgcctgctgaagttgcgtgtttgcgtagcgctcaaaatctgaaaggtcctagctcgcaatcgcaacggagtcttgccgatgaacaggatgtgttgactgctgttattgtgcttcaaacttcagagaatttgctgctgtgcagcctgctatgtcttaccgaagacttatgtccttgttaactctgtgaagactatgttgtttgctcgtcagtctatgtctaattgtcaatcatacacttgtgtattgtgaactgttctatttaaatttgtattattgcttgtgacaaaaaaaaaaaaaaaaaaggggcgcccccccccgcccacacgctccaccttctgaaccccttaatgtctgtctcgaaccgttcgcctgcgcatttgatcaccccctgagaccgccctatgctcgttttcccgcacatgaacccttgtttgtacaaacaggatgtcactccactgatgcaacttgcctcctccacactccacaattatttatgcatgccagataacccccggcttaccgactttactcgaaacaaacaaaatgcctccttaattaagaataagggggccaaaacctatcgcaacccccaagcagagatttaggattcatttcgcctcctatattccgctcatattcctaacaagactcgggacttattatccagttacatggccaccacattctaaaaattgttcatcttcccatcaccattcgtttattcccccacacctcctcagtttagtaatctccccaccccccctattatttatccacacttaaatgagacgcattacactctcataccaccattgatagcggcgggcagacacaagagaccccatacctctccacccaccacgccaccagatttggatatgatttttcatgatcacactccggctcccacgcattttacactccacacttattcctcatacccgcgctcagattaagattacaagtggtacacccacccaccacacccccctttaatatat

SEQ ID NO: 7566 - DNA, 1509 bp, Zea mays
  misc_feature (1)..(31): n is a, c, g, or t
  misc_feature (560)..(561): n is a, c, g, or t
  misc_feature (563)..(563): n is a, c, g, or t
  misc_feature (572)..(577): n is a, c, g, or t
  misc_feature (593)..(594): n is a, c, g, or t
  misc_feature (598)..(598): n is a, c, g, or t
  misc_feature (600)..(600): n is a, c, g, or t
  misc_feature (1346)..(1347): n is a, c, g, or t
  misc_feature (1351)..(1352): n is a, c, g, or t
  misc_feature (1362)..(1362): n is a, c, g, or t
  misc_feature (1367)..(1371): n is a, c, g, or t
  misc_feature (1373)..(1373): n is a, c, g, or t
  misc_feature (1375)..(1376): n is a, c, g, or t
  misc_feature (1380)..(1385): n is a, c, g, or t
  misc_feature (1387)..(1388): n is a, c, g, or t
  misc_feature (1390)..(1391): n is a, c, g, or t
  misc_feature (1413)..(1417): n is a, c, g, or t
  misc_feature (1436)..(1437): n is a, c, g, or t
  misc_feature (1441)..(1447): n is a, c, g, or t
  misc_feature (1450)..(1451): n is a, c, g, or t
  misc_feature (1453)..(1458): n is a, c, g, or t
  misc_feature (1492)..(1493): n is a, c, g, or t
  misc_feature (1503)..(1504): n is a, c, g, or t
  misc_feature (1509)..(1509): n is a, c, g, or t
  Probeset Number=SeqID_21969
nnnnnnnnnnnnnnnnnnnnnnnnnnnnnnnccacagcggcgaggccgggttgcgacctccgttcctctgcgctccgactggatacgacgatagaattttgtatggtacaatattctatatattaaccgcgggagcatatcttgcactgcgttgttccacgtcaccccgtctcgcctcagccacatgatacacatccaacggtcaagcagacgtcttgccttctcagcgcctggattgttccagagtgcgctgcacatgtttgcgttctctccaatctaagtttctactgtcatggaggtcgaggacacactaatctagctcttaaggctccggcgggcggggccctccaatccctgtacggccatctccagctgtgatgcccacccctatcgcttccaccgccggtgagctgttccgggcagcgagtgcgacagtgctgctttgcctctatcagggagctccatgtcctcatcatcaagagctcgtcctcccttttggattactcagggaaaaaaaaaaaaaaaaaaaaaaaacacgtctcggcaccctaccctacagnngncgaggcgannnnnncgaaccctagtccaanngtgnangcgaccttgcgacctccgttcctctgcgctccggctgcaccgatctcccaaaccaaaccgggaccgggcggcatcctccgtctcgtaccgacccccgcaccgccaaaccctagtccacggcggcgaggcgaccttgcgacctccgttcctctgcgctccggctgagttgctgatttgggataatcctgttctctctgagtgaatcaacatgtctgggaatgatgataagccacatgctgctgcagacagaataaaggcagccacgttatcagtggctaagggattgagcagggctcaagctgaacgggctgcgactgctgctgcccgcaatgtgaatgcctatgggcagaaggaagagggaccaagccgctggcaggagaggaaggaagccaagagacagatgtatctgatgagtacagagaaggctgcgaagctgggcactgtgaagccaaaagcttcagaaacttcttctgttggcgcatatacccaatgccagaagtgtttccagcatggtcactggacatatgagtgcaaaaatgagcgggtgtacatatcacggccctcaagaacgcagcagcttaagaaccccaagctgaagaaaagcgtaccggtttcttatcaatttgagaatcctgatattataaaggagagggaagaggagcagaagatgatgaaagaaaagcagaagaaggagaaagccgaaagaaaagggaaagagtaagaggagcatcgatcgccgagcaggnnatcnncgatcgtgancttcnnnnntntnngttnnnnnncnngnnactttattatgactatatatgnnnnnttggctattattatgactnnaaannnnnnngcnnannnnnnctatgttggtgatcagcgatcgtgagcttccatnntatgtgttgnnatacn

SEQ ID NO: 7567 - DNA, 2361 bp, Zea mays
  misc_feature (2361)..(2361): n is a, c, g, or t
  Peptide Sequence Number=SeqID_12884
  Probeset Number=SeqID_21970
gtgcttggacagactacttgcgggagagcggccggagcgggtgcgcccggcatcggctggactggtctatcggcgccgcccttcacgccgagagttccctctttctcgcttgctcactcgcgtcgacgactgggctaccggcgcctccaccctccgcctggtgtccttcgccgtcgacgagcgcacaccagggtacagtacgtattgctcgtgatttgtgtaactacggagcaagctgcatacagcacaagatagaagatgggtatccttgagaggatcaaggagattgaggccgagatggctcggactcagaaaaataaagcaacagaatatcatcttggacaactgaaggcaaaactagcaaagttgaggacacaactattagagcctccaaagggttccagcggaggtggagatggttttgaagtcacaaagtttgggcatggtcgtgttgcacttattggatttcccagtgttggaaagtcaactcttttaacgatgttgactgggacacattctgaagctgcatcatatgagttcacaacgcttacttgcattcctggaattgttcattacaatgataccaaaatccagcttcttgatcttcctggtatcattgaaggagcttctgaaggcaaggggcgtggtaggcaggttattgctgttgcaaagtcatcagatcttgtgctgatggttctggatgcctcaaagagtgaaggacatcgtcaaatattaactagagaactggaagctgttggactccgtcttaacaaaaggcctccccagatatacttcaagaggaagaagacgggtgggatttctttcaataccactgttcctttgactcatattgatgagaagctgtgctatcagattctgcacgagtacaaaattcacaatgctgaggtgttattccgtgaagatgctactgtggatgatctcattgacgttatcgaagggaaccgaaagtacataaagtgcgtctacgtatataacaagatcgatgttgttggtatcgatgacgttgataatcttgctcggcaaccaaattcactagtgatcagctgcaatttgaagctgaacttggacagactacttgcgagaatgtgggaggagatgggcctagtgagggtgtatacaaagccacagggccagcagcctgatttcacagaccccgttgttctttccaccgacagaggtggctgcacggtggaggacttctgcaatcatatccatagaagtttgctcaaggacgtgaagtatgtgctcgtatggggaaccagcgcaaggcactatccacagcattgcggcctcggccatggccttaacgacgaggatgtcgtccagatagtaaagaagaaggaaaaggaggagggtgggcgaggccggttcaagtcgcacacgaacgcacctgaccggatatctgatagggtgaagaaagccccactgaagacataataacgggttccctgagcgcgtcgtgatcagcttctccaaaccagatggacaacacaagctcggtgggagatcataaaatctggaactagctgagccgcggcgtgctacttgttttgtagtaccagaacagaaggggccaccgccatgtttggagtactccaccttccacaatacctacaccaatgcggcaccaccatgaacactgctgcgtcttgctcgtatgatgtgggcttatcactgtgtgttacctgctatatatgatatgataaatacttgccaactcaaaaaaaaaaagtatgcttattagcagcagcctagcctttgttgtgggaaacatttgtgggtaccaacgcgagggcagtttgagaaaggtccgagccgacatcttgagtgtgatagattgaacatgagggtgaaggggattacaagttctagtatcacctttatgggagggcaagggataagagatgatctaaataatattgttcattggatttgagtgagtctagtgatctaaaccgttagttttgatgatgtgttaagtttggatataatttgtttggtggatatattgtgggttatgggtgtggtcgtgttttggtgatttgattgggtgggttttgtaaagtttaaactatgaaattatatagtggcatagactaagggaggagagatgattatacatttggctagattgtgggcctcgattggttgtgatctaacaaccttaatcttatctaggtcaagcagtcatatgtagtgtcatgccttcaatcatggcagtgttgcagatatctagttgcaaggatggacacaagtgtcgtagggcaaatatgtctagtagtatcgacagacatcagaatccacatcattggatatgacatagttagtaattgatgtagn

SEQ ID NO: 7568 - DNA, 2776 bp, Zea mays
  misc_feature (1)..(454): n is a, c, g, or t
  misc_feature (457)..(467): n is a, c, g, or t
  misc_feature (469)..(582): n is a, c, g, or t
  misc_feature (2189)..(2189): n is a, c, g, or t
  misc_feature (2221)..(2221): n is a, c, g, or t
  misc_feature (2226)..(2227): n is a, c, g, or t
  misc_feature (2235)..(2235): n is a, c, g, or t
  misc_feature (2238)..(2238): n is a, c, g, or t
  misc_feature (2241)..(2241): n is a, c, g, or t
  misc_feature (2245)..(2245): n is a, c, g, or t
  misc_feature (2254)..(2254): n is a, c, g, or t
  misc_feature (2267)..(2268): n is a, c, g, or t
  misc_feature (2270)..(2270): n is a, c, g, or t
  misc_feature (2273)..(2273): n is a, c, g, or t
  misc_feature (2278)..(2278): n is a, c, g, or t
  misc_feature (2282)..(2282): n is a, c, g, or t
  misc_feature (2287)..(2287): n is a, c, g, or t
  misc_feature (2289)..(2289): n is a, c, g, or t
  misc_feature (2292)..(2292): n is a, c, g, or t
  misc_feature (2297)..(2297): n is a, c, g, or t
  misc_feature (2300)..(2300): n is a, c, g, or t
  misc_feature (2302)..(2303): n is a, c, g, or t
  misc_feature (2306)..(2306): n is a, c, g, or t
  misc_feature (2308)..(2308): n is a, c, g, or t
  misc_feature (2310)..(2310): n is a, c, g, or t
  misc_feature (2319)..(2319): n is a, c, g, or t
  misc_feature (2344)..(2344): n is a, c, g, or t
  misc_feature (2349)..(2349): n is a, c, g, or t
  misc_feature (2363)..(2363): n is a, c, g, or t
  misc_feature (2365)..(2365): n is a, c, g, or t
  misc_feature (2376)..(2376): n is a, c, g, or t
  misc_feature (2380)..(2380): n is a, c, g, or t
  misc_feature (2383)..(2383): n is a, c, g, or t
  misc_feature (2385)..(2385): n is a, c, g, or t
  misc_feature (2414)..(2414): n is a, c, g, or t
  misc_feature (2448)..(2448): n is a, c, g, or t
  misc_feature (2459)..(2459): n is a, c, g, or t
  misc_feature (2473)..(2473): n is a, c, g, or t
  misc_feature (2518)..(2518): n is a, c, g, or t
  misc_feature (2770)..(2773): n is a, c, g, or t
  misc_feature (2775)..(2776): n is a, c, g, or t
  Peptide Sequence Number=SeqID_12885
  Probeset Number=SeqID_21971
nnnnnnnnnnnnnnnnnnnnnnnnnnnnnnnnnnnnnnnnnnnnnnnnnnnnnnnnnnnnnnnnnnnnnnnnnnnnnnnnnnnnnnnnnnnnnnnnnnnnnnnnnnnnnnnnnnnnnnnnnnnnnnnnnnnnnnnnnnnnnnnnnnnnnnnnnnnnnnnnnnnnnnnnnnnnnnnnnnnnnnnnnnnnnnnnnnnnnnnnnnnnnnnnnnnnnnnnnnnnnnnnnnnnnnnnnnnnnnnnnnnnnnnnnnnnnnnnnnnnnnnnnnnnnnnnnnnnnnnnnnnnnnnnnnnnnnnnnnnnnnnnnnnnnnnnnnnnnnnnnnnnnnnnnnnnnnnnnnnnnnnnnnnnnnnnnnnnnnnnnnnnnnnnnnnnnnnnnnnnnnnnnnnnnnnnnnnnnnnnnnnnnnnnnnnnnnnnnnnnnnnnnnnnnnnnnnnnnnnnnnnnnnnnnnnnnnccnnnnnnnnnnntnnnnnnnnnnnnnnnnnnnnnnnnnnnnnnnnnnnnnnnnnnnnnnnnnnnnnnnnnnnnnnnnnnnnnnnnnnnnnnnnnnnnnnnnnnnnnnnnnnnnnnnnnnnnnnnnnnactcactagtcccccccccccctccctttcctagcacattccaaggatattcataacacctttctttagaagcacgaagctcatcggtgttgttttgtgctcttgacctctcgatctcgcaaatctcgtgcttcacaacctcaacttcaaatttttcggttgcttcagcaaccttcctttttagttcatccactttagctttatgagcttcggcttgtacaacaagtttagcgtcgttagatctcagcctatccactaaggaaagtaatatcttatccttttaaagagcttcgttccttagtgtgataacttttgagcgaagattcccaagagctattcggtagttctcatcttctgcttccttctgggcttttagagctttgcttaggattaagccctagaaaacgaagagtgagcacataacgacaacaagaaaaatcataaaaataatttactttacacaagtcaaagtatacacaccttcagactattgtaagcaagactgtctgcaagctgatctttcgacatggcagataggccaagttcaaacttcgaatatcatatattgtccatcatttctcggcatacatgtatctctttattgtctggcaaacagtaaaggaagtcatcttcgtcactgccaccatataccaaggaccatcgggggtacttcagatccttggcatagtgttgcacttcgacaacctgctcttctgatagctgctttctcgaagcatgtcgaacaatgaactctagtgggtgcttcaggagaaggagatttggatttctcaggaacactctctttctccagagttatcggtgcggttttcgaaggtctagcttcggcaggagcttctgaaggtccaacttcagcaagagtgtggaccgtgctggcgtcgctagttttcctttaatctttaccttgcgtgctaagagcttcggcagaggcaggagctaatgtttttacggactccagaacagcatctagcacactagccattctccttttccttggggtcgctgcgggaatgcttgatggcttcggtagtgaaagtcgcctagagggggggtgaataggtggaaactgaaatttataaacttaaagcacaaatacaagccggggttagtgttagaaataaaacttagtccaaaagagaggtgaaaacaaatcaaccaaagaaatagagcggatgacactgtgatttgttttaccaaggtttggttctaaagaacctagtccccgttgaggtggtcacaaagaccggtctctttcaaccctttccctctctcaaacggtcacctagaccgagtgagctttctccttaatcaaatgggtcacttagacccctcacaaggaccaccacacaattggtgtctcttgctttgattacaagtgctttgaagaacaagaatgaggaagaagaaagcgatccaagaacaagagctcaaagaacacgggcaaaacactctctctagtcactaggtgtttggagtggagttaggacttggagaggctttgattctattgaattgtgtcttgtattgattgcactagctcttgtattgaatgagatgtctgaaaaacttggatgctggggggggggggnggggaagaaaagaagaaggaaaacaacttgtncactnnccctgacnacnccnatcncccataaanggtgtccagttcnngnaanttcantganaccgnantcncaagnatntnncgngncngttcaaatnagcctttctcagagctgaaaccacntatcntcacactcctgagntngccatggtggngctnagntntatgctgcatctatgtattctcgtagaantactcttggtatatgtctttctctcatgcatttnatatactaatnaccgaggaggtagngtcgtcaagtcaagcaacgtaaaaggacacgacaaaggccagcanaatggctggccctactcataggcgtacgggatggtgcatgagaccgaggaaaataagagatcagggatggaaggaaagcacgaatgcaaaaggcgcaagcaacagagacgcgacaaataacacacaaatcactctctctcaagtcgctaatcactaatgatcacttgtctcaattgtggaacttggagagtttgaaagctttgattgtgtcttggtgctaaacacaataaagtttcaagaggaggggggaannnngnn

SEQ ID NO: 7569 - DNA, 1500 bp, Zea mays
  misc_feature (86)..(86): n is a, c, g, or t
  misc_feature (118)..(118): n is a, c, g, or t
  misc_feature (171)..(171): n is a, c, g, or t
  misc_feature (175)..(175): n is a, c, g, or t
  misc_feature (792)..(792): n is a, c, g, or t
  misc_feature (1485)..(1500): n is a, c, g, or t
  Peptide Sequence Number=SeqID_12886
  Probeset Number=SeqID_21972
taaaactggcaggcaacctggtcggttgtttgtaatgaaggaagcctcctctcaaaccaataactaaaaaaagactaaaaaatganaacaaatctgagctctaattctattattaccnaatactttgacgaacttgtgtgcacagaccaacttgtccaatttctgtatccnaccnaactcaagctagttaaagaatcctaatcagcagttcaacaaggtattgcctgatagatgaagatcaacgctgcttaaggttggtaactgttttccgcagtctctccatcacagactggaccttgtctgacatcttctggtaaagccatctctgggcggcctcgtccagcccatccggtgtaatggtcggccaccccttccgttcagaggatgagtcatggggtaccgttgatgcttcttgcttcaagcttggcaagtcaaactctattggctctccaacaatgatatctatcttcttactgcagagtggcactggtgttcgccgtccaaagaacgagttttctggcatgaccttttcgaaaccagagtgaacaattggcaaaactattggagttataggtgctcggacaataagactggcagttccccacttcaatcttctaatcggctgatcttcttgggctatttttccttcagggaatgtatgcagctgtttgaatatgtcatgataaattttggaattaaatagagggcagaatccataggcaggggatatggcatctgttgctaacagaaagatcagtacgtaattgtaaacaaataccccatacccagctncatttctagcacgtcaagggcttcattcatgtgttcttgataaatcccaccccctctcgtgattggttggcatttcccaagtcgaaacatgtaggacatgactacattcttgaagcatatatcttttgctgtcagcacccaccttccaaggcggcggcgatggcactcccggcgtcgagctccggcctcttccgcttcgtctccccgcgcagccgcccccagtccaccgacatcgtggctgccgcctcctggggagtcttcgccggcaccgccggcctctacctcgtccagccatttgactggattaagaaaactttcttcgagaaaccaccccaaccagaggcataaaaggcttgcaagtctgcaactttggtacttcacttttatccggaatggttcctgactgaagagaacttggataactcagcaaataatacgagaccccctcgtgtttccttgtttgttttttattattcagatgtaggcaatccccacgagggagacagggaacagagaaactgcttggttcacctgtgtctatataatactcctgtgttatccaacatgcatgttttaaaacctgtggcaaatatatcttgctgattaatattggactatgaggtcatgttcgaatgttcccatcactaaaaggaggaaaaacaatgatggcaacttggcgatgctttcctttcnnnnnnnnnnnnnnnn

SEQ ID NO: 7570 - DNA, 1447 bp, Zea mays
  misc_feature (1)..(20): n is a, c, g, or t
  misc_feature (1106)..(1124): n is a, c, g, or t
  misc_feature (1126)..(1130): n is a, c, g, or t
  misc_feature (1447)..(1447): n is a, c, g, or t
  Peptide Sequence Number=SeqID_12887
  Probeset Number=SeqID_21973
nnnnnnnnnnnnnnnnnnnncgggaccctgacctgtaaatcatcgccgaccaggagacagttcggcaagtccgcaccgcaactgcagttggaaaaccagctcgccgccactagataatctcgtctcgccagggacgggaacggcaggccgtgccgtcacgagactcctagcgaccgagagagagagagagagcgcgcacgcgcgtggtggaagagacttcgttctagagctcccgcgaggatggagcgcggcagttcctggcgactcccggcggtggtcgtcggcatccttgtctgcgcggccctcttctcgccgcccgccgccgcgctcaacatcggcatccagtccgccggcgacggggtgagcaagcagcaggcgtgcagccgcacgtgcgagtcggaccactgcacgacgccgccgttcctgcggtacggcaagtactgcggcatcctgtacagcggctgccccggcgagccgccgtgcgacgcgctggacgcctgctgcatgcaccacgacaactgcgtccaggcaaagatggactacctgagcacggcttgcaacgaggccctgctggactgcctggccaggctgcgggagggcacgtccacgttcaacgggaacaagtgcatgatcgacgaggtcatcgacgtgatctcgctcgtcatagaggccgccgtcgtcgccggcagggtactgcacaagccgtagccgcgccgcgcgcagggacatgtgaacagcagcctgcggttggtgggcgatacatctttttcgtgcttggtttagggcgtcctttccggctggccggggcccgggctctgcgtcggctcacatggcggcatgtgtgctactagctggcgagctcccaggctcccaacccggccaaaactgacgacaaggtatatggagattattaaagatatagcttgtttggttttgagcatctcgtgttcctatcactgtattaccgtacaaaataagtataagaaagtttcctcatgctgcttttcgcttcttggacaatgtaatccacccccgcgacccctccgttgttgcaaatgacgaataatacagactacactcgtgtaaaaaaaaaaaaaaaaataaannnnnnnnnnnnnnnnnnnannnnnttcccgtagtaatccatggcaatatcatggaccacatcttgatgcccagtctcaatcttatggggcggcattgttccaatgatccaactttaacttaacaatatggtaaccttctgtgtagaccacttccagtcagcggacggagcgggcgaggatgaggagaagccgcggcgtcgaggaggggagcgctgccgctgctgcagcggaacgaaactggcgacgactagacggtgctcagcctatgcgggcttttggatcaagcccatcaaaccgagcttgtccgcacatgctccttccgtgtaattctggtcctgttn

SEQ ID NO: 7571 - DNA, 1586 bp, Zea mays
  misc_feature (1)..(47): n is a, c, g, or t
  misc_feature (54)..(54): n is a, c, g, or t
  misc_feature (56)..(58): n is a, c, g, or t
  misc_feature (74)..(75): n is a, c, g, or t
  misc_feature (87)..(89): n is a, c, g, or t
  misc_feature (97)..(100): n is a, c, g, or t
  misc_feature (107)..(114): n is a, c, g, or t
  misc_feature (117)..(123): n is a, c, g, or t
  misc_feature (126)..(137): n is a, c, g, or t
  misc_feature (139)..(139): n is a, c, g, or t
  misc_feature (141)..(141): n is a, c, g, or t
  misc_feature (149)..(152): n is a, c, g, or t
  misc_feature (191)..(196): n is a, c, g, or t
  misc_feature (198)..(198): n is a, c, g, or t
  misc_feature (212)..(212): n is a, c, g, or t
  misc_feature (216)..(216): n is a, c, g, or t
  misc_feature (233)..(234): n is a, c, g, or t
  misc_feature (538)..(539): n is a, c, g, or t
  misc_feature (558)..(560): n is a, c, g, or t
  misc_feature (565)..(565): n is a, c, g, or t
  misc_feature (730)..(731): n is a, c, g, or t
  misc_feature (877)..(879): n is a, c, g, or t
  misc_feature (1017)..(1024): n is a, c, g, or t
  misc_feature (1586)..(1586): n is a, c, g, or t
  Peptide Sequence Number=SeqID_12888
  Probeset Number=SeqID_21974
nnnnnnnnnnnnnnnnnnnnnnnnnnnnnnnnnnnnnnnnnnnnnnngggagtnannnagggacgaaagaagtnncctaattctttnnntcgaattnnnngccttcnnnnnnnnccnnnnnnnttnnnnnnnnnnnnananatcacttnnnnttttgccgtgcaaggtctggacctcgtcggccccttgcnnnnnnancccgggggctacancgcncctgttggtcgccatcnncaaaatctccaagtggattgaggttcgacccctaaacaacatcaggtccgaacaggcggtggcgttcttcaccaacatcatccatcactttggggtcccgaactccatcatcaccgacaacggcacccagttcaccggcagaaagttcctggacttctgcgaggatcaccacatccgggtggactgggccaccatggctcaccccatgacgaatgggcaagtagagcgtgccaacgtccacatgcttcatgatctatggtgggcgggtcaagcctcggctctacaccgcaagcaagagcgctgnnggtctgctcggtaaaggtnnnggcgncagtatatctagactggtccggcaagcccatcaccttcgaccgagacgaccaccccgaccgcgtgccgagcccggggaagtacccgctcgttgtggatctcgtcattggcaacgtcaggcttaccaaggtcctcatggacgaaggcagcagcctcaacatcatcnncgccgacaccctcgggctcttgcggatcgatctgtcctcgatccgggccggtgcggcgccctttcacgggatcattcctgggaagcgcgtccatccccttggacaactcgatctgcccgtctgcttcgggactccctccaacttcnnnaaggaaaccctcacgttcgaggtggtcgggttccgaggaacctaccacgtagtgctggggagaccatgctacgccaagttcatggccgtccccaactacacctacctcaagctcaagatgccgggccccaacgaggtnnnnnnnntcggatccacatactgccacgcttacgagtgcaaagtggaatgcgtggagtacgtcgaagccatcgtcgaatctgaagccctcattgccgacctggattgcctctccaaagaggcgcccgacgcgaagcggcatgccggcaacttcgaaccagccaaggcggttaagtccgtctctctcgaccccagcaacgacgccagcaagaaagttaggatcggctccgagctcgaccccaaataggaagcagtgctcgtcgactttctccgcgcaaacaccgaaatttttgcgtggagtccctcagacatgccaggcataccgagggatgtcaccgagcactcactggacattcgagccggagcccgacccatgaaacagcacctgcgtcgttttgatgaagaaaagcgcagagccataggcaaggaggtccacaagctaatggctgcagggttcatcaaagaggtattccatccagaatggttagctaaccctgtacttgtaaagaaaaaaggtgggaggtggaggatgtgtgtagactacactgggtaacataaagcatgtcccan

SEQ ID NO: 7572 - DNA, 1398 bp, Zea mays
  misc_feature (1)..(1): n is a, c, g, or t
  misc_feature (1371)..(1398): n is a, c, g, or t
  Peptide Sequence Number=SeqID_12889
  Probeset Number=SeqID_21975
ncacgtgtccgttgacaggtacgatgatggagccggcagaggtggcaggcatgacaggtatgatgatggagcaggcagaggcggcagacatgacaggtatgatgatggaggaaggcgcaggcatggtagccccccaaggcgtgcaaggagcccagtcagggaaagcagcgaggagcgaagggccaagattgagcagtggaaccgtgaacgagagggaaaacagtgagggctactgttcgccggactctctcatccctatattctaagtatgcttgtgtggatgacattctgcctggctaagtaaaacctttttaagatcaggattcctcggttcattttatggttaaaccagacatcatttgtttccatctgtgttgtgtcggatcctttgctattatgttattttgacaattggtgtcaaatcttttgaggtgtgctattagcttatgatgatgtcagttgtggttaaaaaaaaaaaaaaaaaactcgaggtcgacggtatcgataagcttgatatcgaattcggcacgagcttttagtgagcgcaacaaatgcgttcattattccacagtgctcacttgctcctagtgccagtattccacagttcctcccaccagttacttcaatgggcttcgaacatccagccgtgcaagcttataggttacaattagtgcttgcggggagcgccttacaacaaccaattgcccaattgcaacaacaatccttggcacatttaaccctacaaaccatcgcaacgcaacaacaacaacattttttgccatcattgagccccctagcagtggtgaaccctgtcgcctacttgcaacagcagttgtttgcatccaacccacttgttttggcgaaggtagttacataccagcaacaacaacagttgcaacagtttatgccagcgctcagtcaattagccatggtgaaccctgccgtttacctacaactgttttcatttagcccgctcgctgtgggcaatgcccctaggtacctacaacaacagttgttgcaacagattgtcccagctttaactcatcagctagttatggcaaaccctgctacctacttacaacagttgtttccattcaaccaattggctgtgtggaattttgctgggtacctacaacagggacaacaattacttaatccattggcagtggctaacccattggtcgttaccttcctgcagcagcaacaattgttgccatacaaccagttttttttgatgaaccctcccttgcagcaacccatggttggaggtgccatcttttagattacatatgagatgtactcgacaatggtcccctaaagccggcatgtgtttcctagaaataatcaatcttttaaaggggatttatctcnnnnnnnnnnnnnnnnnnnnnnnnnnnn

SEQ ID NO: 7573 - DNA, 2472 bp, Zea mays
  misc_feature (60)..(62): n is a, c, g, or t
  misc_feature (476)..(477): n is a, c, g, or t
  misc_feature (2031)..(2034): n is a, c, g, or t
  misc_feature (2036)..(2041): n is a, c, g, or t
  misc_feature (2252)..(2252): n is a, c, g, or t
  misc_feature (2416)..(2472): n is a, c, g, or t
  Peptide Sequence Number=SeqID_12890
  Probeset Number=SeqID_21976
tccctttctctcttctcccagccgtctcttccgtggagttttcttccccagcgcgcaggnnnacccccacgacgccattcatccctgctccccatccatggaggctcggctccagcttcctcggcactcccttcctgctcccagtcgttggtccaggcacaaggggcttccccctcggcagcaccatctggccgccattttttttccaagtgcaggtgcctaggacaagctgcgaacccctttgctcctactcgtccatggcgcctcccacggcacgggcgctcctctggtccagcgcgcgcgaggaatcccccatggccggcgcatgccgctgctgcgtttccccatgtgagctcgagcttcttcctcccagcagccatggcttcttcctgctcgcgccctcccccatgatcttcgcgtgcagggcactcctctggccttgggaccacctcgccacttcccctctctgcccgcanngctgcttgccggagcgcggcatggccggaccagccctagctcgagcagcgagctcgccggcgtccatggcgtggcacctctgctctccctctcgcagcgccccctgctccttctccctcgcacagcagcagccgagcgccctccctgctcctcctcctggcgagcggctgcagcagggagtcgtcttctccgtggtcggccagcaatcgagctccccagcgtttccctctgctgtccatggcgtgggcgagctctgatccatggcgccctcctccccttcttcttcctcaagccagcaggcgcctccccctactccctgggcacagcgcccccttctctccccttggtcacggcttcctctgcttcttgctccatggcgccctgaattttcagcagagagctttttttccccattgccgacccccactattgcagactgagccccagcgtcgcccagcagccatggcgcccaagctctctgctcccatctcctccttggcgcagtgggagaagctcccatgggcgccacccccctgcagcttcgccttgccggcgcccagaaattgcagcagcagctcctcccctctctccatggccgacgctcagagctccagcagccgctcctccaactccccatggcgtactgcagcagacgccttggagcaaccccgccatggcttgcgactcggtgtcctccctgcttgcgtgctgctgcgcagtgcccatggtgcttgctaggtgctcgacgaaatgtgcggcaaccccgtcgtcttcgtgcgctgtcgactcgctgtttggttgagccaatggacaacacgccgtgatgccgccgtgtgttcgctgtttttgcgcagccccgaacatcgacgtcgttcaccccggtgagatcgcgacgctccttgtttggttccgcatcggcgttattttcatacgattaattgtgtatgtgtgctgttttatttttgtggaggagagaaccccgtgttttgcgagaagaagggaagccgctcgacgctcgtcgatgttcgtagcgatgcacaaatcggaatctccatcgtcctcacaaacatcgattgggtttgtttatggaccgagagatgctgatcgtgcaagtgatgtggtgccaacaacaagatgcagttggtggacgacctaaagagtgatggacttaaccagtggatgctcgccaagcgagtacctcccccagcaaacactatctaagtgttaaaaattaaaggtactccttaggatgattggttgatggtgtgacttggccttcatccctgccaccgggatagacggtcgagtgggttattgcttccgcaggagaggacccggaggagtagcgtggccaggcttcgccatgttactcggttttctccgttagttatttccgctgcattaagatttatggttattatttctgaaactccgataatgtaatcactaattatacttattaaatttgtggtattatgttttaaaaaaaaaaaaaaaaaaaaaaaaaaaaaaaaaaaaaaaaaaaaaaaaaaaaaaaaaaaaggaaaaaaaaannnnannnnnnctggggggggggcccggaacccaattcgcccgggggggcggggaatcaaatttccctggcgggggttttaaaaagattggaatggaaaaaccttgaacgttccgaatttgataacccttgggcacatccccctttagccggttggggaaataccccaattgcccgcccgggttgcccttcaaaaagtggcacagtttgaatggcaaagggnaaattgaaaccgtatagatttggtaaaaattcccgttaaattttttttaacaagcccgttttttacccggtggccgaactcgtttatttcctttataacccaaaggataaacccgccttagggttgagggtattccggttggaaacaagagtctttattcaggnnnnnnnnnnnnnnnnnnnnnnnnnnnnnnnnnnnnnnnnnnnnnnnnnnnnnnnnn

SEQ ID NO: 7574 - DNA, 1578 bp, Zea mays
  misc_feature (7)..(8): n is a, c, g, or t
  misc_feature (1067)..(1069): n is a, c, g, or t
  misc_feature (1115)..(1115): n is a, c, g, or t
  misc_feature (1475)..(1475): n is a, c, g, or t
  misc_feature (1477)..(1477): n is a, c, g, or t
  misc_feature (1578)..(1578): n is a, c, g, or t
  Probeset Number=SeqID_21977
cattggnnccctcgaggccggccgggtagttcccatctcagactcagggagagacgagagaagtggacacctcgcctgcctggactcgtctactctagtatacagaaaaaagcagaagagatacggggatgtctaagacggcgggcgtcggcagactcggaggagccggggcggcggacgcggcgcagcagcagcagctggcggcgggtgatgctgcggtggcgcgggcggcgcggcccatcgagacgctgctgcgcgcggcgccgctggtgctgtgcgtggccgccatgaccctcatgctccgtgaccagcagagcaatgagtacggcaccgtcgcctactccgacctggggggcttcaaatacctcgtctacgccaacggcctgtgcgccgcctactcgctggcgtccgcgttctacacggccgtgccgaggcccgccaccgtgtcgcgctcctgggtcgtcttcctcctcgaccaggtgttcacgtacctgatcctggcggcaggtgctgcggcggcggagctgctgtacctcgcctacaacggcgacaaggaggtgacgtggagcgaggcgtgtggtgttttcggcagcttctgccgccaggcgcgcacatccgtggccatcaccttcggcgccgtgctctgtttcatcctcctctccctcctctcctcctaccgcctcttcagcgcctacgaggcgcccccgccgtcggcgctcggcagcaagggcgtcgagatcgccgcgtacccacgctgaagccgccggccattcatcggaggctctggagggcgatcaagtaacgaagggagtaacgaaggctgaattgtgcttgactgcatcgttcttgcgtgtactgggtggattgaccttgaacttcttactacagccgtaaattctgtgtatgtttcgttatggcaacatctttctgtggaaagaatgtttgtaacaagcagacgagaagttgtgtgggtaggaaattgtagcaaaattgtttgccagcatcagcttcgacttctatagataggccttcaattgcgaaaaaaaaaaaaaaaaaaaaaaaccgcnnnttttttttttttttttttcataaatagtcacgtcatgttcattgantaagttgaggcaatagcagaatgctaaccatagtaacccaaaaggtaatcaaggacaaggtaaatacaaagctagtcaatccttaggttgatcatggtatgcgggttgatgaattataaagtaaatgggacataataggtcagaggacacttgccttcaccaaacagatgctcagggtcttcgatctcgtagaactcaaagaactggatcatttggtcgccgaagcttgaccgtcgattcctcgaagctctgaaacgaaccgcgatcacgatcgtgctaggacagactgcgcaggggcacgctcgaccaacttttccgtggcaggcaaggcaccccgcgtaggggcgagctcccgacggntngccggacggggctggttgggcacggagcgaggtgctcacgcgaggaagcctcggcatgcgtcggcctgctgctcctcctgcgcgtggatgggcccggccgn

SEQ ID NO: 7575 - DNA, 2253 bp, Zea mays
  misc_feature (1)..(1): n is a, c, g, or t
  misc_feature (6)..(17): n is a, c, g, or t
  Peptide Sequence Number=SeqID_12891
  Probeset Number=SeqID_21978
nccggnnnnnnnnnnnncgatcccgacgacgacccaacggggtggcagccagaaaactcggcagagcatctcgcttgcgaaacaaaggacggcgcgcgagaggaggggaaaggaaaacaaccaccacgaccccgtccattccgttccacttccacccgagctcagcgatcgcggcggcggatgcggatggggaaggggctgtcgtcgcgggcggggtcgcggcaccggcagttccgcgcccgagccatgacccgcgtcgacgacctccaggaggtcttctcgggcctgcagtccgcgcgcaaggactcacgctccgcggacgccgccgtcctcgaggcgcagctccagcagatgctgcgggagtggcgctccgagctcaacgctccctctcccacctcctccctgcagggcaacgccagggaactgtcggatccgccttcggatactcttcgtctgctgcagttggtggtggccgaggaggaggatgacgccacgagcaagatggtcgagcagcagcagcagcagcccccacctccgctcccagctaaccggagccagggccacgcgcatgttgtgtgccagggcatgaagccggagccgcacgaggaagcagttgacgttgctgtggaccagccgcagctgctgagtcagggggttctgcctaatggtgctgctaccgcgtctgcggtgttccatgatcagctgtactatgtgaaccaggagctcacggtcgaggattttctttatgatgatgattacaagatagatctttctgggtctaatctggatgtcattaataacctagaagggattgttcagctggaatatccagatcacaatttgccgcaagggttagcccctaatgcataccttgacatgaatagttgtgggcagagtgccggggctgttttcctgcacatgccagatttgctcacaacaatgacttcagcaccttctgcattcctgaagccaaaatgcgctctctgggactgccccaggcctgctattggatcagaaagatggcataattattgcagcatgtatcatgctgatttggctgtgcaggaagagggccctccgggcacaatgcctgtgatccgtccaagaggcattgatctgaaagatggccccctgtttgctgctcttagtgcaaaagtccaaggaaaaaatgttggggtccctatctgtgaaggagctgccactgcaaagtctccatggaatgcacctgaacttttcgatctttacatatttgaaggtgaatctatcagagaatggttgttttttgacaaaccaaggagggcatttgatagtggaaatcggaagcagcggtccttgccagactacaacggccgtggttggcatgaatctaggaagcaggtgatgaaggactttgggggtctgaagaggtcctattacatggatccacaaccatccaacagctatgaatggcacctatatgaatatgagatcaatgactgtgatgcttttgccttatatcggcttgaattcaagtcttcagatgcaaagaaaattgcaaaatccaaattaggttgtaatccactgaatgaaattcagcagcaaatggatagactcagtgcagacagtcctgtcgacaccaaacggacggcccggagccggacagagcctaacccgatagatgtcaatactaacatctattcagttccaaacaccacagttcaaactgatgttccaaatgcttatcagccagggtcacaagtggaccagatgacatatttgaacggtagtgtcgtttatgggcctcatctgccgtacggttactcgactgaaagaagtgacttctattggaactcaaatgatgggacatgagaagatataaacacatgttcgatttatggcatatttggccttcaagttctaacaattcccgttatgattattgggtcaaatctattagcatgacccccatcttcttgtaattgtagttggcccaatctacaggaaacatctctgaaacaagggatgccaataggcaatactgcagttctattttctgtggcaactttgtcgttgtaatatagccatatcatgataatagcaccctcctcgatgtgcagctgtatgtaacatatatctctggcttggtggacgataaaaaaaaaaaaaaaacgttggtgcctccatttatcggtaacattgtaaggcaacataaatctctaaaaaattggactggtaagctgtcacgctggtggttccacttatctgtcacgttgt

SEQ ID NO: 7576 - DNA, 2486 bp, Zea mays
  misc_feature (1)..(8): n is a, c, g, or t
  misc_feature (2440)..(2486): n is a, c, g, or t
  Peptide Sequence Number=SeqID_12892
  Probeset Number=SeqID_21979
nnnnnnnnggaaaaaaaaaaaaaaaaaaaaaaaaaaaacccatggcgagcactctacggagcctgggcttcttcatcgtacgccggcgtccctgctagtgcctgccgttgaactatccggccaccattgatccgacctcccctaagccatcgatgagtagagaaaaacagtgaacgccacctctgtactcgccccaccttatggcgcgtcgctcctgcagtaccggcccacgctctgcgcggcgctcaggtgttacggctgccctcaaatccgtcgtcggaccattggcactggggcaagcaaaagcacggacaggtgctcgacgtgctgcaacggcttccgatttgcccggctagatggaagacggctggggagcatcttctctggggaacaccgcgcgtcatgggtgccttgccgaagttcagggacggcgtgattgctcatcgtcgttcatgctccaccgtggcgccacccatctctgtgggcagtgggctgcatcgtccaatcgaccggtcaagaacaggtaccacaggatgtggcgcatggaggatgctgtgacgagttcgtgagaggtctaggtcgttgtctcccagtcaactttgggttgctggaccgttgtctcctcataatgtaattatttgtttattttgtacagaactcctgttatgtagtaaagatgtgacattcgatcctgtgccatgattcatcatatgtgtgagacttggtcccagcacacctggtgattatgttcgcgcccgggtcttggtgccccgaaacccgggtgtgacagaagtggtatcagaggaatgttgactgtaggacgaaacctagatagaactggacaaccattatctacttacctttgccactctgattctttctaaacttttcttaatcttttctcatctatttctgctttactctgattattcttacctttgcattctaaagacaaatgtggatttcacactttgaaatcctgtgcctaaagtaactttagtaataggagacctactcttagggaccaaaaataaaaactatttttataggtatttgtatgcttggaagtttgttcttatgataccttgtttgatttggatctttgattgagtgtgattagttgtggagtaatgtccacaatcacatctgacatatccatatagaaaaaaaacggttataaaaatatctaaatgaactaggttatccctcatcaaagaatctagcctagcaaaatccatcttatcttgaaaaagtctatcctacactcatagatccatcttatcctaaaaaaaaacaagattctcatcttatcttgaaaagatttattttatcctaatagatctatctgacctcaaaagattctaccttatccctatggattcatcttaccccaataagcatatttatcccacgctagtgtaacaaccatgatctagcctaaaataaataagatcttatctagtcaaactagtcacaccaatctaacctagatttgatctaatctaaagtgacttatcaaacatgttagataatactgatgaaatagaatagactctactcctatagaacgggtcctaacttagttcaccctgcactaaattaagaatgacagatcgacttggccatatgcaactaccttaaccatccaatagttgcataaccccacaattttaacctagcaagagattctaacctaccaacaccatacaatccatcctactcacatatgtcctagccatatgtccttgactcggatgacaactccaagaataaaggccaaagaagaccaaccacgtcaaaggaagataagcatcaattcaagtcttcaaagatcaagttggatcgccagaggaatcaagatctagagttcaggatgaagtctttccttattatacccttgccacaacctctacttgccatcaccgtacctcatctgacctaacaaatgtctagacatacaatattcatatcatctactaactgttatgtaaaaacttgaacaaaaccttgattcccaaaaccaaatgagaaactaaaattctagaccaaagctattatatcccttttcttacaaatctcggggacgagatttcttttaagggggtaggatttgtaatacccaaaaatgtattcaaagaaagtagagttgatctccttaaatgttatgccatctactcattataacatggaacatcctaattgagtgaaaaaaataaataactaataaaaatgctccatgcatcatattggagttttgtttgtgcattgagtaaagatgatagtaatttgagagattttgaatttaacccaaagaaataatttaggaaagtagaaataatatatagaagagaaagaagaaatactatggagcacaaaataaatccataactaaataaattcatcccactgatatgtccaaactgaatatttaaattaagtnnnnnnnnnnnnnnnnnnnnnnnnnnnnnnnnnnnnnnnnnnnnnnn

SEQ ID NO: 7577 - DNA, 2872 bp, Zea mays
  misc_feature (2410)..(2412): n is a, c, g, or t
  misc_feature (2421)..(2421): n is a, c, g, or t
  misc_feature (2423)..(2425): n is a, c, g, or t
  misc_feature (2427)..(2432): n is a, c, g, or t
  misc_feature (2434)..(2436): n is a, c, g, or t
  misc_feature (2455)..(2458): n is a, c, g, or t
  misc_feature (2460)..(2460): n is a, c, g, or t
  misc_feature (2462)..(2462): n is a, c, g, or t
  misc_feature (2464)..(2468): n is a, c, g, or t
  misc_feature (2473)..(2475): n is a, c, g, or t
  misc_feature (2477)..(2477): n is a, c, g, or t
  misc_feature (2487)..(2489): n is a, c, g, or t
  misc_feature (2498)..(2500): n is a, c, g, or t
  misc_feature (2502)..(2504): n is a, c, g, or t
  misc_feature (2506)..(2509): n is a, c, g, or t
  misc_feature (2516)..(2516): n is a, c, g, or t
  misc_feature (2520)..(2523): n is a, c, g, or t
  misc_feature (2527)..(2527): n is a, c, g, or t
  misc_feature (2529)..(2872): n is a, c, g, or t
  Probeset Number=SeqID_21980
gcttgcgccaggagtagcgcaccgacccagcgctggtcgccctccgcgatgaggtccatgccggctccaaggccctgccatgggcgatcgtcgacgatctgctacagtacagcgggcggctgtatgttccgccggcctccccactccttcaggaactgctgttggcggtccatgatgcgggacatgagggcgtccaacacaccttgcatcggatcaggcgcaatttccattttcctaacatgaaacggattgtgcaggactttgtacgagtgtgctccacatgccagcgctataaatcagagcacctccaccctgtcggcctcctcctacctctaccagtgccacgggggtctggacggacgtggcactggacttcgtcgaggcgctttttaaagtgcgtggcaagtctgtcatcttgactgtggtggacaggttcaacaaatactgccacttcctccccttggcgcacccgtactccgccgtgagcatggctcaagctttcttcaccgacatcgttcgccttcacggcgtgccgcagtccatggtgtcggaccgtgactcggtcttaacctccaggtttttgcgcgagctgatgcgggtaaggcttggcgcttaaagatacccttccctagaccccgcacagtgtgggaagtctacgacactaggtggagtacatgctgcgatggtgggatccctgcatcctactccagttgccacactgccatttctcgctccacactctgctgtggtacctttctgtgaaggggtctacaaatacgccacagcttgggacgctttgagaaaagatgctgcagtattaactcaagatgtaacacttttggcagaagatgctgcacagaaaagcgggatcaccatcgaacaagtcagggataggttacggtcagtgttgtctttgactgatgtcactcgatttccagtcccaaagaacccacaggcggtcatctttgttggtgcaacggacgatggttatattcccagacattcagtgatggagctccagaaggcatggccaggctcagaggtccggtgggtaacaggtggccatgtctcctctttcttcctccacaacgatgcattccgcaaggccatcgtcgacgcccttgatagattgtaacaccagaaggtgagagagaggccatccttgtgatggcactttatgttgtgtgacatttctgaacttggggttgcggcatgagctgaaccctctgtaactgccaacctaactgctcttagtgacgctgagattggaggtagggtggctgtacatgacaattgtagaatgtagcaccccattatttggcaattgttctgcaaaatatttgtttgtcaccatgtatcaatttgaatgctacatcttctgattgtctgacatgcatgtcaatcagctaggcaatttggcagtttcagttattattccttcctagtactattttatattcatattgatactgctggatcagccactatttagtttatatactccacagttacatgggtcatcagaattcctgatcagtgatcacctctatctgtatctttgaaactatctctactttgtaacgtctatagtaaaccgtctctactttggtagggcggtgtctggctgagcctggccgcctgggtgctcgccgctcgctcatgtccttgccgggtgtgccagagttcgctgagcgcgcggaggcggtgggagtagtcggcgatggcgaggaagcaccgcgctgactgccgcgccgtcaggatgggcggcagccggtgcagcgtccgcagcctaagcgcgtccgcttgtctgacgaaggcttcgagggaggcgagcttgctgatggcgagggacatggtggccatgaagccgggcacgtcggagtgggggtagagcagcgccgccgcgtcggaggagatggcctccgacacggagctgtgcatcgcttgcagctcgtggtccaacgccgcctccgcgtccctcgcccactgctgcacaccgcagacgctcatcgcctgctgctccgtcaggggctccgcgtgccgggccgctatcttgatgagctctgaagggcggaagccgccgatccagaggaagcagcgctcggcggcgtcgtcgccgtcgcggcgtactccgcctccagcgccgcccgcaggtggcgcatcaccttgccgtgctcctcctgccacctcgcgtgctccatgtcgaaccatgccgcctcgagccgaattccgagatgcatggacgcaatattcatcaacttaacttggagcaaacgtgtgtaaggaatgcatgcagggtataacaaagaggaggctagctagcatgcatgcatgtacaagtaccattgcatgcatgcgagcagtatgcgcagtccgccatgaggatagacctccaaaacgcatggccagnnncaaaggtcngnnngnnnnnngnnngccatgtttcctttttttnnnncncnannnnngcatnnngnaaggccattnnngacgccctnnntnnntnnnnaccccanaagnnnnaaanannnnnnnnnnnnnnnnnnnnnnnnnnnnnnnnnnnnnnnnnnnnnnnnnnnnnnnnnnnnnnnnnnnnnnnnnnnnnnnnnnnnnnnnnnnnnnnnnnnnnnnnnnnnnnnnnnnnnnnnnnnnnnnnnnnnnnnnnnnnnnnnnnnnnnnnnnnnnnnnnnnnnnnnnnnnnnnnnnnnnnnnnnnnnnnnnnnnnnnnnnnnnnnnnnnnnnnnnnnnnnnnnnnnnnnnnnnnnnnnnnnnnnnnnnnnnnnnnnnnnnnnnnnnnnnnnnnnnnnnnnnnnnnnnnnnnnnnnnnnnnnnnnnnnnnnnnnnnnnnnnnnnnnnnnnnnnnnnnnnnnnn

SEQ ID NO: 7578 - DNA, 1996 bp, Zea mays
  misc_feature (1494)..(1495): n is a, c, g, or t
  misc_feature (1794)..(1795): n is a, c, g, or t
  misc_feature (1805)..(1805): n is a, c, g, or t
  misc_feature (1807)..(1809): n is a, c, g, or t
  misc_feature (1811)..(1815): n is a, c, g, or t
  misc_feature (1817)..(1829): n is a, c, g, or t
  misc_feature (1832)..(1839): n is a, c, g, or t
  misc_feature (1841)..(1845): n is a, c, g, or t
  misc_feature (1853)..(1855): n is a, c, g, or t
  misc_feature (1970)..(1971): n is a, c, g, or t
  misc_feature (1981)..(1992): n is a, c, g, or t
  misc_feature (1995)..(1996): n is a, c, g, or t
  Peptide Sequence Number=SeqID_12905
  Probeset Number=SeqID_21981
agttttgtaaacccactgaacattcacgttcgcagcgcaggcatcgaacacaaagtagctggcggctcggcgcacctacagcgccgtataccgagtccgagaccacgactccacgagacgacacaaaccccagtttaggaacagttggaaaagagggagaaatggagaacggcggcggcaaaggcgacgttcccaacgatgcgaacgaacattgccctggaacgcagtcggaggaggcggggaaggcggatgcctgcgctgggtgccccaaccagcagatttgcgccaccgcccccaagggccccgatcccgatgtggttgctattgttgagaggttggctactgtgaaacacaaattattagttttgtctggaaagggaggtgttggaaagagcacattctcagcccaactctcctttgccttagctgaaatggaccatcaggttggccttcttgacatagatatatgtggccctagcatcccaaaaatgttaggcctcgagggacaagatattcatcagagcaaccttggttggtcacctgtgtatgtcgagtccaaccttggcgtgatgtcgattggtttcatgctgcctaatccagatgacgctgtcatatggaggggtccccgcaagaatggactgatcaagcagttcttaaaggatgttgactggggggagattgactatcttgtagtggatgctcctccaggaacatctgatgagcacatctcgattgtgcaataccttcaagccacaggaattgatggcgctataatcgtcacaactccgcagcaggtctctcttattgacgtgaggaaggagataaacttctgcaagaaggtcggcgttcctgtcctaggtgttgtggagaacatgagtggcctgaggcagccactttcagatctcagtttcgtcaagcctggtgaggcgggcgagacagacgcgacagagtgggccctgaactacatcaaggagaaagcccctgagcttctgtcagtcatggcctgcagcgaggtatttgatagcagcaagggaggcgccgagaagatgtgccgtgaaatgggggttcctttccttggcaaggtgcccatggatccgcagctgtgcaaggcggctgaggaagggaggtcatgcttcagtgatcagaaatgcggtgccagtgcgccggctcttcagagcattgtaaagaagctgatcaagactgggtgagaaaataatgttggcctgctgggaatctggtagtgagaattgagatgaacaggtgtcagagttgtcatgaccaatatatatgttattgtgttttgaacactgaatctgtgtattagactattagtgccagtactagtattggatctgtaagtttttttttgttcgtgaatcaccagtgggtggactgggtgtacaaactgcggccatatttctgctccacgaagtgaaatatgtttcgaggccagtcctgtagctcttcggaacatcgtgaagaagctgatcaagnncgagtgagaaaatagtgttggcctgctggggaatctggtagtgagaaatgagatgaaatgacagacgccagagttctcgttaccaatatatatatgttacggcgttacacactgaatctgtattagtgctagtgttggatctgtaagttttttgttcgtgaataatcagtgggtgcacagactattaaaagcttagtttctgctctaccaagtggactatgttttgaggcgctgcctgaatgatgcttgaatgatctgtattgtacgcaccagaactgaatgagagtacggtgttagcnnattaagtggngnnngnnnnnannnnnnnnnnnnntgnnnnnnnntnnnnntaggggannntacggtgttagcaatatccctggctgcgcttcattgctctctcgtggcacgagcacgacatgtttgtaataaagttaccaggtagtggggccgtcgggccaaaaatcaggacagnnccttatacannnnnnnnnnnnttnn

SEQ ID NO: 7579 - DNA, 3595 bp, Zea mays
  misc_feature (1)..(176): n is a, c, g, or t
  misc_feature (185)..(201): n is a, c, g, or t
  misc_feature (203)..(204): n is a, c, g, or t
  misc_feature (208)..(211): n is a, c, g, or t
  misc_feature (213)..(215): n is a, c, g, or t
  misc_feature (219)..(223): n is a, c, g, or t
  misc_feature (227)..(227): n is a, c, g, or t
  misc_feature (229)..(232): n is a, c, g, or t
  misc_feature (239)..(244): n is a, c, g, or t
  misc_feature (247)..(254): n is a, c, g, or t
  misc_feature (259)..(259): n is a, c, g, or t
  misc_feature (265)..(272): n is a, c, g, or t
  misc_feature (275)..(311): n is a, c, g, or t
  misc_feature (313)..(317): n is a, c, g, or t
  misc_feature (319)..(321): n is a, c, g, or t
  misc_feature (323)..(326): n is a, c, g, or t
  misc_feature (328)..(330): n is a, c, g, or t
  misc_feature (333)..(334): n is a, c, g, or t
  misc_feature (344)..(346): n is a, c, g, or t
  misc_feature (348)..(348): n is a, c, g, or t
  misc_feature (354)..(361): n is a, c, g, or t
  misc_feature (363)..(375): n is a, c, g, or t
  misc_feature (379)..(382): n is a, c, g, or t
  misc_feature (3134)..(3134): n is a, c, g, or t
  misc_feature (3136)..(3136): n is a, c, g, or t
  misc_feature (3148)..(3149): n is a, c, g, or t
  misc_feature (3152)..(3155): n is a, c, g, or t
  misc_feature (3178)..(3180): n is a, c, g, or t
  misc_feature (3196)..(3198): n is a, c, g, or t
  misc_feature (3213)..(3213): n is a, c, g, or t
  misc_feature (3215)..(3217): n is a, c, g, or t
  misc_feature (3236)..(3247): n is a, c, g, or t
  misc_feature (3251)..(3286): n is a, c, g, or t
  misc_feature (3294)..(3294): n is a, c, g, or t
  misc_feature (3296)..(3300): n is a, c, g, or t
  misc_feature (3302)..(3327): n is a, c, g, or t
  misc_feature (3330)..(3360): n is a, c, g, or t
  misc_feature (3363)..(3363): n is a, c, g, or t
  misc_feature (3368)..(3398): n is a, c, g, or t
  misc_feature (3403)..(3435): n is a, c, g, or t
  misc_feature (3437)..(3459): n is a, c, g, or t
  misc_feature (3461)..(3464): n is a, c, g, or t
  misc_feature (3468)..(3472): n is a, c, g, or t
  misc_feature (3474)..(3497): n is a, c, g, or t
  misc_feature (3502)..(3509): n is a, c, g, or t
  misc_feature (3513)..(3531): n is a, c, g, or t
  misc_feature (3535)..(3543): n is a, c, g, or t
  misc_feature (3552)..(3559): n is a, c, g, or t
  misc_feature (3562)..(3591): n is a, c, g, or t
  misc_feature (3595)..(3595): n is a, c, g, or t
  Peptide Sequence Number=SeqID_12906
  Probeset Number=SeqID_21982
nnnnnnnnnnnnnnnnnnnnnnnnnnnnnnnnnnnnnnnnnnnnnnnnnnnnnnnnnnnnnnnnnnnnnnnnnnnnnnnnnnnnnnnnnnnnnnnnnnnnnnnnnnnnnnnnnnnnnnnnnnnnnnnnnnnnnnnnnnnnnnnnnnnnnnnnnnnnnnnnnnnnnnnnnnnnnnnnaattttttnnnnnnnnnnnnnnnnnannccgnnnntnnnttcnnnnncccntnnnnacccccnnnnnntannnnnnnntttangggggnnnnnnnnggnnnnnnnnnnnnnnnnnnnnnnnnnnnnnnnnnnnnntnnnnntnnncnnnngnnnttnntgggaaaaannngngccctnnnnnnnntnnnnnnnnnnnnntttnnnngttgttatacattcaccatctgtgtcatacgctctttctgcacctatactgtctgctatcagagatagatattataaagtcactgctgaggctttgcgggtgtgtggagagctagtccgtgtccttcgtccaaatctcgagacaacctcagttgattttaagccatacattggtccaatctataatgcaatactgggacgtttggccaatcaagatcaggatcaggaggtaaaagaatgcgccatatcttgcatgagtttggtggtctctacttttggtgatggtcttgaaagagaattaccagcatgccttcccatactcgttgacaggatgggtaatgaaattacaagacttacagctgtcaaggcattttcagttattgcgaattcacctctacgtattgatctctcgtgtgtcctggatcatgttgtttctgagctcacagctttccttcgcaaggccaacagagctcttaggcaggcgacgttgggaactctaaattctttggttgtcacatatggtggtcagattggctcttcttcgtatgagacaataatcgcggaactttcaaccctcataagtgcacgagacctttatctagaagatcctaaacgaaaactttgttgcacaataatggttgacagaaaatctattcaaaacgttggtttagctgttagagataaagttttgcctcaggcccttgttttgatcaggagtgccctgttgcaagggcaggcactgcaggctcttcagaggttttttgcatcacttgttcaatctgcaaatactagctttgatgctttgttggagtcccttatttctgctgctaagccatcacattcaggtagtcttgctaagcaagcactgtcttctattgctaagtgtgttgctgttctatgcttagcagctggtgaccagaagtgtgcatctacaattgaaatgcttaaaggcattttgaaagacgacagcactactaactctgctaaacaacacatggccttattatgtctgggagaaattgggaggaggaaggacctcagcaatcatgttcaaattgagaacatcgtcattgaatcgtttcaatcaccttttgaggagattaagtccgcagcatcctatgcacttggaaacattgctgttggcaacctctccaagtatttaccatttattttggatcagattgacaatcaacagaagaagcaatatctgttgctccattcacttaaagaggtaatcgtgcgacaatctgttgatcatactggccagagtgagctacaggattcaaacattgagaagatattggcattgctcttcaatcactgtgaaagtgaggaggagggagttcggaatgttgttgcagagtgtttaggaaaaatttctctaattgaaccaaaaaaactagtccctgctttggaggtacgcacgtctagcccagcagcaaatacaagagctacggttgctattgctataaaatattcaattgttgaacgacctgagaaaatagatgaaatcatgtactccaagatatctactttcttgatgttgattaaagacagcgataggcatgtgagaagagcagcagttctggctttgagcacagcagcgcacaacaagccaaatttgattaaaggtcttcttccagagatattacctcttctatacgaccaaactgttattaagcaagagttaatcaggacagttgatcttgggcctttcaaacatgttgtagatgatggtcttgaactcaggaaagctgcctttgaatgtgtggatactttattggacagttgtcttgatcaagtgaatccatcgtccttcattgtacctttcctcttgtctggtttaggtgaccattacgacgtgaaaatgccttgccatttgattctatcaaagctagcagacaagtgcccttccgccgtccttgctgtcctggactccatagttgaaccaatcgagaaaactataagccacaaacccaagggggatgcagtgaagcaggaggttgatcggaacgaggacatgatccgcagcgctctcagggcaatatcttctctaagccgcataagcggcagcgactacagcatacggttcaagaatctgatgaacaagataacggccacccccgcgctcgccgagaagtacaactcggtgcgcggcgaatgagacctgggttcttgtacatggtagaggaataggttaaacacccagagttgtcgcgcgctcgtcaatcctgttgccgcttccccgcatggttgctgaggcaaaagtctgtactctgatgatgacggtggttgatttttgactgctggacatagttgtcttgtacaaaatctggtggtaaattcagtagaattgccgccgatacatttacctggtggttctcttgtcgcagttcagtttcagttgacctatgaagcgctgatgcagatcagactattctggcaaaaaaaaaaaaaaaaatacttgcatagttgcatggatctttgctgccttcatttgatttttattttctatgaaaagcatagcaaagagcaagataatgccttcgttttctctctcttatggaacaggccaacagagctcttaggcaggcgacgttgggaactctaaattctttggttgtcacatatggtttgcaatatgtcaatataactaaataacaacttgctaaggtgttcagtccttagtaggctgcatgtaaagcttttatttagccgtcctattttgttctctaggtatcaaatttgaatananagaatatatttnnccnnnngaaaaaaaaaaaaaaaaaaaaannnaaaaaaaaaaaaaaannntcgagggggggcccngnnnccaattcgctgtttaaacnnnnnnnnnnnngaannnnnnnnnnnnnnnnnnnnnnnnnnnnnnnnnnnnaaacccgngnnnnncnnnnnnnnnnnnnnnnnnnnnnnnnnccnnnnnnnnnnnnnnnnnnnnnnnnnnnnnnnccnccccnnnnnnnnnnnnnnnnnnnnnnnnnnnnnnnggggnnnnnnnnnnnnnnnnnnnnnnnnnnnnnnnnnannnnnnnnnnnnnnnnnnnnnnnannnncccnnnnntnnnnnnnnnnnnnnnnnnnnnnnnggaannnnnnnntttnnnnnnnnnnnnnnnnnnncccnnnnnnnnnggggggggnnnnnnnnccnnnnnnnnnnnnnnnnnnnnnnnnnnnnnnaagn

SEQ ID NO: 7580 - DNA, 1717 bp, Zea mays
  misc_feature (1)..(156): n is a, c, g, or t
  misc_feature (484)..(489): n is a, c, g, or t
  misc_feature (501)..(502): n is a, c, g, or t
  misc_feature (513)..(518): n is a, c, g, or t
  misc_feature (540)..(543): n is a, c, g, or t
  misc_feature (561)..(565): n is a, c, g, or t
  misc_feature (582)..(589): n is a, c, g, or t
  misc_feature (605)..(607): n is a, c, g, or t
  misc_feature (671)..(671): n is a, c, g, or t
  misc_feature (677)..(679): n is a, c, g, or t
  misc_feature (1284)..(1285): n is a, c, g, or t
  misc_feature (1337)..(1342): n is a, c, g, or t
  misc_feature (1380)..(1385): n is a, c, g, or t
  misc_feature (1468)..(1470): n is a, c, g, or t
  misc_feature (1486)..(1488): n is a, c, g, or t
  misc_feature (1494)..(1496): n is a, c, g, or t
  misc_feature (1503)..(1505): n is a, c, g, or t
  misc_feature (1525)..(1526): n is a, c, g, or t
  misc_feature (1534)..(1534): n is a, c, g, or t
  misc_feature (1536)..(1536): n is a, c, g, or t
  misc_feature (1571)..(1574): n is a, c, g, or t
  misc_feature (1577)..(1581): n is a, c, g, or t
  misc_feature (1608)..(1610): n is a, c, g, or t
  misc_feature (1614)..(1618): n is a, c, g, or t
  misc_feature (1635)..(1635): n is a, c, g, or t
  misc_feature (1650)..(1651): n is a, c, g, or t
  misc_feature (1654)..(1658): n is a, c, g, or t
  misc_feature (1660)..(1661): n is a, c, g, or t
  misc_feature (1668)..(1668): n is a, c, g, or t
  misc_feature (1670)..(1677): n is a, c, g, or t
  misc_feature (1683)..(1690): n is a, c, g, or t
  misc_feature (1692)..(1702): n is a, c, g, or t
  misc_feature (1704)..(1711): n is a, c, g, or t
  misc_feature (1713)..(1716): n is a, c, g, or t
  Peptide Sequence Number=SeqID_12907
  Probeset Number=SeqID_21983
nnnnnnnnnnnnnnnnnnnnnnnnnnnnnnnnnnnnnnnnnnnnnnnnnnnnnnnnnnnnnnnnnnnnnnnnnnnnnnnnnnnnnnnnnnnnnnnnnnnnnnnnnnnnnnnnnnnnnnnnnnnnnnnnnnnnnnnnnnnnnnnnnnnnnnnnnnnnagggtcttctatcacctcaattatcatcgttactgtttttagtcgttggcatttcaatggctctgacaccatggttagctgctggagggcagtttctggcatcaaaatttgagcagcatgatgtgaggagtttattgcctgtggaaagtgagactgacgatttgcacgaccatattattatattaggctttggacgtgttgggcagatcgttgcgcaactcctgtcagagcggttaattccttttgttgcccttgatgttagaagtgatcgggttgcagttgggcgtgcacttgaccttccggtatattttggggatgctggaagcannnnnntactgcacaaanntggagctgaannnnnntgtgctgctgcaattactttgnnnncccctggtgcaaactatnnnnntgtctgggcattgaacnnnnnnnncccaaatgtgaagacnnngttagagcacatgatgttgatcatggtgttaatttggagaaagctggtgcaacggcggttgtcnctgagnnnttggagccaagtcttcagctagctgctgctgtccttgcacaagcaaaactcccaatgtcagagattcaggaaaccatcaacgagttccggaatcgtcatctgtcagagcttacagagttgtgtgctacgtcaggaagttctcttggctatggattttccagagctacgtccaaatcgaagtctttcacctccgacgacgaaaaccaaacagtggatggcacactagcaatctgatgctgatgagataaaatgggatccccttgctagcgctagattggttgcattgttcagtagataatcctgtttcatgtggaaggagggtggaataattattcatataagagctgtcataaaagttggcgtccatttttgtatgttagacacttagtgcttgtttgagagtaatggaagggactgagagggccaaaatcctttaggccccgtttgtttccttttattttgaggaattggaatcttactattggaataggtatttttttaaaatgtgacattccaccactttccaaagttatcatataagcctatctcctacttggctagcgtacgtacgtgccactcttaggtattggaagagattgatatannttggaggagatttgatgtactagagattgaaactccctcaatccatatagannnnnngtaaaaccgaatatatctttagggcttgttcggttttnnnnnnaattcctctctaatccttctcaatccatttctaatcaaacagaccttactattcaaatagtaagggattttggctccttgagnnnccttcattacatctgnnnctaaannngcctttnnnggatagactgtttggtttgnngtgtaagntnttataggatgactagcttttttgtataagtttagnnnnatnnnnntgactaaggttagatatattgtgatgnnnttannnnnaaaactaaacagtcgtnctttaatatgtcaannagnnnnngnngaaattnannnnnnnnctttcnnnnnnnncnnnnnnnnnnntnnnnnnnntnnnnc

SEQ ID NO: 7581 - DNA, 2558 bp, Zea mays
  misc_feature (1750)..(1750): n is a, c, g, or t
  misc_feature (1755)..(1755): n is a, c, g, or t
  misc_feature (1767)..(1767): n is a, c, g, or t
  misc_feature (1769)..(1771): n is a, c, g, or t
  misc_feature (1775)..(1775): n is a, c, g, or t
  misc_feature (2506)..(2543): n is a, c, g, or t
  misc_feature (2546)..(2558): n is a, c, g, or t
  Peptide Sequence Number=SeqID_12908
  Probeset Number=SeqID_21984
atcgagagccacctgcatggtccggtcctgtatcgtctgaagcgcaacggagtgaattccaatcaaaggatgctcggcgcggttctagacgagtgggctatactcaataggcaaacggtatgtcccgtctaatctgtccctacaagccgattgatggaaactcaccatctcagatcctccttcgatcaacctttagctatttcgatcggacctatctgcttcgccaactacacacttccatcaacgacatgatgatcagccaatttaggagaacgatttttccctcgaccaaggagcagcagcaagactccccgggtgagatgctcctcctgggactgtgcgagctggtcgatttcgaccgcaaaggagatagccgcaaagacgcagaattgaccaagcgatcggttgcactgctctacatcctgagcgtctacactaagcttttcgagcccctctttttggtgaaaacaagggagttcctcaaggacttcgcgggtacccgtagtgcctccagcctcaaggaatacatcaaagcctgtgagaaactcattcaagatgagcgagtcaggttcttgcagtacaacctggagagcacgacccagaagcagatgatggagattgtccaccaggttttgattcacgattacaccgacaagctgttgaacgagggttcgttgacagaacttttgcgagagcacgatgtagcgtcactcaaagcattgtacgatcttctgcatctcgctggcatagaaagcaagctccgcgtgccgtgggcgtcgtacgtcatgtcaaccgcaaagggcatcattggcgacaaagagagaggtgatcaaatgacggtcaggctcttgaccctgcgccgaggcctagatgtcatcatccgagacgccttcctgaaaagtaacgaactcaaggaggggatgcgtggcgcatttggaagtgcgatgaacgacaaagcaactgcatcttgctggagcactggcacctccaaggttgctgagatgattgccaaacactttgatttgctcctccgaggtggcctgaaggcgatcccgaaagagctcctctctgatatccaagatcgagcagtcgccgagaaagaaggcctagcaagcagcgcagatgaggatgctgaactcgacagacaacttaatcaaacgctggagctttgccgtcatgttcatggcaaggacactttcgaagcattctacaagaaagatctggcacgccggctcctgatgggtcgcagtgccagctctgatgccgagaggaacatgatcaccaagctaagagatgaagctgggtcgtctttgactcagaacattgagaccatgttcaaagaccaagagctcgctaaagaggagatggatgcgtttagggagtgggacaggaacacattaggcaaaccgagcgaccttctccatgtcatggtactgtcctctggcgcatggccgacgtatcccgacgtcaacctcaatcttccagataatgtcgcgagtcagcacgagaggtttgataagttctaccagcacaagcacagcggcagggtgcttacttggaagcattgcctcggccatgttacactcaccgccaacttccccaaaggtcgcaaagagctcttcgtctccgcgtttcaggcctcagtccttctcttattcaacaccgttcctaacgatggctttctcagctacgacgagatcaaaactgggaccaatctccaggacgctgatctcgaccggacattgcagtnactgncgtgcggcaaancnnnagtnctgaccaaacatccaaagggcaaggatgtcaagccgaccgataccttcacatacaataagtcctttaccgatccgaaggtgcgggtgaagatcaaccagatccagttgaaggagaccaaggaagagaacaaggcgatgcacgatcgaatcgcgcaggaccggcgttttgagacgcaagcggcgattgtccgcatcatgaagagtcgaaagcaattgggacatgcggagctggtcgctgaagtgattgctatgaccagcaagcgtggaagtgtagagccgccggagatcaagaaggagatcgagaagtaagttccctagtcttgccactatcagttcgtcgttatgatgctaacacgttgtcacagcctaatcgagaaggattacattgatcgcgaggaaaacacctacgtttaccaggcataaagttgggtttctttcgagtgtcaagggcggataaagtctgtacaaaatgatgaggcaacggtagcgaccaatgagaacatgaacttcacctatcacggtatcctcaatagcataaatgaatgttccgtacatcgcaccatgccaagaatagtgtccgttagagacacaaatactgagcaagagccagatcgaacgcgggactttccaacaaaaaagctaaagcgaagaaatctgatgagccagcagagacagcgggtcaggtgtagtgaaaggggaacctgggctcgagggggggcccggtacccaannnnnnnnnnnnnnnnnnnnnnnnnnnnnnnnnnnnnnaannnnnnnnnnnnn

SEQ ID NO: 7582 - DNA, 2249 bp, Zea mays
  misc_feature (1)..(3): n is a, c, g, or t
  misc_feature (2201)..(2226): n is a, c, g, or t
  misc_feature (2231)..(2234): n is a, c, g, or t
  misc_feature (2241)..(2241): n is a, c, g, or t
  misc_feature (2243)..(2243): n is a, c, g, or t
  misc_feature (2245)..(2249): n is a, c, g, or t
  Peptide Sequence Number=SeqID_12909
  Probeset Number=SeqID_21985
nnnggcgctctaacacaggggtcccccgggctgcaggctagtccccccccccccctctaggtgctctcagtagccatgctggaacatatagcattggagcatatggttctggaagtggaacatatggtgttgtgggtagccatgcctcctaagattcaagttatggagcaccccattcacaacgacgtcattcggtttgcggacctatttatgatggtagccataactcagttatctcaagttacaactatttgcctcgatgtgtgtaacaccctgaatttgggggtataagatttctcttctaatatccaccaaattcatgtgttaccgtctcctttctttgctttccttctctttttttctaaataaagatgagttattttgttatattggtgtaagcctagtgaagtgagccctagaggcactttggttgttgcattcatgacattgcatagtgtttctatatgaaaaggtgtttgaaacatgttaatatgtctcgtagaagtttccggtaaattttcatatttttctgaatattttatattttttcgaaattcaaaatatatttatttgaagtacttaaaaacacttttcaaaagttctaaatatgatttttgagttcattgggtgccaaatcatgtctaggaattttttttctagaatttttggagccttcgagatatttttcgaatattaaaaacgatttcacccttttctgaaattacttttaattttaaaatgggataattatgaaaaataaaatatcttcaaactctagcaatatatatatggctggaattctctcgtcgagccctttccgaatttcgaaaccccaccaccagtctagatatgaaactcccgaaattgctcgccgaagttcaggacggttccaactccggcgacaactcctgcgagcaattactttcgatccgtgcgtcgtcggtggaatctgagggtaccgctgcgttcatctaatcgagagcttcaccctgatgctttcgattcgtcgaccgaccgacggttcgtcaccaattggtgatttttctctcggctccggcgaggtcgtcttctccggtgcgcccatcctccattgttgcccatgaagttctttgtttttgtcttccctgcgcagctcctctctcttccccctcccccctctctctccccgacggtggatccctcccccgcaccctgtccccccggcgtcgttccttccccctccctggcggcggcggccggcagtggcccgcccgccccactacgcgcgcgtagccccctcctctgcggccggtgcagtcccctgcagcggcggtgcccccacccaccgcgcaactggcccggcctcctcccccctgcgcgtgcagccccctcccctctcttttccatggatgagaggaatgagaagaagcgaggaagaagatgacagttttgcaaaattgtccttatacgcaggaatttagttcaaattaaaaccacgataacttttgcgttttaaatctgattcaatccgttcaagttgcgttagatttgtattaaaattatatacatgttagaagtatttttccctgctgttgcacattttatttaatatatttaaacatttgtttgaccgatggttactagaatgtcgttttaatttaaatctaatttaggaattcgatttgcacatttataattagacgccaacatggttaacccttaactgaaatattctttattaataatcgtttagtttaaatgtgctatctatttattagtcctcgcgtgttgtgtcggccgcgcgccgtacgcgtattgtgcgccgtcattttgtctcgcttgtagtcgctaacgttgtttgaattacttatataacttaaagttattagtgtagtcaattaattaaaaatgggtgataattatagttgtatttaataaatgtcgattaatataattatatcgaattaaatgctctaaccaatactttttagtgtaagtgcgataacttctcgaccgtagctctgactgtcacgtttctttttgtcgtgtgaccgtaatagcgagctatatttcgtattgcatgtttttattatggttttctttaattggtgtaatattcttatgcatatatacatgtttgtttatttgtttgtgcctgtttacattcgttgtgtgtcgcaaatagatcgtgatatgttctcgagggggagcccggtacccannnnnnnnnnnnnnnnnnnnnnnnnnggggnnnnagggggngnannnnn

SEQ ID NO: 7583 - DNA, 3115 bp, Zea mays
  misc_feature (15)..(15): n is a, c, g, or t
  misc_feature (351)..(353): n is a, c, g, or t
  misc_feature (380)..(380): n is a, c, g, or t
  misc_feature (384)..(385): n is a, c, g, or t
  misc_feature (391)..(395): n is a, c, g, or t
  misc_feature (409)..(413): n is a, c, g, or t
  misc_feature (422)..(426): n is a, c, g, or t
  misc_feature (436)..(444): n is a, c, g, or t
  misc_feature (453)..(456): n is a, c, g, or t
  misc_feature (465)..(469): n is a, c, g, or t
  misc_feature (474)..(479): n is a, c, g, or t
  misc_feature (488)..(500): n is a, c, g, or t
  misc_feature (507)..(507): n is a, c, g, or t
  misc_feature (509)..(527): n is a, c, g, or t
  misc_feature (529)..(531): n is a, c, g, or t
  misc_feature (539)..(546): n is a, c, g, or t
  misc_feature (551)..(563): n is a, c, g, or t
  misc_feature (565)..(575): n is a, c, g, or t
  misc_feature (579)..(583): n is a, c, g, or t
  misc_feature (585)..(586): n is a, c, g, or t
  misc_feature (588)..(591): n is a, c, g, or t
  misc_feature (593)..(593): n is a, c, g, or t
  misc_feature (601)..(605): n is a, c, g, or t
  misc_feature (641)..(642): n is a, c, g, or t
  misc_feature (653)..(660): n is a, c, g, or t
  misc_feature (662)..(664): n is a, c, g, or t
  misc_feature (666)..(668): n is a, c, g, or t
  misc_feature (670)..(673): n is a, c, g, or t
  misc_feature (677)..(679): n is a, c, g, or t
  misc_feature (2816)..(2816): n is a, c, g, or t
  misc_feature (2821)..(2825): n is a, c, g, or t
  misc_feature (2838)..(2840): n is a, c, g, or t
  misc_feature (2851)..(2851): n is a, c, g, or t
  misc_feature (2866)..(2866): n is a, c, g, or t
  misc_feature (2881)..(2883): n is a, c, g, or t
  misc_feature (3039)..(3039): n is a, c, g, or t
  misc_feature (3050)..(3054): n is a, c, g, or t
  misc_feature (3067)..(3072): n is a, c, g, or t
  misc_feature (3074)..(3074): n is a, c, g, or t
  misc_feature (3076)..(3076): n is a, c, g, or t
  misc_feature (3078)..(3080): n is a, c, g, or t
  misc_feature (3087)..(3087): n is a, c, g, or t
  misc_feature (3089)..(3089): n is a, c, g, or t
  misc_feature (3091)..(3102): n is a, c, g, or t
  misc_feature (3110)..(3111): n is a, c, g, or t
  misc_feature (3115)..(3115): n is a, c, g, or t
  Probeset Number=SeqID_21986
tgcggcgctcgagcnggccgggccgggctccgctccctctgacttgttcgcttgccgtcctcgctcgcggcaaagctgcagcgtgtctcggctccggcgcgccaccgctcgggacgcccgacggatccgctcccgcgtgcgctcgatatcccttgcttcaacggtccaagtcaacccccccaccaaatcgccgtccgtccggccgctgccgcaccctagcaggatcgcagcgtgcacagctcttcttcaatctgcaggattgcagccacgcacaagtcgtagctgctcgctcaattgtacttcagatagcatcttctttgattgtcctcttctgcatactcttgttgatgnnnctatcatattcttgaaaaccttccgtnctgnntatctnnnnntcttctgtctctgnnnnngtcctttannnnncacttgcttnnnnnnnnnattttccannnngatacccannnnngaatnnnnnntgagattannnnnnnnnnnnntgtctancnnnnnnnnnnnnnnnnnnncnnnccatacannnnnnnntggcnnnnnnnnnnnnntnnnnnnnnnnnctcnnnnngnngnnnnanccacccannnnnccgcggacgcgtggggcgctccctccctccctggcnncaactactggnnnnnnnncnnncnnncnnnntttnnngggcaaaaagcgcccactcgaggccggccgggccgttcgcgtgcctctctctccgctccctctgacttgttcgcttgccgtcctcgctcgcggcaaagctgcagcgtgtctcggctccggcgcgccaccgctcgggacgcccgacggatccgctcccgcgtgcgctcgatatcccttgcttcaacggtccaagtcaacccccccaccaaatcgccgtccgtccggccgctgccgcaccctagcaggatcgcagcgtgcacagctcttcttcaatctgcaggattgcagccacgcacaagtcgtagctgtttccttggaactttgagctttggaagatgccaaggagaacaggaaatgctgcttcgaccaaatcagttgaattggtcaaacaagaccaaatggagtttgatcatcctgatgaggtagatgaagaggaagaagttgagtatgaagaaattgaggaggaggttgagtatgaagaggtagaggtagaggaggaggaggaggaggaggaggaggaggatgatgaaagtgaaggtgtgcgtgaagttgatgctaatcatgacagtaaaatggtggatgatgatcccaaggttgggaatgaaaaagaaaagcatgctgagcttcttgctcttcctcctcatggagctgaagtttatgttgggggcatttcctctgatgtatcttctgaagatctcaaacaactatttgaatctgttggagaagttgtggaagtgcgaatgcgaggaaagggggataacaggacttatgcttttattaatttcagaactaaagagatggctttaaaggccatccaaaagttgagcaataaagacctaaagggaaagaagataaaagtttcttcctcccaggctaagaacaggctatttattgggaatgtaccccatgactggacacatgatgatttcaaaacagcagtggaagaagttggtcctggagttttaaaagttgatctcatgaaggcaccaggctcagatcgcaataagggttatggctttattgaatactacaaccaggcatgtgcagagtatgctaagcagaagatgtctaccccagaattcaaactagatacaaatgctcctactgtcagctgggcagatcctaagaatgctagtgaagctacatctactgcacaggttaaatctctatatgtcaaaaacctccccaagactgttactcaagagcagctgaaaaagctgtttgagcatgttggagaaattacaaaagttgttattccacctgcaaaatctgggcatgaaaatcggtacggttttgttcattttaaggaacggtccatggttatgaaggctctgaagaacactgagagatatgaacttgatggtcagctgctggattgttcacctgcgaaacctcctgctgataagaaggatgatactggatcatctcctactgcaaaaggacgtccattacccccaagttatgccccacttggatatggactagcgggagcttataatccacttggaaaaggactggcaggtgcttacaattcccctggaaacggactggcaggtgcttatggcgtgctttctgctcatgccgcacagccaatgttgtatgctccaggtgcttctccaggttcaacaatgatcccaatggtcctaccagacggccgtcttgtatacgtaccacagactgcagggcagcagcctgtgcatgtgacttcgcctctgccacagcaaggcggtcgtcgattcggcggcggtggcggatccagctccggcggaaagcgacagaggggagatgaccgtggcagtaacagcaacagtagccgcaggggctggcaccgtccgtattgatgtttgcaatgccgctgatttgcaattagaagttagaacccagcaattagcatatttatcgcagtaccatgctggaaactgtactttgaattatttgtttttcctgtgtgcttcgtaacaggcctgccctaaaaagaacgatagtaccggaaggggcaaatgtagtggtaatatactctatacatttgtaaccatctccatcctgccgttgaccgtcttaggttattaaaataaatatatttcttccgttcttttttaaaaaaaaaaaaaaaaaaaaaaaaaaaaaaaaaaaaaanaaaannnnnggttagttttttnnntgtgcgtctcntgtctgtaacacagnctgctgttgtgatannngtaataacagttccaagtggcagatgtggtttgggatgcagtggtaaaatgaatctgttccccagcttcatgaataactatgctgttagtgtctgaggtttacattgtgtcagtttggtcacttttggtgtgatgagttttagtagcggtgtggcnggtggatatgnnnnnaaattgtatcgcnnnnnnantnannngataccncnannnnnnnnnnnnaacccacnnatgn

SEQ ID NO: 7584 - DNA, 2421 bp, Zea mays
  misc_feature (1743)..(1749): n is a, c, g, or t
  misc_feature (1751)..(1755): n is a, c, g, or t
  misc_feature (1770)..(1771): n is a, c, g, or t
  misc_feature (1781)..(1781): n is a, c, g, or t
  misc_feature (1783)..(1783): n is a, c, g, or t
  misc_feature (1790)..(1790): n is a, c, g, or t
  misc_feature (1792)..(1794): n is a, c, g, or t
  misc_feature (1829)..(1830): n is a, c, g, or t
  misc_feature (1832)..(1834): n is a, c, g, or t
  misc_feature (1843)..(1844): n is a, c, g, or t
  misc_feature (1851)..(1853): n is a, c, g, or t
  misc_feature (1870)..(1870): n is a, c, g, or t
  misc_feature (1876)..(1876): n is a, c, g, or t
  misc_feature (1885)..(1885): n is a, c, g, or t
  misc_feature (1916)..(1916): n is a, c, g, or t
  misc_feature (1944)..(1946): n is a, c, g, or t
  misc_feature (1951)..(1953): n is a, c, g, or t
  misc_feature (1957)..(1963): n is a, c, g, or t
  misc_feature (1978)..(1980): n is a, c, g, or t
  misc_feature (1982)..(1982): n is a, c, g, or t
  misc_feature (2011)..(2015): n is a, c, g, or t
  misc_feature (2032)..(2034): n is a, c, g, or t
  misc_feature (2079)..(2079): n is a, c, g, or t
  misc_feature (2083)..(2083): n is a, c, g, or t
  misc_feature (2090)..(2090): n is a, c, g, or t
  misc_feature (2092)..(2095): n is a, c, g, or t
  misc_feature (2101)..(2101): n is a, c, g, or t
  misc_feature (2128)..(2130): n is a, c, g, or t
  misc_feature (2132)..(2135): n is a, c, g, or t
  misc_feature (2171)..(2171): n is a, c, g, or t
  misc_feature (2175)..(2175): n is a, c, g, or t
  misc_feature (2177)..(2177): n is a, c, g, or t
  misc_feature (2201)..(2202): n is a, c, g, or t
  misc_feature (2250)..(2251): n is a, c, g, or t
  misc_feature (2253)..(2257): n is a, c, g, or t
  misc_feature (2262)..(2265): n is a, c, g, or t
  misc_feature (2267)..(2268): n is a, c, g, or t
  misc_feature (2274)..(2284): n is a, c, g, or t
  misc_feature (2287)..(2288): n is a, c, g, or t
  misc_feature (2303)..(2305): n is a, c, g, or t
  misc_feature (2307)..(2307): n is a, c, g, or t
  misc_feature (2313)..(2317): n is a, c, g, or t
  misc_feature (2351)..(2353): n is a, c, g, or t
  misc_feature (2356)..(2360): n is a, c, g, or t
  misc_feature (2406)..(2409): n is a, c, g, or t
  misc_feature (2414)..(2421): n is a, c, g, or t
  Peptide Sequence Number=SeqID_12910
  Probeset Number=SeqID_21987
cttgaagcaatacggcacaactgatatggagttttgaggaaaagggtttcctatgtatggattttagcaacggtggtcttctattattttgttctatagtatcttttggtaggcaagtttaatcatcatttccacaaatttttttctgttgatgattgcaggtcagctgcctggtgtcaccgctcctattcctggggttggggtgcttccaaacttgtataatttggctgcaggacagccacaagccatgacacaacaggctaccaggcatgctcggcgtgtctatgtgggcggacttcctccaactgctaatgagcagaccgttgccatattcttcaatggagttatggctgctattggaggaaacacagctggtccaggtgatgctgttcttaatgtctacataaaccacgacaagaaatttgcttttgtggagatgagatctgtggaggaagcaagcaatgcaatggtcttagatggcataatgtttgagggagcaccggtcaagattagaagaccaacggactataatccttccctagcagctgctctgggcccgagccagccaaatccaaatctcaatctttctgctgttggcttaacacctggctctgctggaggattagaaggtccagaccggatctttgtaggtggtctacaatattacttcactgaggcccaagtgcgggagttgcttgagtcctttggacctctgcgtggatttgatcttgtaaaggatagagaaactggtaactcgaagggatatgccttctgtgtgtaccaggatcttaatgttaccgacattgcctgtgctgctcttaatggcatcaagatgggagacaagactcttactgttaggcgggcaaaccaaggagcttctcagcctaggccagagcaagaaagcatcctgttgcaagcacagcagcaggtgcaaatgcagaaattcgtataccaagttggaggtgccctgccaacaaaagttgtatgcctgacacaggtagtgacagaagatgaactgagagatgatgaggaatatgatgacattgtggaggacatgagggaggaaggacacaaatatggtaaaccgcacgagactcatcgacttctattaccctctttgttttaaaagctcctctacgttctgctgtcactaccctcagttactgaattggtttcctttttgtgtttttgtcttgtgtgtcttttttgtagtcccgcataatgccattgcagattgttttgtagtccgaccttatgcaatagtggcaatcgggccttaacccacagaagacactattcttttgactttgattaatcattttattattagcgcgtcttgtctatatatatctactctgctcactaagatttggacaggtaacttggtgaaagttgcaattccacggcctgaccccagcggtgctcctgttgctggtgttggaaaggtgtttttggaatatgcagatgtggagggctcaaccaaagcaaagacagggatgcatgggcggaaattcggcgggaaccaggtggtggcggtgttctaccctgaggacaagtttgcagctgagcagtacgactgaaaagttttagaacccctattctagagttgcagttgtggcacacaatgtggttgttttgaccttttgtagttaagtttggtgattgatccgctgataagtgatataagtttcgtgctcaagtattatatcaaaaaaaaaaaaaaaagtttcggtccttcaatcnnnnnnnannnnnaacatttaggatccnntagttgctgntntaaaatnannnttaaaaaaaaaaaaaaaaaaaaaaaaaaacaaaanngnnntcctgttgnnggtgttnnnaaggtgtttttggaatntgcaantgtggaggnctcaaccaaagcaaagacagggatgcatggncggaaattcggcgggaaccaggtggtgnnngtgtnnnaccnnnnnnncaagtttgcagttgnnnantacgattgaaaagttttagaacccctatnnnnnagttgcacttgtggcannnaatgtggttgttttgcccttttgtagttaagtttggtgattgatncgcngataagngnnnnaagtcnggtacccaagtattagccggaatgtannnannnntgtctcggttcatcaatctactgaggtgtttaacanatangntccagtagttggctcattagaatnnacattttaaatgggtttattgccatttggaaacgaccaggtggttccnntnnnnnatccnnnngnnaagttnnnnnnnnnnnagnntgactgaaagttgtnnnanctgttnnnnngttgcaacacacaatgtgtttttttaaaatcttnnnggnnnnnggtttctcttgaatttgaatcttatccagttataagtttggtgcannnncagtnnnnnnnn

SEQ ID NO: 7585 - DNA, 3583 bp, Zea mays
  misc_feature (26)..(26): n is a, c, g, or t
  misc_feature (45)..(45): n is a, c, g, or t
  misc_feature (83)..(83): n is a, c, g, or t
  misc_feature (1031)..(1032): n is a, c, g, or t
  misc_feature (1066)..(1066): n is a, c, g, or t
  misc_feature (1076)..(1076): n is a, c, g, or t
  misc_feature (3113)..(3119): n is a, c, g, or t
  misc_feature (3123)..(3123): n is a, c, g, or t
  misc_feature (3125)..(3129): n is a, c, g, or t
  misc_feature (3133)..(3137): n is a, c, g, or t
  misc_feature (3141)..(3141): n is a, c, g, or t
  misc_feature (3143)..(3155): n is a, c, g, or t
  misc_feature (3158)..(3158): n is a, c, g, or t
  misc_feature (3160)..(3165): n is a, c, g, or t
  misc_feature (3169)..(3169): n is a, c, g, or t
  misc_feature (3171)..(3177): n is a, c, g, or t
  misc_feature (3182)..(3182): n is a, c, g, or t
  misc_feature (3184)..(3187): n is a, c, g, or t
  misc_feature (3192)..(3192): n is a, c, g, or t
  misc_feature (3194)..(3195): n is a, c, g, or t
  misc_feature (3198)..(3200): n is a, c, g, or t
  misc_feature (3203)..(3207): n is a, c, g, or t
  misc_feature (3211)..(3216): n is a, c, g, or t
  misc_feature (3220)..(3224): n is a, c, g, or t
  misc_feature (3236)..(3238): n is a, c, g, or t
  misc_feature (3245)..(3249): n is a, c, g, or t
  misc_feature (3253)..(3261): n is a, c, g, or t
  misc_feature (3263)..(3265): n is a, c, g, or t
  misc_feature (3277)..(3280): n is a, c, g, or t
  misc_feature (3284)..(3284): n is a, c, g, or t
  misc_feature (3297)..(3301): n is a, c, g, or t
  misc_feature (3305)..(3307): n is a, c, g, or t
  misc_feature (3309)..(3313): n is a, c, g, or t
  misc_feature (3342)..(3349): n is a, c, g, or t
  misc_feature (3353)..(3354): n is a, c, g, or t
  misc_feature (3450)..(3452): n is a, c, g, or t
  misc_feature (3463)..(3463): n is a, c, g, or t
  misc_feature (3489)..(3491): n is a, c, g, or t
  misc_feature (3497)..(3497): n is a, c, g, or t
  misc_feature (3515)..(3516): n is a, c, g, or t
  misc_feature (3551)..(3554): n is a, c, g, or t
  misc_feature (3557)..(3562): n is a, c, g, or t
  misc_feature (3579)..(3583): n is a, c, g, or t
  Peptide Sequence Number=SeqID_12911
  Probeset Number=SeqID_21988
ctcagtttgataggtatatgggtacnccttcttcaagtaaaattntacaattttcctcttgtatctaggatcaaggattggcncatcatatatgaaagaataatccatcacagattaaaggattgtgcttattgagctccagaataatctctttcacaacaacttcatttgcagaagcattgtccaaggttaaagaaaacattttcttctctataaaccatttcaataggcatgaactgaggataagagacatattctcaccactatgtcgacccgaaacatggaggaaattgataattctcttctgtatttcccaatcatcatcttcccaatgtactgtgacacacatgtagcctttattctgatttgatgtccacatgtccatagtagcactcatgcgacaattgagggttttgaaatacttatacaacacatccttttcatgcaagtagagttccagaatttctttcctaatagtgacacgtgacttcataggaaaggtaggcttcaatgatttaatgaattccacaaagtattcatgctcagcaatgttaaatggatactcatgcatgataatagttgtataaaactttctctcaaactggtttattcatcatatttatatggctggacaatgcatatatctgtgccatgatccttttctgccttgagctattgttgccccttcacaatcgtatgataatttttcaaatgagaccaaaatgcagttgttcctctactacttttaaccctagctttgctagtcttgtttttgcaaccagaatacttgcatttggcccaaacttgcttcacagatttaccattctcctctacgacaacctcatacttcttaaaatactgccaaacatttgaagtggacttctttgcttgcttcaactttgaagaatcatcctcatcctaattaattccttcttctggatttgcaccttgttcatgagatgttgcagcaggtgttgacgatgatgcggacacaccaaaatgttgacttgtatttgcatgaggtgaggatnncaagttctgactttgatgttcactaggcaactcnaacaacatangctttcgtggttggcgacgctcaccgcctgctgcaccactcatctacctatctggttccgcttaatttctttcctcggtccctccaccccccttcgccctttccgacgcgccgcccgaaaccctagccccactgattctctccagcccagcccacagggggaggggatgtcggcggcgccagcggcgggagggcagggtggcgggggcattgacgccgcgctcctcgacgacatcatccgccgcctgctcgaggtgcggaccgcgcgcccagggaagcaggtgcagctctctgagtcggagatccgccagctgtgcaccgtctcccgcgccatcttcctcagccagcccaacctcctcgagctcgaggcgcccatcaagatctgcggtgacatccatggtcaatacagtgatcttctaaggctttttgaatatggaggttttcctcctgaagccaattatctattcttaggtgattatgttgatcgaggcaaacaaagtttggagactatatgccttcttcttgcttacaaaatcaagtaccctgagaacttttttcttctgaggggcaatcatgaatgtgcctcaataaacagaatatatggattttatgatgaatgcaagcgtcgatttaatgtgcggctatggaaggtcttcacagaatgttttaacactctacctgtggctgctcttatcgatgataaaatattatgtatgcacggtggactctctcctgatctagcacacttggatgagataaagaacttgcagcgtccaactgatgtaccagatcaaggtctactgtgtgacttgctttggtcagatccaggaaaagatgctcaagggtggggcatgaatgatagaggggtctcatatacctttggtgctgacaaggtttcagaattcttgcaaaagcatgatcttgatcttatctgtcgtgctcaccaggttgtcgaggatgggtatgaattttttgctgacagacagcttgtcaccatattctcggcccccaattattgtggtgaatttgataatgctggtgcaatgatgagtgtcgatgaaactttgatgtgctcattccaaattctgaaacctgctgagagaaaaaacaaatttatggggtccaacaaaatgtgatagtgaaagccattttgcttccagcagctctagcctcttaaggttctcctgtggatgcatcgagacaacagcatgctggcgccaagtttgagggcagcattgggctactatcagagaaaccaaataatcccatacctaactgttcatctggaagttactcatcatgacaagtgcctgaaatttttcctctttcctgttaccttgtgtcagaacattatgtagctgtagatatattgattatggaaggatgaagttgccaaattgacctgaggagattcctttctccagccaggaaaaattctgaacatcaaggagtttctgtttgcaagtttcactatttaaaagcagttatgttgcttgtgcggaggtaagtactggaccgaggcagtattatcagtttcatggatatggactgttgtgatagtttcgatagaggtgtcaaacatcaattagggtgaagtggtgagcaacatttcaaggaggtgctgatgcttgctgacaacctatgaaaaggcgtttctgtagctgactacttggtttgtccgtcagacaattctagacgtgaattttgatctgttggctagattagctgccaagtaggtatttcgtatctctagatttatgggattcacattcactcattcttgttgctattcacttgcctttgttatgttgctacatgggcgcgaaaagcggtaaggcagtcgtttcggtttgtttggtaatgcattttgcgcataaagaattataagcacaaaaaaaaaaaaaaaaaaaactcgctcgtgccttctcatgggccaaagcatacaatcgtttgatggatcgtgccaacaaatggtggtttcccgtttggaattaaaatgcaggaatagtaggaatgtgtcatatgaaacctaaaattnnnnnnntttncnnnnntatnnnnnatcnannnnnnnnnnnnnagnannnnnnatantnnnnnnnttccngnnnntgtcnannttnnncannnnngtgnnnnnnatgnnnnnaatagtgggatnnntgctatnnnnncaannnnnnnnntnnngccctagctttnnnngtcntgtttttgcatcnnnnntacnnncnnnnngcccaaacttgcttcacagatttgccatnnnnnnnnacgnnaacctcgtacttctcaaaatactgccaaacatttgaagtggacttctttgcttgcttcaactttgaaggatcatcctcatccaaattaattccttnnngatttgcaccntattcatgagatgttgcagcaggtgnnncgatangcggacacaccaaaaggnngactcgtatttgcatgaggtggcgatgtcaagttnnnnctnnnnnnttcactaggcaatcccnnnnn

SEQ ID NO: 7586 - DNA, 1756 bp, Zea mays
  misc_feature (1)..(9): n is a, c, g, or t
  misc_feature (1756)..(1756): n is a, c, g, or t
  Peptide Sequence Number=SeqID_12912
  Probeset Number=SeqID_21989
nnnnnnnnnggtcgcacccgcaccggcccctctccatctctgcgtgatggacgcccgcctcggcttcttcctcctcctcgtcgccgcggcgttcgcgccgctggtctccgcgcagctctctgcggatttctacaagacgtcgtgccccgacgccgagaagatcatcttcggcgtcgtccagaagcggttcaaagctgaccccggcaccgccgccggcctcctccgcctcgtcttccacgactgcttcgcaaacggctgcgacgcgtccatcctgatcgacccgatgtcgaaccaggcctccgagaaggaggccggccccaacgtctccgtgaagggctacgacgtgatcgaggagatcaagacggagctggagaagaagtgcccgaacgtggtgtcgtgcgcggacatcatctcggtgagcgcccgcgactcggtgaagctgacgggcgggcccgagtacgcggtgcccctggggcggcgcgactcgctcgtgtccaaccgcgaggacgccgacaacctgccgggcccggacatcgcggtgcccaagctcatcgacgagttcgacaagcagggcttcaacgtcgaggagatggtcgcgatgctgggcggcggccacagcatcggcgtctgcaggtgcttcttcatcgagaccgacgcggcgcccatcgaccccaagtacaagaagacgatcagcgacgcgtgcgacggcaaggactcgggctccgtccccatggactccacctcgcccaacgacctggacgggagctacttcggcctggtgctggagaagaagatgccgctcaccatcgaccgcctgatggggatggacaagaagacggagcccatagtgaaggccatgtcggacaagaccaccgacttcgtccccatcttcgccaaggccatggagaagctcagcgtcctcaaggttctcacggggaaggacggcgagatcaggaagacgtgctccgagttcaacaacccgcagaacaccagcggcagcacgtcggtgatacggatcagctccatcgaccccgaccagatggccggcctgtcgcagccagggtcgacgtccaggaaggtgggccctcctcccgtcgaggaggaaacacccgccatggtggcgaccgaagcggccgccaaggttcctggcggggtggtcgtcagcgccggagaccaggataggtccggctccggctccggcccgaagctccgcggcagcgtggaacctgtagtgaacccggtcccggcggcgcccggcggcgccgaggaagctgccaagcagcaggcggtgacggccctggaggagaagaagaagaggaacatggccaagctccgcgcccccggtcaggccaagctgtagatggatcatcgtcggagtaggtgttcgggccttcgggctgccactgccactgtgccaggtcacccaagtcatattttttttctctctctctctgtccctttcgtttgtgcaagaagggacgagcaaagtacctaccgcagcggattactaaattgtctaattacgcaattgtcgtgtcgagtttactaaagatgaccacaggtaccttcttggtgtccccggtcggtcaggagaagtcctgtggaggcatgctcaagtttagtatatcgcttttgcttaataattgtctgcgtgcaaaactacgtgaggatgtggtaatgaatcgttaatgtaataaagtatttaaatttgacattatttcaaaaaaaaaaaaaaaaaactggggggggggccggn

SEQ ID NO: 7587 - DNA, 2623 bp, Zea mays
  misc_feature (2157)..(2157): n is a, c, g, or t
  misc_feature (2623)..(2623): n is a, c, g, or t
  Peptide Sequence Number=SeqID_12913
  Probeset Number=SeqID_21990
attcggctcgagccaccacagcacagggacagcagcagtgccaccgccaccaccaacaccaaccatggcctccacagcgtccctgcagcgcttcctgcccgcctccccgcacgcgtcgtcccggcgccgcgccggccgcgcccgagcggccgtctccatcccgtcgtcgtccccgccggcgacacgggataatgaggtccccgcggagcggctggagccgagggtcgaggcgcgggagggagggtactggtccctcaaggagaggtaccggaccgggctgaacccgcacgagaaggtgaagctggagaaggagcccatggcgctgttcatggacggcggcgtcagggacctcgccaagatccccatggacgtgatcgacgccgccaagctcaccaaggacgacgtcgacgtccgcctcaagtggctcggcctcttccaccgccgcaagcaccagtacgggcgcttcatgatgcggctgaagctgcccaacggcgtgacgacgagcgagcagacgcggtacctggcgagcgtcatcgaggcgtacggcgccgacgggtgcgcggacgtgacgacccggcagaactggcagatccgcggggtgacgctcccggacgtcccggccatcttggacggcctccgcgccgtcggcctcaccagcctgcagagcggcatggacaacgtgcgcaaccccgtcggcaacccgctcgccggcgtcgacccccacgagatcgtcgacacgcgcccctacaccaacctgctctcctcctacatcacaagcaactcccaggggaaccccgccatcaccaacctgccgaggaaatggaacgtgtgcgtgatcggctcgcacgacctgtacgagcacccgcacatcaacgacctcgcctacatgccggccgtcaaggacggcaagttcggcttcaaccttctggtgggcgggttcatcagccccaagcggtgggccgaggccctgccgctcgacgcctgggtcgccggagacgacgtcgtccccgcgtgcaaggccatcctcgaggcgtacagggacctcgggttcaggggcaaccggcagaagacgcgcatgatgtggctcatcgacgaactcgggatggaggtgttccggtcggaggtggagaagcggatgcccaacggggtgctggagcgcgccgcggcggaggacctcgtcgacaagaagtgggagcggcgggactacctcggcgtgcacccgcagaagcaggaaggcctgtcgtacgtgggcctgcacgtgcccgtgggtcggctgcaggccgcggacatgttcgagctggcgcgcctcgccgacgagtacggcacgggcgagctccggctcacggtggagcagaacgtcgtgctccccaacgtgagcaaccggaggctggacgcgctgctcgcggagccgctgctgcagcggcagcgcctctcgccgcagccgtcgctgctgctccggggcctggtggcgtgcacgggcaaccagttctgcgggcaggccatcatcgagaccaaggcgcgggcgctgcaggtggcgcgggaggtggagaagcgcgtggccgtgccgcggccggtgcgcatgcactggaccggatgccccaacagctgcgcccaggtgcaggtggcggacatcggcttcatgggctgcctcaccaaggaccgcgacggcaaggtcgtcgaggccgcggacatcttcgtgggcggccgcgtcggcagcgactcgcacctggcggacgtctacaggaagtccgtgccgtgcaaggacctggtgcccatcgtggccgaccttctggtggagcggttcggggccgtgcccagggagagggaagaggaggatgaggagtaggagcagtggagcacagacttcccggtgaccatccacggtttgttgtaaagtagacgcgctgccttcttccatggcacgatttgttttggtattgtcgtagcaacaaaatgtccccttattcacgtcacagagaataagtaacccgcttccctgtcaatcatcaaaaaaaaaaaaaaaacactatctgtggggggggcctgcgccctttttcttctttttttttttttttttttcatatgttttttttctggttccttttcccttcttctttttcttggttttttctattttattttcttctttttttgtgntgacattatgctttatcttttctttttcttttctcttcttgctttcactttgtgttttccgctccttctcttcgtccccttcctttttttctcttatctttttaaccttttctctttcttcttgttttgttattaatctccttttttttgatcaatcgttttgattgttttaaaggcaatcgttttgcctatttgttttccccggcaccgttttcttgcttctctttgtttctccatttcctctcttacttttttttttttctcttatcctttttttcgttctcttctcttttttatcttccttgtactatgcttatttttatcccttgtacatgtttttctctttattttacctcctttattactgttatattccactcacttcgtcaccttttctttttcttttttactttgtctttacctcatgttttaatcttttgttttacgtttttttaattaatgtatn

SEQ ID NO: 7588 - DNA, 2354 bp, Zea mays
  misc_feature (1)..(18): n is a, c, g, or t
  misc_feature (1098)..(1098): n is a, c, g, or t
  misc_feature (1543)..(1544): n is a, c, g, or t
  misc_feature (1547)..(1551): n is a, c, g, or t
  misc_feature (1557)..(1562): n is a, c, g, or t
  misc_feature (1573)..(1573): n is a, c, g, or t
  misc_feature (1575)..(1577): n is a, c, g, or t
  misc_feature (1583)..(1588): n is a, c, g, or t
  misc_feature (1595)..(1602): n is a, c, g, or t
  misc_feature (2353)..(2354): n is a, c, g, or t
  Peptide Sequence Number=SeqID_12914
  Probeset Number=SeqID_21991
nnnnnnnnnnnnnnnnnncgtgggtgaagatgcaaaacggtgcctcttgaatgacttgcacattcttgatcttgaaaccatgacatgggatgatgagagctcactagtccccccccccccccccttcttaatgcacacctaatgagaagataaggccattatttgtttcgtgaatctttgctatgtgagcttaaaatgtattttttttaaaagctcctagatttggttggcgcactggtaacccagcatgattggtttacatggtaactttaacgctatcaagcattagcttttactaacataaaaatgcaaaataaatatagattgtatcaagaccttaaacatatttttcgtagttaggtaaggttatcttgtatttacactttcattatgaaggtgtaatatacgccccctcccccaatgtattttttttatgaaaggctgtattttaataacatgtatatgtggtttgtggaataatctctctaggtcatcatgcacatgttctgaatcacaaagcaatggtcttttttaaagccaaccttgtgttattgtattttgaattcagttcatcgtggtgttggcttttgtgttttagaggcacccctcctccgagatcggatcatgctgctgcttgccatgctgaccgctatcttttgatttttggtgggggatctcatgcgacatgtttcaacgacctacatgtccttgatttgcagacggtgcaaacttaatcttgctggaagtctgtaaagatttgtgtgttatctgtgactgctatttttttttgttggaactacagatggagtggtcaagacccaaacaacaaggcctgacgccaagcccaagagctggccatgctggtgcaactgtcggggagaactggtacatagttgggggtggcaataataaaagtggtgtctctgatactcttgttcttaacatgtcaactctgacatggtcagtggttagcactgcggaaggacgagttccccttgccagtgagggcatgactctagtgcatagcaattacaatggatacgattatctcatctcatttggaggatacaatggacgatacagcaatgaggtttatancacttagcctcaaatcagattttaagtcaaccacaaaagaagaaactgtctcagatactacatctagggtcgtggaaccagaggttgaaatggtgattggcgtggacagtgctgattcagacctgaagaacagtactgatgaagcaagtgaacagttcttagcagctctcaaagctgagaaagaggaactagaagcgacacttaacagggaacagctgcaaactgtacaacttaaagaagacattgctcaagcagagtccagaaatgtggaactcacaaaggaacttcaagccgtccgtggccaacttgctgctgagcagtcaagatgtttcaaacttgagttatacattggcttcttgttgcaatcaaacgagttgcacgacagataaatacaatgctctgatcatacataatttctgaaacacccctaggtcgatgttgcggnnctnnnnnagaagnnnnnnagtatggatgnannnaaaaannnnnncgagctnnnnnnnngacagagagccgcgtcagagcaagcagcgctggacgcaaagcagcggcaaagttctgggggcatgtggagctggctcgttggtacccctcctgatgataaatctgaatcgtgatcgcgtcgtgagggcagcactttagggtgcgtttggttgaatggacaaagagggacggaacgaggcggccacagtttcagtcatgtttagatgagggtcaagcaggggcgagttgaaccctagaccatttttcggtggcggcgccgtccccaaaaaacgagcggatgaagtcgcccccgcccctgtcgcggtgctgaaaaaatcgtgttgcctcccaacaagtgacaaaaccatcatccaaacaaaaactgggttggttctatccaagtttatcccttcaaccaaacaaaaacagtagtgactgttaaggatgaccctgcccctaaattagggatgaccctattccatcctattttgactccaaaccaaacacagctttagttcatacaggtcgtgattcatatattatactcgtaacatttatatacccgttgatatttttttacagttactgaattcgtgttcatttgaccacagaagataagaaaatcattagttttatgccttgttttggcgtattgcaatcgctcaaatgtatcaggaagtttcaacattatttcttgaaaagctagatttcaacattgtcatcatgtattggtccaccttttgacgacatggttcaatatatgttattcgtnn

SEQ ID NO: 7589 - DNA, 1507 bp, Zea mays
  misc_feature (1)..(4): n is a, c, g, or t
  misc_feature (22)..(24): n is a, c, g, or t
  misc_feature (1428)..(1507): n is a, c, g, or t
  Peptide Sequence Number=SeqID_12915
  Probeset Number=SeqID_21992
nnnncctcgaggccggccgggnnnactgccggttcagtcatcaggttttcagacaaaacgatgcaaccggcatgcgagtgatcatcaccagaacatgatccttttggtgaagcaccaagacacagatcaatcaagtgtcgagattacggtagccactgaccataccaccaactatcaaaacaagaaggttttacacgcaccaacaggagccccttccgccacttgctcgccgggatcgtcgccggaggaaagcgccatggatcggtaccagcgggtggagaagccgccgcccgagcccgccgccatcggcgagaatgagatccgcatcaccactcagggcctcgtccgcaactacgtcacctacgccacctccctcgtccaggaaaaacaggtgaaggaaattgcgttgaaggctatgggacaggctataagcaaggcagtggctattgctgagatcataaagaagaggattcctggtttgcatcaagatacaataatcagttctgtcagtattactgatgtatgggagcccattgaggaaggacttgtaccattggagatgactcgtcatgtttcaatgatatcgatttccttgtcacctaaggagcataacaagaattcacctgggtatcaagctcctctacattcggatcttaagccacaaagatatctgcaacctcagcaatatcaacagtaccagccaagacaacatcaagttcaaacagattcatatggacgcggccgaggcagaagcaggggccgaggaaggggctggggtactaggggtgggtacggcggaggctatggtggatatgaatatgataacaaccaagtaggttatggtgggtatgaacaccacggtggatatggacatcaaggtggatatggaaaccagggaggatatggccacaaccaaggtggctatggccacgaccaaggtggctatggcggttatggttacaaccaaggtggatatggaggatatgaaaatggaggctggaactacaaccggaacagaggcggtggcggccgaggacgaggcaattggggctatggtggtcctggatatgaccgtggtggcagaggcgcaggtggccctggcggcaggggctatgttcgaggccgtggacgaatgggtggcggccgtggacggggcaaccaaaactactattagagcaagggcattttccacggccgtattgctgtatgtttcctctagtcctcccagattttagtataatagccaatggtgcctgtaccattgcatcaattccgtgggattttgacattagtccttcagttttcccctgggacatctttcctgtatttaaagagtgcatttttgatagctcatcagcatccagttacgcgtttctccgcagtgtgtattttggtgacagtttcgcccaactgtttgtaccttggctnnnnnnnnnnnnnnnnnnnnnnnnnnnnnnnnnnnnnnnnnnnnnnnnnnnnnnnnnnnnnnnnnnnnnnnnnnnnnnnn

SEQ ID NO: 7590 - DNA, 2375 bp, Zea mays
  misc_feature (1)..(1): n is a, c, g, or t
  misc_feature (1357)..(1357): n is a, c, g, or t
  misc_feature (1846)..(1847): n is a, c, g, or t
  misc_feature (1900)..(1904): n is a, c, g, or t
  misc_feature (1922)..(1923): n is a, c, g, or t
  misc_feature (1955)..(1957): n is a, c, g, or t
  misc_feature (1959)..(1959): n is a, c, g, or t
  misc_feature (1961)..(1963): n is a, c, g, or t
  misc_feature (1969)..(1971): n is a, c, g, or t
  misc_feature (1973)..(1975): n is a, c, g, or t
  misc_feature (1987)..(1989): n is a, c, g, or t
  misc_feature (2038)..(2039): n is a, c, g, or t
  misc_feature (2070)..(2072): n is a, c, g, or t
  misc_feature (2142)..(2144): n is a, c, g, or t
  Peptide Sequence Number=SeqID_12916
  Probeset Number=SeqID_21993
ngtttgttgtgctcgtggttgcgttgttcgcgagcgacatctttcgcgcgtcgtcacgttgattcgcgcgtgttgtttcgcagccgcagtgttgtttctcgcacgtcttcgcgtgtagttcgcacgcgttgtcgcgcgagtgtcgcgtgtcgccacaagtcgtttgtatgcgtcgcgtgtgccatttacatgtgtcgcttgccttgccacgcgttgttagcacgtatctcgcgtgtcgatcacgtgtgtcgcgcatcgtctgcgcgtgataataaattatttgcacttataagcattcacgttaataacgttaatttgttaggtctcatattttaaataatttatttaatgtttgctcgactaatgcggattagactaatattccgattaggttatgaatagtttccaacttgcgttgtgataataaacactaacatggttaacattaacttaaattctttttatttatttaatatttgtttagtataaacgcgtcgcctatttatttccttctcgccgtcacgcgtgttgttccgcacgtggtgacgtgcctggttcacgcgtcgttcgcgctggtcgcgcgcactgtttcgtgtgtcgtcagcgtgctatgtcgcgtgtggctgtgcatcgttcgcgctggtcgtgcgcactattttgtgtgtcgtcagcatgctgtgtcgcgcgtgtccgcgtgtcgtttgcacgctgtcgtactgtttcgcttgtcataaattcgtctcgcttagaatctcttgtgttaattaaattacttatttatttgacagttgttagtgtagcagattaatcaaactaaatagtagatataatttataattgataaggtcgaattaattgttagcgttaatacttgtttagcgtaaacgcgatattttcccgatcgtcgcttcgagttcgacatttctttccctcgcgtgactatagaatcgagctctgttttatgctgcatatttttatatcattttatcttgtatggtgtaatgttattatgtatttatatatgtttgtttgcttgtgcttgttcgtcttcgcttcgtgttgcgattagatcgtgatttgttcccgcacttcgaggaatcgatgatcaagcttcgacgatcaagtgatctagctcttcgagttccatgaggctgaagaccctgagcatctgtttggtgaaggaaagtgtcctctgacccattatgtcccattcacttttaatgcactatcccgcattacttaattgaaacctaaggattgactagctttccatttaccttatccttgtttaccttttgggttatcatggttagcattatgctattgctttacttgaatcaatgaacatgatgtgaanatttatgatatgatactgttatcttgattatgttgatgatcttgtgatactttagggggctcaggcctttttcctgagtacctctccgtaaggacctgttcgtggagtgaccacctgagataacagtgcaaccatgagggtggaatgggacgcccttagctgattaattagatgaacctaggggtgtagttcgctttgccggaagggccgtcaatgggggtcgaggcgtagtgctcgctctgccaaggttggggtgcagaggttcattcgatttggttttgttagtcacccaccttggggaggtgtactacgtttgtacgactggcaaaacctaatgagcagctatgcaccaggggagtctttgtaaaggctacgtagtgtatccctggccattcaccttggtagtgaagatcagatctgtacaacccaggctggaaagggatcacgactcgtgggtaaaatgtgcaaactctgcagagtgttagaaannggtatatcggtcgagctcacggttaagagcagccttgggatcctctttgattnnnnntacaaatggttcgagttnnaatggttctatttatgattttggttcgatgannntnannntgttcnnngnnnaggaaatggttnnngggtttgttattactaaaatttggcttcccctgataataaaatacctgnncaagtaaaagcaactgcttgagcttaacccnnnataaagctagtccccctcagccaaacgggacatttgctgagtatgttgatgtgtactcacccttgctttnnnaaaacaccaggttacctttggtgcaatctatgcttaggtaaaaaaaaaggcgtcgaggcggatctccaggagttccggggcttcgatgagttcgaggattaggctagcgactacccccagtcagctgcctgtggtgggtttatttacgttggctacgtttctattctgggtactttgattatattatgtaaatgactctagtcttttatattattacttactctttattgt

SEQ ID NO: 7591 - DNA, 2242 bp, Zea mays
  misc_feature (1)..(4): n is a, c, g, or t
  misc_feature (1551)..(1551): n is a, c, g, or t
  misc_feature (1553)..(1579): n is a, c, g, or t
  misc_feature (1588)..(1597): n is a, c, g, or t
  misc_feature (1599)..(1604): n is a, c, g, or t
  misc_feature (1607)..(1615): n is a, c, g, or t
  misc_feature (1617)..(1641): n is a, c, g, or t
  misc_feature (1643)..(1669): n is a, c, g, or t
  misc_feature (1671)..(1697): n is a, c, g, or t
  misc_feature (1703)..(1725): n is a, c, g, or t
  misc_feature (1733)..(1761): n is a, c, g, or t
  misc_feature (1771)..(1771): n is a, c, g, or t
  misc_feature (1773)..(1789): n is a, c, g, or t
  misc_feature (1792)..(1796): n is a, c, g, or t
  misc_feature (1800)..(1806): n is a, c, g, or t
  misc_feature (1808)..(1822): n is a, c, g, or t
  misc_feature (1829)..(1836): n is a, c, g, or t
  misc_feature (1838)..(1846): n is a, c, g, or t
  misc_feature (1863)..(1875): n is a, c, g, or t
  misc_feature (1878)..(1896): n is a, c, g, or t
  misc_feature (1899)..(1901): n is a, c, g, or t
  misc_feature (1903)..(1903): n is a, c, g, or t
  misc_feature (1912)..(1914): n is a, c, g, or t
  misc_feature (1957)..(1967): n is a, c, g, or t
  misc_feature (1980)..(1980): n is a, c, g, or t
  misc_feature (1982)..(1984): n is a, c, g, or t
  Probeset Number=SeqID_21994
nnnntatcccgcgggggcacgcgggtatgcacaccatctgtgactctgtgagtggctgcggcgccggtatttatacgctcctctttcgccaaatacggagagtcggagaccccaaacctctgtcgaaagtttcacctccggtcgctggtttcctccaatctccgtggtagttcagcgcgagcgggcggcggggtttgagctcgatggccacttccggcgaacaatcggctggcggcgggtctgcggcgagggcgtcgaagctgcggtacccgctgcggtcggcgagcaaggggaaggcggcggtcgtttccccggcggctgatgctcctcccaccatctctgctccgcgacgggcaaaaccatcttcagatgtcagcaagagcatgtgtttagacctttctgtgaaggataattctgccaaacccccacggaggcactcaatacaaaccaagccaggagctagcccaaggccaacaccttctggaactgtgactccggtgtctggggttcggtcaaagagatcggaaagccaggggaggtttgataccccgacatcagaagtgtccatgtccatctcaaggcgcaagttcagcacgctttcttcaatctcgtactggatgacacagatcaggctggcagaggctgcttccaagcactcggtttctctgggcttctttaagcttgctcttgaatcagaatgtgagcctttggaccggatgagggaagaactcaagtcctacgtagcacggcatggcctggcgacagaattggaggacccagttaaggacattctccaggtttatgatattttggatgattttgagaagctgaagatctctgcagagccctcacagcaaccaaaaaagtctgacaaggctgctcgtactgccacaaatgcgtcaccgaatggtaacctgaagccaaggtcactgaactctgatgctactgaaagcaaggaagctgtaaagaaagagggcattcagaaagtaaatcctggtgcaagggtcagaggctcctgtaacaggaatccagtcaaaaacaccaccgcaaaggaagcagttgccaagaacaccggtaaggaaaccaagaaaggggccaagggtcagcaggaagttagcgaggctccgtcagcccttccaaatcaggaatctgctgatgttgtgaaggagatcacccatgaagataaagagaacatgggcgatattgaaatggcagtggatgtcgccgtagcccaagatatctagaacagccggaccaacttcagattcgatccccttttttttctatcgctgaagatgaagtgttagcgtgtggttgcttattttggttttcaattgttaatatgttattagtagagcttgtctgtgtgattgcttgctggctggaccttgaacggtcttcaagagcgtgtcataagttgatgattgctttcattcctctgtcaagtttgcggctttgcatgtgctaatccgtgcaactgaatatagttgaattttataaaaaaaaaaaaaaacaccggaatctagagaattctcgtggttcctccgggcngnnnnnnnnnnnnnnnnnnnnnnnnnnngtaaaaaannnnnnnnnntnnnnnnaannnnnnnnngnnnnnnnnnnnnnnnnnnnnnnnnnannnnnnnnnnnnnnnnnnnnnnnnnnncnnnnnnnnnnnnnnnnnnnnnnnnnnngccttnnnnnnnnnnnnnnnnnnnnnnnagggggannnnnnnnnnnnnnnnnnnnnnnnnnnnncccaggtttncnnnnnnnnnnnnnnnnnaannnnnggcnnnnnnntnnnnnnnnnnnnnnntataggnnnnnnnngnnnnnnnnnccccccccgggaggggnnnnnnnnnnnnnccnnnnnnnnnnnnnnnnnnnttnnntnttttttttnnnactcttaccattaaattcactcaaggatccaaataagcctgannnnnnnnnnncttcctcgagggnannnaagctgcggtacccgctgtggtcggcgagcaaggggaaggcggcggtcgtttccctggcggctgatgctcctcccaccatctctgctccacgacgcttgtagggcctctggacttatgctgatcaacgcggcggagctcatgatggtcgtcccgctcagtgggaggacgcatcccagagacgtaatcgacatggaggagctggctagaggattcacaaaagattgaggaaactgatgaagcaaggaaaaaattctcta

SEQ ID NO: 7592 - DNA, 3038 bp, Zea mays
  misc_feature (1)..(1): n is a, c, g, or t
  misc_feature (16)..(19): n is a, c, g, or t
  misc_feature (483)..(483): n is a, c, g, or t
  misc_feature (501)..(502): n is a, c, g, or t
  misc_feature (504)..(505): n is a, c, g, or t
  misc_feature (521)..(521): n is a, c, g, or t
  misc_feature (530)..(530): n is a, c, g, or t
  misc_feature (548)..(549): n is a, c, g, or t
  misc_feature (555)..(555): n is a, c, g, or t
  misc_feature (557)..(559): n is a, c, g, or t
  misc_feature (561)..(561): n is a, c, g, or t
  misc_feature (567)..(571): n is a, c, g, or t
  misc_feature (574)..(574): n is a, c, g, or t
  misc_feature (577)..(579): n is a, c, g, or t
  misc_feature (581)..(581): n is a, c, g, or t
  misc_feature (583)..(583): n is a, c, g, or t
  misc_feature (2517)..(2523): n is a, c, g, or t
  misc_feature (2528)..(2532): n is a, c, g, or t
  misc_feature (2534)..(2547): n is a, c, g, or t
  misc_feature (2553)..(2572): n is a, c, g, or t
  misc_feature (2574)..(2595): n is a, c, g, or t
  misc_feature (2597)..(2604): n is a, c, g, or t
  misc_feature (2607)..(2614): n is a, c, g, or t
  misc_feature (2616)..(2620): n is a, c, g, or t
  misc_feature (2622)..(2640): n is a, c, g, or t
  misc_feature (2650)..(2651): n is a, c, g, or t
  misc_feature (2653)..(2662): n is a, c, g, or t
  misc_feature (2664)..(2669): n is a, c, g, or t
  misc_feature (2681)..(2681): n is a, c, g, or t
  misc_feature (2683)..(2692): n is a, c, g, or t
  misc_feature (2697)..(2699): n is a, c, g, or t
  misc_feature (2905)..(2905): n is a, c, g, or t
  misc_feature (2914)..(2915): n is a, c, g, or t
  misc_feature (2931)..(2933): n is a, c, g, or t
  misc_feature (2935)..(2935): n is a, c, g, or t
  misc_feature (2959)..(2960): n is a, c, g, or t
  misc_feature (2962)..(2962): n is a, c, g, or t
  misc_feature (2983)..(2985): n is a, c, g, or t
  Peptide Sequence Number=SeqID_12917
  Probeset Number=SeqID_21995
nctggttagatcctcnnnnacaatggactagtttaattcgtctgttttgcatagcatttgctacgccactcatgtcactagtaagctcttgctatgatgctaccccaaaatgggtatgctgcatagcctgcaggagctatgttctatcaacttgtgcatgtttggtaatttcttaacagcatatgcatcaaacattcttgtgacacctcgctgcaatgagtagggacaataagttgataagtttgctcaaacaattgagatccttcctcccagtgctttttttttcctaatcgtatattgacctgcaagatgattgtgctcgtacaggcatgccttctatttgttccttccatactgagtatccgcttaagatggagatattgattctaacttttgaactctgaatcacaggctgagggtgccatcatggctctgaattgcagcgggatgattttgggaacactgcctgtcaggcatgacctnccctctagccacattctnnanntctctttatttgtagnttatctagnctgaaaaactgaacatanntgtatntnnnantgctgnnnnnctntgnnntntntcggggccggggagcccacaacccgccggcccttctcctcctctccggtttccgttttgattcctcccgattctctctcgcgtagtcgcgtaaatttcccagcccgaaaatggccatagccttgaggcactagtaggcacagtagaacccaaccgcggcccgctccagcagccccaccccatcgacgccgtcggcgagggcacccaggtccgcgtcgcaccacgtcagccacacacccaccaggccaccaccgccctcagctccggtgtgcagagacgctggatggcctcgcaccagtagaatccgtccggcactttctgccctaccccaccccactccacccatccggccgcgggtggatttgaccgatatcggcaggcggccgccggcgtctgcctcgattgatccgcctcgtctcagtcctaggtatggcggcggtggcggagggatcggcgtctgctgcggcgaaggaggtggagtaccaggcgggcgtgcagaagcttgtggacctgctctccaatctcaacccggccgccaaggagttcgtcccttcctcggctccggccgcggctgcgtcgccgcccaagaaagcgttgtcggcggatgcgccggtgttcgattaccgctccaccgcaggcggcaacggggccaccgacgatcccttttacgttgggtttgggaaccagcagcgcaagagagggaatggatacatcaaccaaggaaggaggaggacaaatgataggttgaggcgtgcagacagagaggacagcgttaggcgaactgtttatgtctctgaacttgatcatactgtgacagaggagagacttgctgatatctttgctacctgtgggcatgttgttgattgccgaatttgtggtgatccccactcagttcttaggtttgcatttattgagttctctgatgaagagggtgcaagaactgcacttaaccttggaggcacaatttttggtttctaccctgttagagttttgccttcaaagacagctatcttacctgttaatccaaagtttcttcccaggacggacgatgagaaggaaatggtcatgcgaactgtctattgtacaaatatagataagatggttactcaattagatgtaaagaaattctttgaagaactttgcggtgaggtctctcggttgagacttctaggagacaatgtacattccacaaggattgcttttgttgagtttgttcatgctgagggtgccatcatggctctgaattgcagcgggatgattttgggaactctgcctgtcagggtgagtccttctaagactccggtgaagccacgtgtaaatcgaatgggatctaactgactctgcctaagctcaaccggaaggcatggccataagctgaaggcttccgcggtcctgtgcatcatgatgcatctgcttacattcttacaaacactctgtttgtacccttttgcaaacctgttggaagggaactggttaggtcaggcccttttgccttgcatttcagacatgatggaaccattgagaatgactattcggcaatcaaccatcaagtaacttctgtcaaaaaaaaaaaaaaaaacgccttagatgtttggctgccggtttggattcagctgcagctgcaaatctgtactgttgctacagcatttgctttcttatgtaaccagccggcagcagcagctgcttctgcacaagcaagaatccaaacatgattgcaacgccgagttccctgtcctcgtctacgaaggaaaaatcccaaatgacaatttatgtggaaattctcaattggctaccaccacttgtctgacattgtagtcgttaaagtctgtaattttgctatgcatttatacgtctttaggggtctgattctattattctaacatcagtatttcacgtttacgattccaaaaaaaaaaaaaaaaaaaaaaaaagggnnnnnnnaagcnnnnnannnnnnnnnnnnnngtgggnnnnnnnnnnnnnnnnnnnntnnnnnnnnnnnnnnnnnnnnnnannnnnnnncannnnnnnnannnnngnnnnnnnnnnnnnnnnnnnaatcaggcanntnnnnnnnnnncnnnnnncgggcttggagngnnnnnnnnnnatccnnnacgccctgacgaagccgccgttggccgccgccgcgccctccacctgcaccgcgcgggaccggcacttgccctccgcgtcgaccaggctggggtcgacggtaaacacccacccgtgctggcggccctcgcgacgcatcgtgctgatttgcgctggttgctgtgttgggattggagtgcattttttaaaattttcccggccgggccgnaaatctccnngcgaggaacttaaccnnnangtttgctttgctttgctttccttnncntccggatcgggcgattcctcnnncgcttacgccaggaacggcggcatggcgctgtagtaggtgggcttccacccag

SEQ ID NO: 7593 - DNA, 2223 bp, Zea mays
  misc_feature (1)..(2): n is a, c, g, or t
  misc_feature (302)..(312): n is a, c, g, or t
  misc_feature (662)..(662): n is a, c, g, or t
  misc_feature (720)..(721): n is a, c, g, or t
  misc_feature (739)..(739): n is a, c, g, or t
  misc_feature (779)..(782): n is a, c, g, or t
  misc_feature (784)..(784): n is a, c, g, or t
  misc_feature (786)..(787): n is a, c, g, or t
  misc_feature (789)..(791): n is a, c, g, or t
  misc_feature (793)..(794): n is a, c, g, or t
  misc_feature (801)..(801): n is a, c, g, or t
  misc_feature (809)..(809): n is a, c, g, or t
  misc_feature (2105)..(2107): n is a, c, g, or t
  misc_feature (2126)..(2128): n is a, c, g, or t
  misc_feature (2133)..(2133): n is a, c, g, or t
  misc_feature (2135)..(2137): n is a, c, g, or t
  misc_feature (2140)..(2142): n is a, c, g, or t
  misc_feature (2144)..(2145): n is a, c, g, or t
  misc_feature (2157)..(2157): n is a, c, g, or t
  misc_feature (2159)..(2160): n is a, c, g, or t
  misc_feature (2163)..(2163): n is a, c, g, or t
  misc_feature (2182)..(2182): n is a, c, g, or t
  misc_feature (2184)..(2188): n is a, c, g, or t
  misc_feature (2192)..(2194): n is a, c, g, or t
  misc_feature (2208)..(2213): n is a, c, g, or t
  misc_feature (2220)..(2223): n is a, c, g, or t
  Peptide Sequence Number=SeqID_12918
  Probeset Number=SeqID_21996
nnattgttgagccgttcacagctcattatgtgtttgcactgggtgttgcaaggtttcttagctgtgcacattgggtccttcaggttcttttttttttgtctcccttcctgttttatttaccattaaaagaactaccatgctagttcatactttctggaacaaagtgtcaattggtcatatattatattgccctaatgttagtagagtattaaaaaatgtcttccccgttagttagactatggaccaaatcatttgaaaggtcttgactcccaagatatcctagtctgaaaagacaggatggnnnnnnnnnnntatacaaaacaaattcagtacatcataaggtatagatgagtaatgattaatgaaacagcaaaacattttttttaaatttaggtgtgatttttttgttattgatatcatcggctgtgtttgtgtccattgcaaaatgtgctgggatgtactttactttgttctacctcatcccgtgctgtatggtattttctcagtatctgcgctttcagcaaaaaaaaaaaaacctaccaaatatttgactggtcattgagaccttattgactagtgaagcctgaggaatgcttgtattgacattccttatgaatatttgtgtacagtatctccagtttatggctgtctactaggagacntgtgtcttgtggtgttcatgcatggaagcatggagatggaggaaatatcctccttacnngtgggttttagatgaatngaagtttcaattcgtgcttttgcagaattcaaggtttttnnnngntnngnnngnntgatatnagttttgnttactctcgtaaacgaaaagaaataaatcccttctccgatcggaggcggcgacgggcgacgggcgacgatgagggcgtcgaagcggccgctcggcgtggtgacggcgtgggtgcgccggcagccgcccaaggtcaaggccttcctcgccgtggtcaccggcatggccgcgctcgtcttcatccgcttcatcgtccacgaccacgacaaccttttcgtcgccgccgaggccgtgcacgcgctcggcatcgccgtgctcatctacaagctcaccaaggagaggacctgcgccggactatcccttaagactcaggatttaactgcattgtttctagctgttagactatactgcagctttgtcatggaatatgacatccatacaattctggacactgctacacttgtagccacactgtttgttatttatatgatacggttcaaactgaggtcaacttatatggtggataaggataactttgcgttgtattatgtggtgttaccgtgtgctggactggcactacttattcatccgtcaacatctcataacattgtgaaccggatctcctgggggttctgtgtttacttggaagctgtttcagtgcttccgcagttacacttgatgcaaaatactaagattgttgaaccctttacagctcactatgtatttgcattgggagttgcaaggtttcttagctgcgcccactgggttctacaggttttggacacgcgtggtcgtctgttgacagctcttggctatggtttgtggccgtctatggtgcttttatcagaaatcgtgcagacattcatccttgcagatttctgctactactatgtgaagagtcttgttggtgggcaactggtgctacggcttccctcaggggtggtgtaagaagtgcagaagagatactctgaataacagttatgctctagtgcccaacctgggagccttcttttagctgatgatgttgcaagtaatgactatgtatgacaaaattgctgcaagggttctcttaaaacatagtttgtcattgagacttcagaaaaaaaaaaaaaaaaaagcggccacactgacgcgtaaaaagcataccgtccatttcttctgtgttactaaatcatacaaagcaacagtcatgctcctagtgcccaaactttttcacctctcaaagtggattagcagagccccgttaatcttttttacttgtaaactgtttacgtgaatactgtaccgacaccgtggaacgtaggccgtccgtctgactttttcatccatgctagagttgaagcttgtcgcatttccnnnaaaaagaccagattttccnnnttcantnnntgnnngnntattgtagaaananncgngacgctatgatagattgtnannnnntttnnnattaattataaatnnnnnnaattttnnnn

SEQ ID NO: 7594 - DNA, 3707 bp, Zea mays
  misc_feature (1)..(11): n is a, c, g, or t
  misc_feature (3243)..(3244): n is a, c, g, or t
  misc_feature (3250)..(3261): n is a, c, g, or t
  misc_feature (3263)..(3265): n is a, c, g, or t
  misc_feature (3267)..(3269): n is a, c, g, or t
  misc_feature (3272)..(3274): n is a, c, g, or t
  misc_feature (3276)..(3288): n is a, c, g, or t
  misc_feature (3293)..(3298): n is a, c, g, or t
  misc_feature (3311)..(3343): n is a, c, g, or t
  misc_feature (3346)..(3348): n is a, c, g, or t
  misc_feature (3351)..(3357): n is a, c, g, or t
  misc_feature (3362)..(3364): n is a, c, g, or t
  misc_feature (3366)..(3371): n is a, c, g, or t
  misc_feature (3376)..(3381): n is a, c, g, or t
  misc_feature (3388)..(3394): n is a, c, g, or t
  misc_feature (3399)..(3401): n is a, c, g, or t
  misc_feature (3405)..(3406): n is a, c, g, or t
  misc_feature (3415)..(3415): n is a, c, g, or t
  misc_feature (3417)..(3419): n is a, c, g, or t
  misc_feature (3426)..(3427): n is a, c, g, or t
  misc_feature (3430)..(3431): n is a, c, g, or t
  misc_feature (3442)..(3442): n is a, c, g, or t
  misc_feature (3444)..(3448): n is a, c, g, or t
  misc_feature (3457)..(3460): n is a, c, g, or t
  misc_feature (3469)..(3472): n is a, c, g, or t
  misc_feature (3508)..(3510): n is a, c, g, or t
  misc_feature (3515)..(3519): n is a, c, g, or t
  misc_feature (3524)..(3526): n is a, c, g, or t
  misc_feature (3540)..(3541): n is a, c, g, or t
  misc_feature (3545)..(3547): n is a, c, g, or t
  misc_feature (3577)..(3577): n is a, c, g, or t
  misc_feature (3599)..(3605): n is a, c, g, or t
  misc_feature (3607)..(3607): n is a, c, g, or t
  misc_feature (3609)..(3614): n is a, c, g, or t
  misc_feature (3623)..(3625): n is a, c, g, or t
  misc_feature (3637)..(3638): n is a, c, g, or t
  misc_feature (3643)..(3661): n is a, c, g, or t
  misc_feature (3668)..(3669): n is a, c, g, or t
  misc_feature (3674)..(3679): n is a, c, g, or t
  misc_feature (3688)..(3695): n is a, c, g, or t
  misc_feature (3698)..(3700): n is a, c, g, or t
  misc_feature (3702)..(3703): n is a, c, g, or t
  misc_feature (3706)..(3707): n is a, c, g, or t
  Peptide Sequence Number=SeqID_12919
  Probeset Number=SeqID_21997
nnnnnnnnnnngcgtggcgtcgtgtggcctggctggaaatatctgaggccgtcgccctttctcaggttctcgttcccggcgtggtgtggcctggccactggccacccgtgccctatcctcttccgcacggcgtcctatatacaaggaaaggaaaaatctgccactccacacgcgctcctctctcgccgtcgccaaccatcgccgcctcgcgtccggacccgccgttcctccgaggaaatggctgcactgcaaccctcattttcaccagcaatgactttgaagagtagctgcagcgccctgaagttcccaaaaactgcactgttatctggttttggtggcattccacgccttcaagatgcgcaagacaggaacactagcgtcgcttatttgatccccaaggctgcttcagtgactgaccagtcaatagcagagccaccaaaaaccaagcaaaataggcacacagtcgacccaacagctccagaatttctgccactcccatcttttgaagaatgctttccaaggagtaccaaagaatcaagtgaaatcatccacgaggaatcaggtcatgtcctcaaggttccattccggagagtccatttgactggagatcagaagcactttgatacatatgacaccagcggtcctcaaaatataagcccaaggattggactcccaaagataaggaaggaatggattgataggagggaaaagctgggtagtcctcggtacacacaaatgtattatgctaaacagggaattgtaacagaggagatgttatactgtgccagccgtgagaaccttagtcctgaatttgttcggacagaagttgcccgtggacgagccataattccttccaacaagaggcacctggaattggaacccatgattgttggaagaaacttccttgtaaaggtgaatgcaaatattgggaattcagctgttgtgagctccattgaggaggaagttcacaagctccagtgggccacgatgtggggagctgatactgtcatggacctttcaacagggcgacatatccatgagacgcgggaatggattattcgcaactctccggttcctattgggactgttcctatttaccaagcacttgagaaagtaaatggtattgctgaaaatctgagctgggaaatttttagggataccttgattgaacaagctgagcagggcgttgattacttcacaatccatgctggtgtcctgcttcgttacattcctcttacagcaaagagaatgacgggcatagtttcacgtggtggctcaatccatgcaaaatggtgcttaacttatcacaaggagaactttgcatatgaacattgggatgacattcttgacatatgcaatcagtatgatgtggcattatcaattggtgatggtttgaggcctggttccatttatgatgcaaatgatagtgcacagtttgcagaactgctgactcaaggtgaactaacacgtcgagcatgggcgaaagatgtgcaggtaatgaatgaaggcccgggtcacatcccaatgcataaaattcctgaaaacatggagaaacagttggagtggtgtaatgaagcgcctttctatacattgggtcctttgacaactgatattgcacctggttatgatcacatcacttcagccattggtgctgccaacattggagctcttggcactgcacttctttgctatgtaacaccaaaggagcaccttgggttgcccaatcgtgatgatgtcaagactggtgtaatatcctacaaaatttctgctcatgctgctgatttggcgaagggtcatccctatgcacaagcttgggatgatgcacttagcaaggcaaggtttgagtttagatggcttgaccaatttgctttatctctggatccagtaactgctatggctttccatgatgaaacattgccctctgagggtgccaaagtggcacatttctgctcaatgtgtgggcccaagttttgttcaaagtgctgaatttttggctgcaaggaaaacaattagtggggaagaaaatggtgatggaggaggcgagatctatgtaaatgaatgctatgagtgctgaatttttggctgcaaggaaaacaattagtggggaacaacatggtggcagcaggaggggagatctatgtaccagaaagctatgcagctcagaaataaggtttccccggagccatcctttctaaatgaggctaaggcatcagcagctgttctggctagtgtctaaggcatcagcagctgttctaccatcttatctaatgagatgtctgagagcctcttagcctggactgttgtgagatgggctgagaaagtccctttgaacctgaacaggataatgcctgcgaagggagtgtgcaattctattttcctgttttccaggaacctatcaaccttttggtggaaattgaggtattgtccatgattgcatggagctcagcaacaaggtacctgttctctacttgtttgcatttctcaaggggaagattcttaacaggtatcaggttcgtcatgacatctaacaattttatttataatgtgcaagttatttagttaaatctacacgaccatgaaatttgtcaaagtatttcctagtcctatattatctagttttacttctacgtctatctgttctttgattgtgcgctccatctattctttggtgaagcttgcgggttctactttctagacctattgagataggaccttttggcacggtacaatatcaatactgttttggtgaagggagtatatttacagtagtacaaagggagatggctaaaactgctacaatttttttagatggacgatgtttgtcattgagggtgggaagtaccaaccagattgcatttgacttcatccggccatcatatggtgttctcgtctattaataaataaccaaggaagtggttcttggcaactaccctttcccgttcttgtggtttttttttcaaataggcgtgcttaaatatttcggtcttttaaattaatattataaaattctcgtctgaatatttttcaagtctagtattatgcatgataatttacatatgcatgttgtctgaaagcagaagcagattctcaaggcacctgctaattcaaaaccaaaaataggttgtaacttcgaagttgctgcattggtgaagaataatatattttagttttactctcagctgattgcttgtttgtcatgtttcactccatgcttcactctcggctgtattctgcattataccnngcttcnnnnnnnnnnnngnnntnnnccnnnannnnnnnnnnnnntctgnnnnnnttttagtttattnnnnnnnnnnnnnnnnnnnnnnnnnnnnnnnnnccnnnccnnnnnnnttaannnannnnnnaatcnnnnnnccaatannnnnnngtcannnaagnngacctctcngnnncatgagnntcnnccacccctatnannnnnatctttatnnnnctttgagtnnnntcatcacctacataaggatccacgcccatatgtcannncgtcnnnnntgcannnaaccaggagaatcnncgannnacctcactctcattggaattcgaactcagnacctgatcacctaaccaactcnnnnnnngntnnnnnnacattcttnnnttcttattactnntcccnnnnnnnnnnnnnnnnnnnttctganntttannnnnngcatttatnnnnnnnnctnnnannctnn

SEQ ID NO: 7595 - DNA, 2451 bp, Zea mays
  misc_feature (1)..(18): n is a, c, g, or t
  misc_feature (20)..(20): n is a, c, g, or t
  misc_feature (741)..(742): n is a, c, g, or t
  misc_feature (752)..(753): n is a, c, g, or t
  misc_feature (2320)..(2321): n is a, c, g, or t
  misc_feature (2323)..(2323): n is a, c, g, or t
  misc_feature (2335)..(2338): n is a, c, g, or t
  misc_feature (2341)..(2345): n is a, c, g, or t
  misc_feature (2347)..(2366): n is a, c, g, or t
  misc_feature (2373)..(2376): n is a, c, g, or t
  misc_feature (2381)..(2387): n is a, c, g, or t
  misc_feature (2394)..(2404): n is a, c, g, or t
  misc_feature (2406)..(2424): n is a, c, g, or t
  misc_feature (2428)..(2434): n is a, c, g, or t
  misc_feature (2436)..(2436): n is a, c, g, or t
  misc_feature (2438)..(2444): n is a, c, g, or t
  misc_feature (2451)..(2451): n is a, c, g, or t
  Peptide Sequence Number=SeqID_12920
  Probeset Number=SeqID_21998
nnnnnnnnnnnnnnnnnncnaccgatcccttctgaaaaatccccctcccctcccctccccgaggtctgcagcggcgaggggagagataataataatcgcaggagggaaaagcagcagcgcaggcgcaaaaagcaaatcaaagccacaccaccaccaccggcagctgccgagagctgcgcccgcgcccgaacacaagggagagcggccggagaggaaagccaaatccatccactccacccccgtacgccgccgcagctctagcagccgccgtcccgcgcgcatgggccccaaatcgccagcgccgcgacgagcgcgcctgcccccgctgctcccgcggcggcggtagcagcagcagctgctgtgtgcctcacatcttcgccggggatggcgcggctcgggcgagcgggctgccgctgctccggtccagcccgagcttttttttcaggaattcctgaagacacattgagaaattttatgtccaatgtcttgcctgctgtattgatcctggagtttctcagtgggaccaatttgattgttcaaacgtttgctctagaagtagtcgcccctgccatgcctccattccaaggttggggaccatttcattctttggcatcccaaactaaagtccttgtgagtgtttctgcacaaccagatgatggcctccaaagacaaaagaagctatattcatcagcagttgccatgtcatccacacatcctcctatttcagcacctagctatcgnnacatgcctgnnctgacatcaccggtgggggctggggaggagagggagagccttctttaagatcagtagatcaccacaccctcacccctcctcattgcccccctctcacacacgcacacacactctctctctccccattgtgtcactgtaactagcaattgagctcttaaaattttggttgaggtgcagtagcaaggcacactactacgatctacaaacaagatgatcagttgatgcccggtgtcttcaggatcttttcaggttcgcgaggtcccattttgcttctccccccgggcttgcagttgcgtttgagtgcacctctgaggctttggttggccctcgcgctgcgtacttaagctctccgccccgtccacggcgttgcatctctcatggcactcggtgtctcctgatagctgctgcttcgatctactccacctaaccgaaagagcgtcgtgtagggtcttggattcttggtccggtgctgttggcgtgtttcttgagatcgaagatccaggagatgatcctgcggcggagatcgaggtcgatgaacagcagcgccggcgcgcagaggagccacgtccccgatcagtccgcgagatcgtcgaccagtccatgcgacggtgacagtggcggggccggcgccgccggcagcaagattgcgaccgcgcgtgccctgttcgcctccccgaggctgctgcactcttcttccctgcccgccggcaccgtcgccttcgccaagagccccgcgccggacgccgagccccagacggccttctccatgagcccgacctccgtgctcgacgcggcggcggccttcgtgccgggcacggacggcgccggcaagcgccgcccgccgtggcgggcgcgggacaacaacggtctcgcggacgcgctggactgcagcgaccaccaccaccagcagcagcagcaggagcggatcgtcctcgcggcgacgccgtcgtcgtgctcgctggccagatcgtgctccctggaccgccgcgtcgagttcggcgtcaagaacaggagctcgtggctgcccctccgcggctgcgaggccacggcgccggcgccggccgacccgtgggagatagagccgtcgtcggaggactacacgtgcgtcatctcccgcgggcctaacccgaggacggtgcacatcttcggcgaccgcgtcgtggagggcggcgccggcgccggcgccgacgccgcggcggagagggaggacagctcgccgcggcagatcaatctgccggcgcgcggcgaccggggcttcttcagcctgtgaatgatcccacccacatccatccacgagcgtgcgcgtagactgatgcctaggtaaagagaccgagtttgctgagtgctagtattaagttcagccttcatgttgcggtattgtattggttgctccgtttccatctgatcagatgatcatagttgtttccttgatcagatgatgtgtactagacgttttgtccaggttgagctgaagctgtgatataaaatttcattacgttggtattaaactgtgaatgatcccaacacatccactgatgcctaaagaaaccttcagccttaatgattnnancgcatgctcctnnnncannnnntnnnnnnnnnnnnnnnnnnnncttgatnnnntgatnnnnnnnagatgtnnnnnnnnnnntnnnnnnnnnnnnnnnnnnnaaannnnnnnangnnnnnnntactacn

SEQ ID NO: 7596 - DNA, 3077 bp, Zea mays
  misc_feature (1)..(1): n is a, c, g, or t
  misc_feature (6)..(10): n is a, c, g, or t
  misc_feature (22)..(25): n is a, c, g, or t
  misc_feature (31)..(32): n is a, c, g, or t
  misc_feature (39)..(40): n is a, c, g, or t
  misc_feature (180)..(181): n is a, c, g, or t
  misc_feature (195)..(195): n is a, c, g, or t
  misc_feature (207)..(209): n is a, c, g, or t
  misc_feature (212)..(214): n is a, c, g, or t
  misc_feature (216)..(216): n is a, c, g, or t
  misc_feature (229)..(230): n is a, c, g, or t
  misc_feature (248)..(250): n is a, c, g, or t
  misc_feature (278)..(282): n is a, c, g, or t
  misc_feature (288)..(290): n is a, c, g, or t
  misc_feature (294)..(294): n is a, c, g, or t
  misc_feature (301)..(304): n is a, c, g, or t
  misc_feature (306)..(309): n is a, c, g, or t
  misc_feature (311)..(313): n is a, c, g, or t
  misc_feature (323)..(330): n is a, c, g, or t
  misc_feature (348)..(350): n is a, c, g, or t
  misc_feature (380)..(382): n is a, c, g, or t
  misc_feature (399)..(404): n is a, c, g, or t
  misc_feature (423)..(424): n is a, c, g, or t
  misc_feature (426)..(429): n is a, c, g, or t
  misc_feature (435)..(435): n is a, c, g, or t
  misc_feature (448)..(450): n is a, c, g, or t
  misc_feature (455)..(456): n is a, c, g, or t
  misc_feature (460)..(463): n is a, c, g, or t
  misc_feature (468)..(470): n is a, c, g, or t
  misc_feature (474)..(474): n is a, c, g, or t
  misc_feature (477)..(479): n is a, c, g, or t
  misc_feature (482)..(484): n is a, c, g, or t
  misc_feature (490)..(508): n is a, c, g, or t
  misc_feature (510)..(514): n is a, c, g, or t
  misc_feature (526)..(533): n is a, c, g, or t
  misc_feature (2715)..(2716): n is a, c, g, or t
  misc_feature (2749)..(2750): n is a, c, g, or t
  misc_feature (2849)..(2851): n is a, c, g, or t
  misc_feature (2974)..(2974): n is a, c, g, or t
  misc_feature (2991)..(2992): n is a, c, g, or t
  misc_feature (3074)..(3075): n is a, c, g, or t
  Peptide Sequence Number=SeqID_12921
  Probeset Number=SeqID_21999
nattgnnnnnctcgaggccggnnnntcgtgnngtagagnntagaaacaatggcgacataggcttcagttccctccacagctccactactttccctgtgctgccaaactactggctgaaagaggtgacggtggagaagcatcaactcagcaaactttcagaggaaccatgaactggccatnntccccttcggcagntttgctctggtnnnttnnncntttcccattccannctctaacttatcatctannncatctttcggacttagttttgacttccnnnnnatattnnntagntaacagnnnncnnnntnnntcccgcatcnnnnnnnnttcatttaccttttactnnncgattaccattgatcagtataatcatcggnnngcttcatatatacagannnnnnacgctatgtgatatgcctnncnnnnttatcnactccactcactnnntagtnnactnnnntgggnnntcgntcnnnctnnnctgatnnnnnnnnnnnnnnnnnnnannnnncgtacttactgnnnnnnnnaacgagagggagctcagtcagtgcctcctcgcctataaacaaggggccggggtctctctcctacggcgtgcgcatgctttggcttggcaaacccgattggatcttcagaaaaatcgccatcccctctccctcttctcgtgtccatcgctcctctacccattcttacttgaatcttttctgaagaggaaatctgacttcgggagcggctcctccgcgttgcctggatcgcccgggatcagtattttgcttccagtcagaggtccaaaatatcaaagggatgcagaaagatgtggttgcatgatggagtaccttgcctggaaattggcaggatacacaaacatagttgtactttacttgatctcgatgacattggactgcaaatatatgcacaacaattgcctcatgcacacacacataatggggccgcgagttgtagctcaaccatcgtctctggtttctttctaggtggagatggttaaaattgctggtcacttataattaccagcatcttatacgtcattgttgttcatcgccaacttattcaagtttgaaagtagaacactgagaagatggctgagaaagagaatattctaatgcagagatatgagatgggaaagttacttggaaaagggagttttgccaaagtttaccatgctcgcaatgttaagacttcagaaagcgttgctatcaaggtgattgacaaagataagatcaagaagtgtggtcttatggatcaaataattcaagagatttcggtgatgaagttggtaaaacatccaaacattgtccaattgtatgaggttatggctaccaaaaccaagatatattttgtgatagagtatgtcaagggaggagagttgttcaaaaaggttcaacgtggaaggttaaaagaagatgttgctcgtacatatttccaacaattgatcagtgctgttgacttctgccatactagacaagtttatcatagagatctaaagcccgaaaatcttcttcttgacggaagtcacaacttaaagatttcagactttggtttgagtgcacttccaaactgcaagagaaaagatgggttactccacacaatttgtgggactcctgcatatgttgctccagaagtaattagtcaaaaaggatatgatggtgcaaaagctgacatatgggcttgtggagtgatcctctatgtgttgttggcgggctatcttcctttccaagacaagaacatgatggacatgtataagaaaatttgcaaagcagaactcaaatggccaagttggttttcttcagatgttcgaaagcttttgcggcgcatccttcatccaaaccctaatagacgaatatctattgaagaaataaggactcatccttggtttagaattggtcttgatgcaagattgtttgattctacaacgagagattatgtgcctagtgacatggatttggctttgaattccttaaatagcaatatggtcgagtgtaattcagcggcagagaaactgactattttgaatgcttttgatatcatctccctgtctaacgggtttgatctctctggtatatttgagaactcaaacaaggagtctaaattcatgtctaccaacacagctatgacaattatcaccaagctaatggaagttgcaaagagcttggatctgaaggttataacaaaaactggtggattgttgaatatggaagctgccaaatcaggaataaaaggtgtgatgtctataaatgctgagatatttcaaatcacaccaaattatcatctcgtggagatcaagaaaatcaatggtgacatccttgagtatcataactttatgaaccaaagcatgagaccggcactagaagatattgtgtgggcatggcatggtgaacaacctgacgagaagtagactcatcaactttagataatcatcaacctacaaccttagatattgtggcagctttaatgctattagaaagtgtatcaggcattcaggccaaaaaaaaatgtcatgggacttaataatattacttatatgttgtttttaaaaaaaaaaaaaaaaaattatacagtaaggtcgtctttctattgaccctccaatgttcttgaccactggaacatagtttctatctgaaggaacattttgataatttgattggtgaaaaatattagagaatgggtgcttatatgtagtttttattctgnngttcatgcagtggaatgttctttctgttgaccnnactactgtaacatggtttctatctcaagggaatattttcataatcaattactttgattggtgaaaaaaaataggtattagagaatgggtgaacctaatnnngctgctttattgtatgaattttccgtggtaacgttagctagaaagttctttactctagtaatttattaagaaagtgatgcctgatgtgttgtagaagttgtttaggcaagtaatgaattttanactatgcagaagttttnntttttaaaaaaaaaaaaaaaaaaaaaaaaaaaagaaaaaaaaaaaaaaaaaaaaaaaaaaagtactctgcgttgttaccacnnct

SEQ ID NO: 7597 - DNA, 2491 bp, Zea mays
  misc_feature (1)..(1): n is a, c, g, or t
  misc_feature (4)..(4): n is a, c, g, or t
  misc_feature (6)..(6): n is a, c, g, or t
  misc_feature (8)..(13): n is a, c, g, or t
  misc_feature (34)..(34): n is a, c, g, or t
  misc_feature (2411)..(2413): n is a, c, g, or t
  misc_feature (2418)..(2423): n is a, c, g, or t
  misc_feature (2425)..(2425): n is a, c, g, or t
  misc_feature (2427)..(2444): n is a, c, g, or t
  misc_feature (2446)..(2451): n is a, c, g, or t
  misc_feature (2456)..(2491): n is a, c, g, or t
  Peptide Sequence Number=SeqID_12922
  Probeset Number=SeqID_22000
ntangnannnnnngtcatcgttgcaacaatggancagcagaaccgtactagtagccaactctagtttctcttgcagctttgtgcctagtgcctagcgacccacttatcttatcgtgctggagtaataataaaatcgagatgtgtcttctgtttcagatcacaaaggatagcttgccttctatcatgaagctacccaatcttcaagagctgacactggtggggtgtattggaatcgatgatggtgctcttgttagtcttgagagagaatgcagtaaatcactacaggtgcttgatatgtctcagtgtcagaatatcaccgatgtaggagtttcatccatcctgaagtcggtacccaatctattggaactggatctttcatactgctgtcctgttactccttctatggtgagaaacttccagaagcttcctaaactgcaggccctgaagctggaaggctgcaaattcatggccaatggaccaaaagccattgggacctcttgtgtttctttaagggagctaagtcttagcaagtcatctggagtgacagatacagaactctcttttgttgtgtcaaggctaaagaacctgctgaagctggacattacctgttgtcgcagtattactgatgtttcactagcggccataactagttcgtgcacttccctcatctctctgaggatggagtcttgtagccatgtttccagtggagcactccaactgattgggaagcactgttctcacttggaagagttggaccttactgacagtgatttggatgatgaaggattgaaagctcttgccagatgtagcgaactttcgagcctaaaaattggcatttgcttgaagataagtgatgaaggtcttagccacattggaaggtcttgcccaaaactccgcgagattgatttgtacaggtgtggaggccttagcgatgatggaattattcaaattgcgcagagttgtccgatgctagagtctatcaacctatcatactgcacagaaataacagaccgttcactgatttcactctcaaaatgcgcaaagctgaatactttggagatccgtggctgccccagtgtttcatcgattgggctctcagaaatagcgatggggtgcaggctgctttccaagcttgatattaagaaatgcttcgggattaatgatgttggaatgctttacctttcccagttcgctcatagcctccgtcagataaacttgtcatactgttcagtcaccgatgttgggctcctttccctttctagcatatccggcctgcagaacatgaccatcgtccatttggcgggtataacacccaatggcttgacagcaactcttatggtttgcggtgggttgacgaaagtgaagcttcatgaagcattcagatccatgatgcctcctcatacgataaaaaatgttgaggcacgtggctgtgttttccagtggatcgataaaccgttcaaggttgaggtggagccttgtgatgtatggaagcaacagtcacaagatgtgcttgtgcgatgagaatacaggagacctcgagcgtagccgctatcgtggaaatcgtggcatgcatcgtatggatggatgagttgttgttggctggcaatggcatccagaagtgaagtctgatggggggagctccaaactcagcgttgtaatcagtgcgattcggcacaaagataccagcatttgagcagaggtgtatgtatgtcttgatgttgttttatactgctatagatgtgtagatcccattgtttggtgaggtgatcatttgcgaggaagttgactattagcatgtattaagataaaaaggaaagagatgagaaaatgtttttgaaatttagtacgatatgccttgcagtgcctgtatctgttgcattcataatagtaaacagctggaatgaagtggcttgcattcatgttttataatgccgcaaatgggaaaaaaaaagagaatgaaggggcactgggggtctctgcctgcttgctatgagaaacatttgccgggtgcaggctgctttccaagattgatattaaggaatgctttgggactgattttgctggaaggctttcactttcccggaactctcatagcctccgtcagatgaacttgtcatactgttcagtcaccgatattgggcttctttccctttcttgcatgtaaggcctccttagctgattgatcgtccaggatgcgggtataacgcctaatggcttcttgcctcttcttatggtactaggtctttcaacgaaagtgatgcttcagtccgtaaaaaaacttcagatgcctcctcccatgataaaaaatgttgaggcacgtggctgtgttttccaatggattgataaacctttcaagcctgatgtggaaccgtctgatgtatggaagcaacagtcgcaagacccgcttgtannnatttnnnnnncnannnnnnnnnnnnnnnnnncnnnnnnccccnnnnnnnnnnnnnnnnnnnnnnnnnnnnnnnnnnnn

SEQ ID NO: 7598 - DNA, 2475 bp, Zea mays
  misc_feature (1)..(1): n is a, c, g, or t
  misc_feature (3)..(3): n is a, c, g, or t
  misc_feature (6)..(7): n is a, c, g, or t
  misc_feature (9)..(13): n is a, c, g, or t
  misc_feature (2320)..(2325): n is a, c, g, or t
  misc_feature (2332)..(2336): n is a, c, g, or t
  misc_feature (2339)..(2340): n is a, c, g, or t
  misc_feature (2344)..(2344): n is a, c, g, or t
  misc_feature (2348)..(2351): n is a, c, g, or t
  misc_feature (2353)..(2360): n is a, c, g, or t
  misc_feature (2367)..(2370): n is a, c, g, or t
  misc_feature (2378)..(2378): n is a, c, g, or t
  misc_feature (2380)..(2381): n is a, c, g, or t
  misc_feature (2392)..(2475): n is a, c, g, or t
  Peptide Sequence Number=SeqID_12923
  Probeset Number=SeqID_22001
ncnggnngnnnnnggggtttccacataccacaccacacccagccgggggtggttcggcatcggcatcggcaggcagagcactttccctccggccggccctcccctcctcgcgctgcatctccccccctgtgccttgtccgcccgcggcagatcctgaggcggctcgcacttccgtgttccgtccgccgcgcttgcctttgcccacgccacgcgatcccaatttccaaacccgagcgaggtcaactcaaagtacccgcgccgcgcgtacgccataaacgttgcctgccgcgtcttccgaccgtcccccacgccacgacgcagtcgcagcagatccaccaccgacgcgcgcgccgcgcgccccgacgcggagcgctggatcccgcgcagcaggaggcggccaacccgtcgccgtcgcagtctcccccggcccccgcaagcggcggccgcggcgtccgctaccgcacgccctcgtccccggacctcctgctcctccccgccgaccccaagatgcgccgctactccgcgctgcccaacggcggccgccaggagacgctggccgaccgcgcgcaccgctaccggggcgtcttgctcgtcgtcctcgccccgctcgcgctcgtctccctcgtgctcctcctcatgccgcgctcgcccgccggcgccacggccggcgccaggaggtccggcccgcccggggcagacaagtacgccgtcatcttcgacgccgggagctccggcagccgcgtccacgtcttccgcttcgacgccaacctggatctcgtccacattggcagcgagatcgagctcttcgtccagataaaaccggggcttagccactacgccaacgatccccgggaggccgccgagtcgctcgtctctctccttgacgatgccaagcgagtggtgcccgcggaattgcgcgaccaaacgcctgtcagagtcggggccaccgcagggctgagaaatttgggtgcacaaaaatcggaggcgatattgcaagcggttagggacattcttcgcgaaaagagttcctttaaaaaccaaccggattgggttacagttcttgatggaacgcaggaaggtgcatacgaatgggttaccatcaattatctgttgggaaacttgggaaagacttatgcagacacagttggagtagtggatcttggtggtggatctgtccaaatggcatatgctattgcagagaaggatgcagaaaaggctcctaaaccatccgagggggaagatgcatatgtgaagaaattgttcctcaaaggaaccacatattatctttatgttcatagttatttgcattatgggttgctggcagctagagcggaggtcttaaaagctggcaatggcaatggttacagcaactgtatgttagagggatttcaagggaaatacaagtatggcgacgattcatttgaagcatccgctccaccttccggtgctagttactcaaaatgcaaggatgatgcagtgaaagcccttaaagttgatgaagcatgcacccacatgaagtgttcttttggtggcatttggaatggtggtggtggtgctggacagaagaatctctttgtagcatcctttttctttgatagggctgctgaggctggatttgttaacgccaatgcgcctgtcgctaaggttaaaccatcggacttcagacaagctgcggagcgcgcttgctcgttgagcgtgaagaacgccgaggccaccttccctggtgtacagaaggatagcattccatatatctgcatggacctcgtttatcagtacacattactcgtggaaggattcggcgtcgatccggaccacgagatgaccttggtaaagaaggtcccttacagcgacgcctacgtcgaagccgcatggccgcttggcagtgccatcgaggttgcatcttcgtagtaggaaggaaacacagtttagcaaggtaacatcggacggcattcttgtcatgaagttttgcgttgagagtccccactcctccacttcctcctcttgatcgcttgaattcgcacactcaatccattcatcttactatacggtacgggtagcgtctctcggctctacttggttccagcgggcattgttgtaagctctgttattaatatttgtatactactaatgcaagtaagattggagcctcaattattctttttgacctccaatatatataatactggaatgcacagaatacaagtgactctttttttaggaattattgtgatgtgagttgaaccctgtattcacacttaaactattaccttactttactatcaattaggaacaatgtggaatggcatatgctacgtcaagnnnnnncattttnnnnnaannaaantgcnnnnannnnnnnngtcaatnnnnccaaaatnannaaattttcccnnnnnnnnnnnnnnnnnnnnnnnnnnnnnnnnnnnnnnnnnnnnnnnnnnnnnnnnnnnnnnnnnnnnnnnnnnnnnnnnnnnn

SEQ ID NO: 7599 - DNA, 2213 bp, Zea mays
  misc_feature (1)..(22): n is a, c, g, or t
  misc_feature (24)..(26): n is a, c, g, or t
  misc_feature (44)..(51): n is a, c, g, or t
  misc_feature (1183)..(1184): n is a, c, g, or t
  misc_feature (1191)..(1191): n is a, c, g, or t
  misc_feature (1215)..(1218): n is a, c, g, or t
  misc_feature (1223)..(1224): n is a, c, g, or t
  misc_feature (1239)..(1245): n is a, c, g, or t
  misc_feature (1252)..(1252): n is a, c, g, or t
  misc_feature (1254)..(1258): n is a, c, g, or t
  misc_feature (1268)..(1268): n is a, c, g, or t
  misc_feature (1287)..(1290): n is a, c, g, or t
  misc_feature (1298)..(1300): n is a, c, g, or t
  misc_feature (1302)..(1302): n is a, c, g, or t
  misc_feature (1316)..(1316): n is a, c, g, or t
  misc_feature (1975)..(1976): n is a, c, g, or t
  misc_feature (2061)..(2063): n is a, c, g, or t
  misc_feature (2201)..(2203): n is a, c, g, or t
  misc_feature (2213)..(2213): n is a, c, g, or t
  Peptide Sequence Number=SeqID_12924
  Probeset Number=SeqID_22002
nnnnnnnnnnnnnnnnnnnnnncnnngacgtgctgatacccatnnnnnnnncaacaactcccgctccggtgtccagtcgccgtcgcgactcacgcaacctcctcggctcgctagccgctacgctactgtctacgccgccacggcgccacgacatctcccataagatggtagccgcagccgcagctgcagccacagccacagccgccgcgctcctcgcccccggtctaaagctctgcgcgggccgcgcgcgcgtctcctctccctccggcctcccactccgtcgcgtcactgccatggcctccgcccccaactcctccttccgcccagaggaggcgcgctcccctcccgccctcgagctcccgatcccgccgctctccaagttcaaggtggcgctgtgccaactctcggtgacggcggacaagagtcgcaacatcgcgcacgcgcgagcggccatcgagaaggcagcctccgacggcgccaagctcgtggttctccccgagatatggaatggcccttactcaaatgacagctttccagagtacgccgaggacattgaagctggcggagatgcagccccttcattttcaatgctgtcagaggttgctcgcagtttacaaatcactcttgttggtgggtccatagctgaacgttctggcaacaacttatacaatacatgctgtgtctttggttcagatggccagctgaagggtaaacatagaaagatccatcttttcgacattgacattccaggaaagatcactttcaaggaatcaaagactcttactgctgggcagagccctactgttgtagacacagatgttgggcgcattggtattggtatatgctatgacatccgtttccaggaactagcaatgttatatgctgcaagaggtgctcatttgttgtgctatcctggtgcattcaacatgactactggaccactgcattgggagttgctgcaaagggcgaggtaataaatgagtttgaacctcaagttatgatgattatgcaagggaaatatagcgagttgaaatggtcacactttatttttgttaattagcatatctaaaagtagttcaaaacaagtcagaaccttgatcagaaatcagaactcataattcttggaggtaatttccatatctgaaatgtttccactgctactttgccctgggctgatgacatnntttctcnaatgccagggctgcagacaatcannnntgctnngattctttgtgcgcnnnnnnntcatttncnnnnncttcaacttncatttggcattcgttttgnnnnttaaaatnnnantaaactgtttggtnccagctgtttgttgcaacatgcggcccagctcgagataccagtgcaggctatgttgcttggggacactccactcttgttggaccttttggagaggtgattgcaacaactgagcatgaggaggcaactataatagcagaaattgactactcactgattgagcagaggaggcaatttcttcctctgcaacaccaacgccgtggcgatctctatcagctggttgatgtccagaggctgggttctcattagcacagggacaagcaggagagcagttgactctgcaggcttgctcgtactacttcgttcatgagatgcatgcccatgcccatcgagagatcgatcaacttgatgtgtgaaggtggagaggacggaataaagcgactatagtttgtaccttcagcgctagtttggcaactctattttacaagagattcttatttttctaaggaaatattaattaatttttcttaggaaaatggaaatcacttgggaaaatatgattgccagactagccctcagtgtaaatgtctccagttgccaaataaattggttactttaacgtatgaagaaaaccttcctccatgggacgaagataaaacggaggactgcgacttccctttgggcccgactagtttgaagtttgtactagcttcgggggtgnntaggcccagttttggtagaatactgtagtattctcgaatactacggtattatatacaaaatgttgtttggcaatttagataaaannnatgtttttaaaactgaagtattgcaaatacctagggcctgtttggaaatgcggttttgaaatactgtagttttaagataccatagtttacaattgtacatgacataaatactacggtattgtttatcccagtaaaacnnnagtattgctn

SEQ ID NO: 7600 - DNA, 2573 bp, Zea mays
  misc_feature (1)..(1): n is a, c, g, or t
  misc_feature (5)..(8): n is a, c, g, or t
  misc_feature (14)..(14): n is a, c, g, or t
  misc_feature (26)..(30): n is a, c, g, or t
  misc_feature (2190)..(2194): n is a, c, g, or t
  misc_feature (2196)..(2208): n is a, c, g, or t
  misc_feature (2210)..(2218): n is a, c, g, or t
  misc_feature (2220)..(2226): n is a, c, g, or t
  misc_feature (2229)..(2230): n is a, c, g, or t
  misc_feature (2232)..(2236): n is a, c, g, or t
  misc_feature (2243)..(2245): n is a, c, g, or t
  misc_feature (2267)..(2270): n is a, c, g, or t
  misc_feature (2272)..(2275): n is a, c, g, or t
  misc_feature (2278)..(2308): n is a, c, g, or t
  misc_feature (2310)..(2310): n is a, c, g, or t
  misc_feature (2313)..(2313): n is a, c, g, or t
  misc_feature (2318)..(2323): n is a, c, g, or t
  misc_feature (2327)..(2330): n is a, c, g, or t
  misc_feature (2334)..(2338): n is a, c, g, or t
  misc_feature (2340)..(2342): n is a, c, g, or t
  misc_feature (2344)..(2351): n is a, c, g, or t
  misc_feature (2353)..(2353): n is a, c, g, or t
  misc_feature (2360)..(2360): n is a, c, g, or t
  misc_feature (2366)..(2366): n is a, c, g, or t
  misc_feature (2368)..(2370): n is a, c, g, or t
  misc_feature (2373)..(2374): n is a, c, g, or t
  misc_feature (2379)..(2379): n is a, c, g, or t
  misc_feature (2385)..(2388): n is a, c, g, or t
  misc_feature (2391)..(2394): n is a, c, g, or t
  misc_feature (2404)..(2412): n is a, c, g, or t
  misc_feature (2417)..(2421): n is a, c, g, or t
  misc_feature (2427)..(2444): n is a, c, g, or t
  misc_feature (2446)..(2470): n is a, c, g, or t
  misc_feature (2472)..(2488): n is a, c, g, or t
  misc_feature (2490)..(2499): n is a, c, g, or t
  misc_feature (2502)..(2506): n is a, c, g, or t
  misc_feature (2509)..(2510): n is a, c, g, or t
  misc_feature (2512)..(2517): n is a, c, g, or t
  misc_feature (2521)..(2525): n is a, c, g, or t
  misc_feature (2527)..(2528): n is a, c, g, or t
  misc_feature (2530)..(2530): n is a, c, g, or t
  misc_feature (2532)..(2534): n is a, c, g, or t
  misc_feature (2537)..(2568): n is a, c, g, or t
  Peptide Sequence Number=SeqID_12925
  Probeset Number=SeqID_22003
ntggnnnnctcgancccggccggggnnnnnaggcttaggctgggagtaatcgatcgagccggcgatgggcagcgtggccatggacgccgactacggcgcgccgcgcgagctgtcgccgctgcagaaggcgcgcgcgctctaccgaccggagaccccgccgtgcctccagggccccacagtcagtgtggaatatggtgatgctgcgatcgcggccgacgtcgcgggtgctcacgttatcagccacgccttcccccacacctacggccagccgctggtacactttctcacgaagacggccaacgtgcatgacgctaccatcgtaacagagcaccctgttgtcaggattggcgttgtcttcagtgggaggcaatcccccggagggcacaatgttatatggggcctctatgatgttgtaaaggctcacaactccaacagcaaaattattggttttcttggaggaaccgatggattatttgcacagaaaactattgaaatcactgatgaagctcttccatcctataaaaatcaaggtggttatgacatgcttggtcgtacaagggatcagatcagaacaactgagcaggtaaaggcaacaataggtacatgtcaagcattgaagttggacgctcttgttataattggaggtgtcacatccaacacggatgctgctcagcttgctgagacatttgctcagttgaaatgtccaacaaaggtagttggtgttcctgtaactctaaatggagatctcaagaaccaatttgttgaaacaacagttggttttgataccatatgcaaggtgaactcgcagttaataagcaatgcatgcatagatgccctttctgctgaaaagtattactactttattcggatgatgggacggaaagcatctcatgtagcattggaatgtgctcttcagtcacatccaaatatggttatcctaggcgaggaggtttctgtgtcaaaacttacaatatttgatattacaaagcagatatgtgatgctgtgcaggcaagagctgaaaaagacaaatatcatggagttgtacttattcctgagggccttgttgagagtattcctgaactgtatgctttgctccaggaaattcatggactgcataataaaggtgtttctgttgagaacatctcttctcatctttcaccttgggcatctgcactatttgaatttttgcctccatttattagaaagcagctgcttctccatcctggatctgacgattcagctcaactgtcccagattgaaattgagaagcttctagcacaattggttgagaccgaaatggacaaacgcctagttcttggacatgtatgttatcacatcgtagcggctggtttgaacggctacatggccactgtgaccaaccttaagagtccagtaaacaaatggaaatgtggtgctgctcccattacatctatgatgactgtgaagagatggtcacgtggtgctgccaccagtcaaatcggtaagcctgctgtccacatggcgagtgttgacttaaaaggaaaagcatatgagttgttgagacaaaattcttctagcttcatgatggaagacatctaccgaaaccctgggccacttcagttcgaagggtcaggtgctgatacaaagcctatttcattgtgcgttgaagatcaggattacatgggaagaatcaagaagttgcaggagtatttggagaaggtgaaaagcattgtgaagcccgggtgctcgcaggatgtccttaaagcagcggtaagcgccatggcttctgtgacggagatgttgaccatcatgtcttccctttcatttagtggacaggcgaccatctgaaggccaagctgaagatgtcatatgctgttgcgctctcatgtcccgaacatatttgtgtttttttgggaaagaaacatacaatttttgttctcattctagtatcgtctacctatgtcaaactacaatatgataggacccttgctaaataattgtttcgtttgctggtatttctcatctttgatgctaagcatattggaaagttaatagaaatgaaaataagagcataatttgaactggttacgggccaggcgtgccctgcgacctaagtttgattgtgattattcgtgcgttcttggacatggaagttatcacatcgtagctgatggattgaacggctacatggccctggtgaccaacctgannnnngnnnnnnnnnnnnnannnnnnnnnannnnnnnctnncnnnnntttggannncaggccaggggtgccctgcctnnnnannnngannnnnnnnnnnnnnnnnnnnnnnnnnnnnnntnttncactnnnnnntctnnnnaaannnnnannntnnnnnnnntncattganttgctntnnnttnngttcntggacnnnnatnnnntcacatcgtnnnnnnnnntttgnnnnnctacannnnnnnnnnnnnnnnnntnnnnnnnnnnnnnnnnnnnnnnnnntnnnnnnnnnnnnnnnnnannnnnnnnnnttnnnnnttnnannnnnnttannnnngnntngnnnttnnnnnnnnnnnnnnnnnnnnnnnnnnnnnnnnaaatt

SEQ ID NO: 7601 - DNA, 1764 bp, Zea mays
  misc_feature (1761)..(1764): n is a, c, g, or t
  Peptide Sequence Number=SeqID_12926
  Probeset Number=SeqID_22004
tccaaagccagcgaagaagagattccgccggtgccgtagccgctgagctaaccaccagccggttcttgtcgcgttgtctgcaactttgcaagtaagcaactcgtcaccggtcagccaccaacaaggcaccttggttaggctgtttgcccatccatccatccatcgtcttgcacgtccaagaaatcgagaactcacgcaggcgtcgctcacttgccctcctcgtcctcctcccgtcgtgaattccacgctggttcagggatgtcgatcgagctcctgacgaaattcctcacattgctgttcgggtatgccatgccagcgctggagtgcttcaaggcgatcgagcagcggcccggccgggcagatcagctccgcttctggtgcgagtattggatcatcctagtcctcctcgtcatgttcgacgaaattgctggggttctcatttctaagatcccaatgtactacgagctgaagctagccttcctcgtctacttgtggtacccaaagacaagggtatgtgctagaaacactctgtctgcagctacaccaacgaaaagttttagctgtgcatatagtacttgcgagctgttgatcaaatctctgaaccggatgctgttgcgctctgagctagggaacggacatcgtgtacgagaccttcctccagccgctggtgatgcagtaccagcccaacatcgaggccaggctccagtacctgcgcgccaacgccggtgacatcctcgtcttctacctcaagaacttcaccgagagaggctacgagctcttcctccgagtgctcgactacgtccggtcgcaggcgtccagagggacaagaacacggagtttcttctcgttccgaggtgaacgttcggagaggccaagcttcaccgatgactatgtcactggcggcgaccggagggacgggggaaggcaccgtcgaccacgcagtggctactagtagaccaagtagtcactggatgtataggatgtgcacagaaacatacacgattactggtatagtgttaggtaggagtaggatcaaatcaagcaaaccttacggacagaacttgtaggatccactggaaaaacagatagcttcttataaattttctattcataaaaaaaaaaaaaaaaaaaaaaaaaaaaaagaagatctaaatggttgtgcttttgtgtatggctcattaagttttgttgacaaagtttcatgtggaatagctctctatgttctcgagtcctatcaaggaagtacaaagatcagatcaaatttaggaacagcatctggctattcagttacaagacttggcttgggcttagttccagctgtctgttcgctgctttcatcaatagtggcttataccatggacctccctgaccctgatactcggcggagacctttggtggagccccttctagtataacttcactggtgacctgttacagtttcatcctgaacatttacattaattgctcgatagaatgacactgctgctggagcctgaagatactactgacattataggcaaaggagcaatcgggtacctctggtcaattctctttgacttcatatgtatagtctgaataaattgtggtggaaaacatgcactcagaaacgttgagtagggattagaatttataagtagcatagctgcataggggcaagaagattagtattgatcaatcatactgcgcttacgagccattctgcaatccaatgtaaatataacttagcttcattgttcggtgcaacgcattgcctgtatggtnnnn

SEQ ID NO: 7602 - DNA, 1900 bp, Zea mays
  misc_feature (1)..(1): n is a, c, g, or t
  misc_feature (21)..(23): n is a, c, g, or t
  misc_feature (29)..(35): n is a, c, g, or t
  misc_feature (62)..(62): n is a, c, g, or t
  misc_feature (64)..(67): n is a, c, g, or t
  misc_feature (1840)..(1840): n is a, c, g, or t
  misc_feature (1847)..(1847): n is a, c, g, or t
  misc_feature (1864)..(1900): n is a, c, g, or t
  Peptide Sequence Number=SeqID_12927
  Probeset Number=SeqID_22005
nccacgcgtccgcccacgcgnnngcccannnnnnngcccacgcgtccgcccggcttcacttngnnnncagccgcgctccgcgttcctggggacgggcttgtgcggcggacccttggggccttgccctggcgaggtttccccttccccggctccagcggggcagacaccgtcgctgacgcctgttcccagtagcggtggcggtaacggtagcggtagtggtagcggcgggaccatcggtggaaatgggggagaaagtggccacaagaacaagaagctctccggtggtgccattgccggaatcgctataggctccgccttgggcgccggacttctcctcttcctcctcgtctgcctctgtcgcaggtcggggggcaccaggacgcggtctctggagatgccgccacctgaagcgcctgctgctgctgctgctgctggcggcaggaaacctcccgagatgaccagcggcgctgctgttgcgcccttgaccacaataggccaccccaacgctcctatcggccagtcgacgtccggtaagaagctggtcttctttgggtcagcggctgccgtggcacctttcgatctggaggacctgctgcgcgcgtcggctgaggtgctcgggaaaggagcgttcgggacgacatacaaggcagtgctcgagtctggggcaactgtggccgtgaagcgcctcaaggacgtgactctatctgaagctgagttccgtgaacgcatttccgagattggcgagcttcagcacgagttcattgtgccactccgtgcttactactacagcaaagatgagaagctacttgtttacgacttcatgcccatggggagcctgtctgcagtcctgcacggcaacgtaagttctggcaggacaccacttaactgggatttaaggtcaagcattgctctagctgcagcccgtggtgttgagtacatccactcaacgacctcaacggcttcccatggtaacatcaagtcatccaatgtcctcctgggaaaatcatatcaagcacgtgtatcagagaatggccttaccactcttgttggtccatcatcttcatcgtctcgcaccaccggataccgcgcacctgaggttattgattcccggagggtttcccagaaggcagacgtgtacagctttggtgttctgttgcttgagctggtcacagggaaggcccccagccaggctgctctcaacgacgagggtgtcgacctgcccagatgggtgcagtcagttaaccgctcggagtggggttcactagtgtttgatatggagctcatgagacatcagactggtgaggagcccatggctcagctcgtgctgcttgctatggactgcacagcacaagtcccagaagcccggccgtcaatggcgcatgttgtcatgcggatagaggagatcaagaagtcaagcgtgaccccgaacattgaacaagttgatgatcaatcttcaagggctgaatcggaggcggcgccgaccaatccgtttgctacttgatatgagttgacctgagagagagaatctgctataactctagcctgcattcaatcgattcacgcattcgatgaatcctatcttcgactgagtcgactgtttttttctgtgcatcttttagcctgttggatttaacggttaacctgatcgtcactaagcagcacgggtgttcggcagtcgcaccctgtgctgcggaaggtgattggtggtgtgtttagggaccagttttaaagtgtgagattgctcaaaagcagagcacaaactagccttgatcaggttggttttagcttgtagctgctgctgctgcttgtcttccggctatccatagtgtaattactcaancctcatntagcgtttggatttttnnnnnnnnnnnnnnnnnnnnnnnnnnnnnnnnnnnnn

SEQ ID NO: 7603 - DNA, 2433 bp, Zea mays
  misc_feature (1)..(9): n is a, c, g, or t
  misc_feature (491)..(494): n is a, c, g, or t
  misc_feature (512)..(518): n is a, c, g, or t
  misc_feature (2193)..(2193): n is a, c, g, or t
  misc_feature (2217)..(2219): n is a, c, g, or t
  misc_feature (2221)..(2221): n is a, c, g, or t
  misc_feature (2223)..(2223): n is a, c, g, or t
  Peptide Sequence Number=SeqID_12928
  Probeset Number=SeqID_22006
nnnnnnnnnctttatggccggagcaatagttggcagactcggccgccatcccacctccttgctcctcctaacactgccccgtcacgccgccgcacaccaccggctgcactctccttcctcctcccaaggtaccgtcccccaccttcccctctttctcagaccctggcgcttcccatccttttgccctgccgctgctgtcctgcacgggcgtcccctgatttacaaccctttggctgcagttgcaagagccggattgccaggtcagtattcaaaaatgggtgatccaagtgagaggaatggacacggcgctcttacccgggtgctattctgtggtccatattggcctgcttctactaactacaccagggagtatttgcaggactatccattcattcaggttgatgaagtaggtcttgagcaggtacctgatgttattcacagctatcatatatgtgtagtaaaaaataagcgtatagattcagatattattnnnnaggcaactcagatgaagnnnnnnntgcagtatggtgtagggtatgtgatgctgcaaaagctgttgtacattgatgactatattaaaactactcccctatttcaggcgattgatgatgttatccaacattttttgctgcatttgataaaaataatgataaatctactagtaaaatttatgtttgaaaatcttaatagcttttgtttatagtactgttcaaataataagaatttcaatatttataccttagtgatacatatatagggacacttgcactagttttagttcatgtgtgtccaatatttatttcagtaaccaaaatttctggcaattggactatctttggctcgttatgtttatactgtagaggatatgtagtcacctctttaacatatacactaccttcctagctttcatcatcttgaagctagcttgtgtatgtttcacaaatataacttcgatcctttcatacgtggcctaccattgttgcacattgtgcatttaacttgcagaaggagatggatactgctgtgaaccggaaagaccttggtgttccagttggagatacattatttggcaaaacaatccttatccttggatttggggccattggcatcgaggttgccaagaggctaagaccctttggggtaaaaattcttgctaccaaaagaaattggtcatcggacacattgccatcttatgttgatgagctagttgacaagaaaggtgggccggaagatatgtatgagtttgctggtgaagctaacattgttatagcatgcatgaccttaaccagcgagacagttaatgcttctcttggtgtacttagttataaatattccttcaagatggcctctacttgaccttgattaggacgtgaccatcttttacagattggaattgtggatcataagtttgtttcatcaatgaaaaaggtacatgcttgtttctgtcatactggtctccatgttatcagatctgtgggctcatttcgctgactccatccttttggttttagtgttgtgcataaataatagagaaggaatgatccatgagtcatggtatcagttgagaacatttttactagaaaacattttctggagaataatgttattgggttaacttgaattgcttcaatcttaagtaggggtcatatctggtcaacattgctcggggacgcctgctggactacaaggctgtgtttgatcacctggaatcgggccatctagctggtctggggattgatgttgcttggatggagccatttgatcctgaggaccctgttctgaaattcccaaacgtcattctaacgccccatgtggccggcgtcaccgagtattcctacagaactatggcaaagtctgttggtgacaccgcccttcagcttcatttaggcgaggcgttcacggaggtagagttcgtcaactaaaaaaccgtccaggcggcagccgtagacgcatgccattcgtgggctatcggaaccgctgatgcgatcatttgtagagaataatggatccgcgacttgtaagaataaacatgtagccagatgtttgatggtgatctccatgagaactctgccactggctgcttagctggtacctggtagtggtagcaagtcatttttctcaaacattgcgttctctttcgccttctcaaaaaaaaaaaaaaaaagaaaaaaaaaaaaaaaactttctttgttngctgggttggttaggtgctctaannnanantccttaagtttgagttcaattcagttcttaattggagtggatttcagggtgggttttaaaaataatacctttttttttggtgttgttcacgcactagcctcagctagccgtcgtagtctcggacggcgattaggaggtcagatcgtgaacactgtcatatccatcatgtacgacgaatgaggttttcgcgataaaaaaaaaaaaaaaaaa

SEQ ID NO: 7604 - DNA, 3439 bp, Zea mays
  misc_feature (1)..(1): n is a, c, g, or t
  misc_feature (8)..(16): n is a, c, g, or t
  misc_feature (18)..(18): n is a, c, g, or t
  misc_feature (3392)..(3403): n is a, c, g, or t
  misc_feature (3412)..(3433): n is a, c, g, or t
  misc_feature (3435)..(3439): n is a, c, g, or t
  Peptide Sequence Number=SeqID_12929
  Probeset Number=SeqID_22007
nccggccnnnnnnnnntngatagtcagactgccagccacaatagtagtgaatcactatgttcttctggaatacagtatggtctaaatcgtggacctggaactattggaggcctgcactctagcaatagtttacggagcttggatgaaattccgaacaatgatctgccaccaaatacatttgcttctcttttagggtcatctctttctaggagtgcatctccagatcctgagcttgtgaggagggcccctagtccatccctgcctccaattggtgtgaaagttggcaacactgataagaagatcaatggtggttcctcttctttccgtcgtagctcatccgcaatcggtggatctgatgatttggtggctgctttatctgggatgaacttatcatctagggcaatgagtgggcaaactatggaccagtctcagctctatcaggatgttgataatgtccagaagtttctttttgatcgacagggtgaccaaccaactggaaatcagcagcactacatgagacgtcctgaacaaggacaatctaagttacccgatggatattctgccaatttggccaattcatctacaatgagaaaccagattaatgctggcagtttcacatcttttgacagtttgtctcttggatctgggtttgcttcccctaggattggttctagatcccctggagggactgtatcttctcgacaaaatttagctggtatgtctaacatgctaaactataatggaattggaagtccaactgcgtcaccttctcttcagacttctattgatccagcgtatatccagtaccttgctcaaattgcagctacctgggatgatcctctaatggacaggagccatctgggaaattcttacatggacttacttggtacacagaaagctaaccttggccctttacttcagtcacaaaagcaatatggttactgtggcaatcttggatttaaccttggttatgctggaagtccattggcaagtcctgttcttccctcttcacctattgcaccaggcagtccacttaggcatggtgaccgcaacatgcgctttccatcaggcatgagaaacttcggtaattcctttggttcatggaattcaggcatgagtggaaagatggatgctaatttgatgccctctctcctggaggaattcaagagcaacaaaagtaaatcatatgagctctccgaaatagctggccatgttgttgagtttagtgctgatcaatatggaagccggttcatacaacagaagctagaaacagccagtactgaagaaaaggacatggttttttcagaaataatgcctcaagctctcacattgatgactgatgtatttggaaattatgttgtccaaaagttttttgagcatggaagcactgcccagataaaggaattggctggtcagcttattggacgtgtccttgctcttagtcttcagatgtatgggtgccgggttatacagaaggctatagaagttgttgatttggatctgcagactaaaatggttgcggagctggagggccatgtcatgcgctgtgtacgtgatcaaaatgggaaccatgttatacagaaatgcatagagtgcattcctcagcatgctatcgagttcattgtctcgacattctatggccaagttgtaatgctatccactcatccatatggttgtcgagttattcagagggttctagagcattgtgatgatcctaaaacacagcaaataatgatggatgagattctccagtctgtttgcttgctagctcaggaccagtatggcaactatgtggttcagcatgttctggaacatggcaaaccccatgagagatcagccattattgagaagctaattggccaagttgtgcaaatgagccagcaaaagtttgcctcaaatgtcattgagaagtgcttagcctttggaaatcctgtagaacgtcaggttctgattggtgagatgcttggatccactagcgaaagcgaacctcttgaggtaatgatgaaagaccagtttggaaactatgtggtgcagaaggtgttagaaacttgtgacgatcagcagagggagatgatcctaacaaggataaagacacacctgaacacactcaagaagtacacatacgggaagcacatagtagcgcgtgtagagaagcttgttgctgctggagagaagcgccttgggcttcaaccagcatgcaccgccgcctgaagggcaaactctctaagttgtacagctaacagttgctaggtttgccacatgtttttttctctactaaaaaccttatatgaaggccccttttggcctcgccaggaaaaaaaataaatactgtatgtttgcggggaagagtgtacattaattctgtagcagaaagaccccctacccatgtggcggaatcaagggaggagtgatgcgtgtgagtccgatcgatctgaaggctgctgtaaagaggaagatggaaggaaggagtgagaagcatgtcagttactctgctgctgtacaaattaaacttagctcttagagtgaggagaaagtaagctgttagctgtctgcctaaaggaaagaaaggaaaaaaaaaagaagctggaggccattggcaccctgtttcatgtgttggtatagctgctgtggctctcctgttgtctgtctggcctttgttgtaacataaagctgaggcgcactagcctgccttcgttttcacagttaagctgaagttattagtatcagctttcctgaactgcttggtatgtaatgtgactctgtttcttccttgtactaatgcttgtctcatgtaatccattcccctaatgtctgaatgttttaatctcaattttcacctctgaaacgttttttctaaaaccccatgagagatcagccagttccgcgagcctaagcggccctcttgtgctaatggccagcgaccggttgcctcacttggcggtgcaggtgctgtgcctttcgtgtgccggtcggcggcgggtgatgatcctaacaaggataaagacacacctgaacacactcaagaagtgtaatgatgaaagaccagtttgcaaactatgtggtgcagaaggtgctagaaacttgtgacgatcagcagagggagatgatcctaacaaggataaagacacacctgaacacactcaagaagtaacagttgctaggtttgcactcacatttttttctctctactaaaaaccctatatgaaggccccttttggcctcgccggaaaataaacactgtatgtttgcgcggaagagtgtacattaagctaacagttgctaggcttgcgctcatgtttttttctctactaaaaaccttatatgaaggccccttttggcctcgccaggaaaaaaaaatactgtatgtttgcggggaagagtgtatattaatnnnnnnnnnnnncctgatgtnnnnnnnnnnnnnnnnnnnnnntnnnnn

SEQ ID NO: 7605 - DNA, 1656 bp, Zea mays
  misc_feature (11)..(14): n is a, c, g, or t
  misc_feature (19)..(21): n is a, c, g, or t
  misc_feature (27)..(27): n is a, c, g, or t
  misc_feature (32)..(34): n is a, c, g, or t
  misc_feature (433)..(437): n is a, c, g, or t
  misc_feature (445)..(449): n is a, c, g, or t
  misc_feature (471)..(475): n is a, c, g, or t
  misc_feature (489)..(493): n is a, c, g, or t
  misc_feature (1515)..(1517): n is a, c, g, or t
  misc_feature (1519)..(1519): n is a, c, g, or t
  misc_feature (1537)..(1538): n is a, c, g, or t
  misc_feature (1545)..(1547): n is a, c, g, or t
  misc_feature (1549)..(1549): n is a, c, g, or t
  misc_feature (1562)..(1562): n is a, c, g, or t
  misc_feature (1566)..(1568): n is a, c, g, or t
  misc_feature (1573)..(1573): n is a, c, g, or t
  misc_feature (1579)..(1579): n is a, c, g, or t
  misc_feature (1581)..(1583): n is a, c, g, or t
  misc_feature (1587)..(1589): n is a, c, g, or t
  misc_feature (1592)..(1592): n is a, c, g, or t
  misc_feature (1594)..(1597): n is a, c, g, or t
  misc_feature (1601)..(1614): n is a, c, g, or t
  misc_feature (1619)..(1629): n is a, c, g, or t
  misc_feature (1632)..(1632): n is a, c, g, or t
  misc_feature (1634)..(1643): n is a, c, g, or t
  misc_feature (1647)..(1652): n is a, c, g, or t
  misc_feature (1654)..(1656): n is a, c, g, or t
  Peptide Sequence Number=SeqID_12930
  Probeset Number=SeqID_22008
ggggaccgagnnnnatctnnngactanctccnnnccgtttgcctccgtctcgcgtgacttcattcccagcggccggcggcgacctccacgtggtgccattcgccggcaacgagcacccgcccaccaggatccaggtttgtgctgcgacagcgcctatccattcaccatgattaatttcgtgctcctgatcagccgccagggcaaggtgaggctcaccaagtggtattctccttacacccagaaagagaggaccaaggtcagtaccccacactgctctgtgtgataactcgtgtaattcagttccggggttgctttattcatcactggcagagtggcagtgggtgctaatttccatgctagtttgtgtcaggactttgcagtcatgacttttgttcccaacaaatcgatgaacattagaagtgaatgaatgtannnnnatacatgnnnnngttgccaacttccaaagctatnnnnntgatccagcatacnnnnnttctgtatagattatgatgaatgtttttttgctatgtaaacttgaatatgtgttaattcttgttgtttttcctcttgttgtatttggtatacattcatctgaacaatttcccgtttctcctactcgctgccctcttccttgtttattcctctaatgtgttgctgccttgctgggtaacaagtcattcgcgaactcagtggactcattcttacacgagggcccaaactctgcaattttgttgagtggagaggttacaaggtcgtataccggaggtatgctagcctgtatttctgcatgtgcattgatgccgaggacaatgagcttgaagtccttgagatcatccatcatttcgtcgagatactggaccgctattttggcagtgtatgtgagttggatttgatattcaattttcataaggcctactacatactggatgagattctcatcgctggtgaacttcaagaatctagcaagaagaatgttgcaagacttattgctgcacaggattcattggtcgaggctgctaaagaggaagccagctccataagtaacatcatagctcaggctacaaaatgaagttcttcatgcctgccccccttccctccatcttgttattgttgtacaagcaactgtaattcactggactgcgaggtgctttctcagaggtgggttggcttctcctcccccaccggttcgtgttcaggttctggttcgtgggcgagagggaagagatggcggcgtcggacgttgagtaccgttgcttcgttggcggcctcgcctgggccaccgacgaccactccctcaacaacgccttcagcacctacggcgaggtcctcgagtcgaagatcatcctggatcgggagacgcagaggtcccgcggcttcggcttcgtcaccttctccacggaggacgcgatgcgcagcgccatcgagggcatgaacggcaaggagctcgacggccgcaacatcaccgttaacggggcccagtcccgcggcggccgtggaggcggcggtggcggatannntngcgggcgccgtgatgganncggctannncngtggcggtggagnctannncggtngtcgtngnnnctannncgncnnnngggnnnnnnnnnnnnnncaaannnnnnnnnnngcnannnnnnnnnngacnnnnnntnnn

SEQ ID NO: 7606 - DNA, 2777 bp, Zea mays
  misc_feature (1)..(1): n is a, c, g, or t
  misc_feature (3)..(4): n is a, c, g, or t
  misc_feature (6)..(10): n is a, c, g, or t
  misc_feature (28)..(28): n is a, c, g, or t
  misc_feature (30)..(34): n is a, c, g, or t
  misc_feature (36)..(36): n is a, c, g, or t
  misc_feature (45)..(45): n is a, c, g, or t
  misc_feature (53)..(55): n is a, c, g, or t
  misc_feature (2739)..(2777): n is a, c, g, or t
  Peptide Sequence Number=SeqID_12931
  Probeset Number=SeqID_22009
nanngnnnnnctcgaggccggccggagnannnnntnttggagagngagggaannntctaggtcataggtttccgaacgggttggctttgatggagcaatagaacaagtgggctgaaagcttgaagtaatgaacggctcgagttgtgcagctttgccccgcattttgtttgaaaagtgcagcgttcctccgtttcgcttctcccgctcccttccgcaacggagagagagagagagagagcgtactccctccgccgcccgccgaccgccgactcccgccgcgaaatcctgcgtcagaagcgccgattctcggacgtcctccggatctgagacaccgagcgcactacgagctgtagctgtagtgacctgaaaatgagtgagggggatgctactcagcttgcccttgagaaaggattaccacaagtgtctaatgatgatggttcgagtagtcctgcaactatgcacaagttgaaagttgacacagaagatgctggaagcaaaattgaatcacccactccagagaagcttgaatctagaagcaaaggggttgttgtgagttcgttggcaaggaatttacttgcagagaggtacaaagatagatttgcaaatcagttcctggaagatgagggtgacatagatgatgaagactataatgacagtatttcgccaggcatgagccgatctcagagatcaagaagcattgaacttctggagaagcacaaggatttactgaatctttttaatagaatggagagttctataaggttgctgcgcctacggaagaggatggctacatttaataatattgccacccaggtggaaatactcgcaaaaaggaagttatcgtactgtcatttggcccaaatgaagtatttgtttccagaagcaatccagattaagagggtacttctacatgacgagaaaagcctatgcatgtatgctgatatggaaatcatacttgtaatggatgttgtggaatacacaagtcctgatcactctccatccatggcaatttgcgatgctttttactcgaagcttttgacatttttggatgctcatcataagggtacagacattccagaggcaatcttaccagaaccctttaacttgaggtcaaggggccagttaaatcttgaggcatcaaataatggacatgctgctgagccacatctgcaaggcaccactaaggatggattctcaaatgcttcccacttcccacaatcttttcgaaagctaatgtcccagaaagtcattactgatggagctgaaagaactcaattgctacttgatccaacaaaactgagctctgtgagtgcttatgatacagaaggaacaaacagaagccctaaaaagcaagacaaacatgcttcagttacagtgaactctgaaatttctgctactccaagccgtcatttgatctctcgttgtcaagagggtacgccaaaacaagagacctcagaatcaccattgttggctcaaacaccagcaactcagacacccaaaaggcaattgcccactccacttgagaaacttgaggccacatgtggacacatttctgaaccacgttcagctagttctgcccgcagatcactaaatacatctttaaaatttgaagggggaagcccttcttatcatgatagaatggaacatgtggctacatctaaaattggaattttctcagaagattcatctagtttcaacaagtcattagaggagaatggtcctgtcttctttactgatagagagaaaatcaatctggcagacccagtgggtgtccaggaaaagatggcttcgttacgttccacatttggcatcgtctgcgatatttctcattctatcaagaattcgctaattacaaaacaggagcttttccataatattcttgccaacaacttggagatagaacagatgggagagatagaagagcagctacatattttagaggatctggctcccgattggatatctaaggtgataaatggaggagaaatattttacagctttgaaactatagcagatcagaattcagtgtgggaaaggcttgtagaagctgtgtgaggtgtggaatagctgggattggtttaaagctaaagaatcagccacatagtactatgtatgtaacgctaacggaacccatcaaacagccacattttctcataatggaatcctcaggattgctcaagtcttattcaatttaaattttttcttcttcaacaagtcattagaggagaatggtcctgtcttctttactgatagagacaaaatcaatctggcagacccagtgggtgtccaggaaaagattgcttcgttacgttccacatttggcatcgtctgcgatatttctcgttctatcaagaattcgctaattacaaaacaggagcttttccataatattcttgccaacaacttggagatagaacagatgggagagatagaagagcagctacatattttagaggatctggctcccaattggatatctaagaaggtgataaatggagaagaaatactttacagctttgaaactatagcagatcagaattcagtgtgggaaaggcttgtagaagctgtgtgaggtgtggaatagctgggattggtttaaagctaaagaatcagccgcatagtacctggtaggtaaccacgcagatgaaaacgggcggggagctccgtgagcgcaccgaggcaataccaggaccaagtgcggagcggagaaggccagcggcacctgcacggggacgatannnnnnnnnnnnnnnnnnnnnnnnnnnnnnnnnnnnnnn

SEQ ID NO: 7607 - DNA, 2134 bp, Zea mays
  misc_feature (1)..(165): n is a, c, g, or t
  misc_feature (175)..(193): n is a, c, g, or t
  misc_feature (2134)..(2134): n is a, c, g, or t
  Peptide Sequence Number=SeqID_12932
  Probeset Number=SeqID_22010
nnnnnnnnnnnnnnnnnnnnnnnnnnnnnnnnnnnnnnnnnnnnnnnnnnnnnnnnnnnnnnnnnnnnnnnnnnnnnnnnnnnnnnnnnnnnnnnnnnnnnnnnnnnnnnnnnnnnnnnnnnnnnnnnnnnnnnnnnnnnnnnnnnnnnnnnnnnnnnnnnnnnntttgctactnnnnnnnnnnnnnnnnnnncctgcctgcctactagtgcggcgtggaggtggagcagtgggcgctacagcctccatcagctagctgccttgccgtgtcctcctcttcctcctgtcggtggcgatctctgcggaaacccgagcttcgtccaagccaggcagtagtgcgcgccgcctgggcgtaattatggattcttttgagggttctgatcatataactcaaagaaaggttgttcctgcaaaacatattgcattggttgatggaaagaatgagcctgcaggagaagggttgcctgatggttggctgaaagaatgcagacctagaaagaaccgatatggatctagagccaagagtgacacgttctatattgatccaatcaatggatacgaatttcactctctcaaggatgtacaccgctatcttgaatctggagacatcagtaaatgtattagattgccaaacaagagaaaaattggggacctgcatactaaagaggaccgatctcatcatacaggaaaactatcagatcatacccagctggatactgctgatgagtctaatcgatatgatctaccggaaggtaccaatgcactgggatatgctctgcaaaatccagaaagcgaagagaataatgaaaacattgcactgtccaagcctgacaatataagctcaatccaaattgaagctggtcaggttgaagctacagaagataagagcatccaatcaggctctatagaatacactccaggggaagctaaatctgtcactaggaaaggaacagatgtgaaggagaaaccgaaggggaaacagtacaaaactaaacctgccaaggggattgctatacctcttagatcgtcacctcgtttagctgcactgaagattagccaggaagcaaataatgcaaccagagatggacatattggcacacagacagacaccattaacgtgccagaaccaaagcaagtccaaaaacccaggcgaaagacgaattcttctgtaattcctgagaggaaagatggggaacctaccaggagttgtgcagaaacccttccttcacttcccaatcagatacagggagcatcattcccacactcttcaggagatgctggatgccagaatgcaccagccgaggcacctgttctgcgacaacaagcaggagcaggacaaggcgaaacatctgatggtttgcctggatctgccctgacgtcgctgtttcaacatgtctggtcagacccgtgccttgtgttcgcgttcaggactctcctgggtgatatccctgttcttgatgacgctcgagcatatcggtcttcggcttatgatggtaacagagactactaccttccaccacagaacatgaataaaaacgctgcagccaactggtccgctctggcttatgatagtaacagaaaccacgcgcaagtcgaccatgttatgccgaggacatcagatacgttctacagcagtggttggttccctccccagtgaattcaatataggaaatatgaaagcaatttcttacctggcaagggcaaatcagaagcaagctcaagtcctagtcctagtcctagtcttggctcccttttggcctttgcctcaacaaagatgcatgttgcaagcaagactgcagctcgttgtaattgtgtagaggatccataactaatagtctaatgtagctatcacatgctaccgtgcgccatcagcatcagtctaattcacaggaagctgtctggtggtagacttggcaatactttctgttgtttgtgttttcgtagtaccaacttgatcatgcattcacttgttgcattgttacttgatagagcagcctcagtatcccaggaaatgatctttgctgtactttgtctatgagcatccacctgtgttctaccaacgtgtttgatttgagaaatgaagtagttcatcatcttcccgctcctcaaaaaaaaaaaaaaaaaaaaaaaaaan

SEQ ID NO: 7608 - DNA, 1866 bp, Zea mays
  misc_feature (1)..(1): n is a, c, g, or t
  misc_feature (6)..(10): n is a, c, g, or t
  misc_feature (706)..(706): n is a, c, g, or t
  Peptide Sequence Number=SeqID_12933
  Probeset Number=SeqID_22011
ngggcnnnnnaaaaaaaaaaaaaaaaaaaaaattccacatttccactccactccactccactgttctcgctttcccctccaccgacctgagactgagagtgagagcccgcagacaagtgagacaacccaccgcgaaaccgacaccccaatccgtcggaatccgtggccagaggctcgccgccgcccgccgcccgccgcgtcagagacacgctctcccccgggcccggacaaacagctcccggcggggctattttctcaccgcgtggtctctttcgatctatcagagcgacgactaggctaccgccgccctacgccagatgccctggtcttagtcgggcccttctccggcaacgagcacctaacagcagttcagatgattctgctggtgccacaggtgtgaagtacttagtggggagtgggcggacaagattttcattatagccatataaaatggagtgttccaattcaactagttcccaagggcatcatgtagaaaagtggaatcaagtgcaaatcattgatccttccattgttgaaatgggaccaagtcacctcccactgagtttcatgagaagatgccgtggagtattgtgtttggtgattatgatattaacagcatttatgatgatggtatacctgtcccctgttactactttccttgtgaggctgttcagtgtgcattacagcagaaagtctacatgcttcntgtttgggatgtggttagccatgtggccttttttgtttgagaagattaacaagaccaggtttgttttctctggtgaaagtgtgccagcaaaagagcgtgttctgttaatgaattcggcccgagccgaggttgactggatgtacttatgggattttgcattgaggaaaggccgcttgcagtgcatcaagtatatccttaagaaaagtttgatgaagttacctgttttcaactgggcatttcacattattgagtttattccggtagagagaaagtgggagattgatgaagcaataatccgaagcaggctttctgaatttaagaacccaaaggatcccctttggctggcagttttcccagaaggcactgattatactgagaagaaagtgtatcaaaagtcaagaatatgcagcagagcatggtttgcctgttctgaaaaacgtactccttcccaagacaaagggtttcaattgctgtttgcaagtgctgaggagtaccatagatgctgtgtacgacatcacgatcgcctacaaacaccggccgccgacatttctggacaacgtctacggcgtgggtccttcggaagtccacatccacatcagcagcatccaggtctccgacataccggcgtccgaagacggggtggctggctggctggtggagcggttcaggctcaaggacgagctgctgtccggcttctccgcgctgggccacttccccgacgaagggaaaggaccgagggggacctgtcgacggccgagtgcctcgcgaacttcgcggccgtggtcgccgtcacgggcctgctcgcgtacctgaccctgttctcgtccgtgtggttcaagctcttcgtggcgttcagctgctcgtctctcacgctcgctacctgctactctgtacatctgccccagatggtaggttttggctcaggtacccctgggagcatccacgcgaaggaggcttgagcgtagtagcgtgtacgcgttgtgactgtaactgagagctgtatgtatgtcagcagagaatttggtactgctgcctggacgcggcttttgtatcaccacgttgctgtgtgtagtgtatgtgcatacatgtgttggtgaatgtgtttttgcttgctaccgccatcttttatctggtccaagtaattgggcgtattcgttgcc

SEQ ID NO: 7609 - DNA, 2164 bp, Zea mays
  misc_feature (1)..(5): n is a, c, g, or t
  misc_feature (11)..(20): n is a, c, g, or t
  misc_feature (23)..(29): n is a, c, g, or t
  misc_feature (33)..(36): n is a, c, g, or t
  misc_feature (2067)..(2067): n is a, c, g, or t
  misc_feature (2074)..(2077): n is a, c, g, or t
  misc_feature (2088)..(2105): n is a, c, g, or t
  misc_feature (2107)..(2120): n is a, c, g, or t
  misc_feature (2122)..(2128): n is a, c, g, or t
  misc_feature (2132)..(2132): n is a, c, g, or t
  misc_feature (2136)..(2146): n is a, c, g, or t
  misc_feature (2151)..(2151): n is a, c, g, or t
  misc_feature (2153)..(2156): n is a, c, g, or t
  misc_feature (2159)..(2161): n is a, c, g, or t
  misc_feature (2163)..(2164): n is a, c, g, or t
  Peptide Sequence Number=SeqID_12934
  Probeset Number=SeqID_22012
nnnnncggcannnnnnnnnncannnnnnntagnnnngcccggccgggaacttagtagattgcgcccgattttgaagccctttatgctccgccgggttaagattgatgtcattgctgaaatgaccaaaaagaaagaagaaattgttccctgcaaattgagttctcgtcaacaagttttctatcaagccataaaaaataagatctcgcttaacgagttgcttgctggaagtcgtggcagtctaaatgacaagaagttacttagcctgatgaatattgtcatgcagttacggaaggtctgcaatcaccccgagctgtttgagcggaatgagggaagctcttacttcaactttgctgaaatcccaaactcacttctttctcccccatttggggaattgcaagatgtacactatgcaggcaagagaaatcccataatctttgagattccaaagttagtttatgagggaatcatctccaacatggaaaattctggaaacatctgtggatttcagaatggatatttgaacaggctgtttaatatatttttgcccagcaatatctatcgctcagccattccagaagttagttcatcaaaagagtctcttctatcatctggtgcatttggctttacacgtttgtcaaatctgtgcccagttgaagcttccttcctggctactgcttcattgtttgagagactagtcttttcagtaatgcaatggaataggaactacactgctgaaattctggatgaattccttgattcagaagataccggcatccagtccagtcagaatgattccacaaaagttcgtgcagttgcccgtttgttgctttcttctacaaaggccaagcccagtttgcttaggacaaagattgggactgggccaattgatggcccatatgaagcactggtgctttctcatcgcgacaggctcgcttcaaacattaggcttcttcgttcagcatatgcttttattccgccagctagagcaccacctataaatgtttggtgtgctgatcgaaattttgcctataagttcaccgatgagatgtatgatccttgggccaagaaactgttcctgggatttgctcgtacttctgagttcaatggtcctagacaaccaattgctcctcatcctttgatacaagaacttaatactgatttgcccatcattgagccgatgctgcagctaccctataggatatttgggtcttctccaccgatgagtaattttgatccagctaaaatgctcactgattctgggaagctccacaccttggatatgctactacgacgccttcgagctgaaggtcatcgtgtgcttctttttgctcagatgactaaaatgttggacattcttgaggattacatgaatttcagaaaattcaagtatttcagacttgatgggtcttcagccatctcagaccgccgtgacatggtccgagattttcagaacaggaatgacatatttgttttcttgttaagcacaagagctggggggcttggtattaatttgactgctgctgatactgttattttttatgaaattgactggaatccaacacaagaccagcaggcaatggatagaacacacagacttggtcaaacaaaggaggtaactgtgtacaggcttatatgcaaagataccattgaggagaaaatattgcaaagagcaaagcagaaaaatgcagtgcaagagttagttatgaaggggaaacatgtccaggacgatcatttaatgagacaagaggatgttgtttcattacttattgatgacacacagattgcacacaagttgaaagaaatatccatgcaggcgaaggatcgacaaaagaggagacgagcgaagggcatcaaggttgacaaagaaggagatttgacgctcgaagacttggatgatgctactgcagaagctgtagatcaagacaaaacgaccagcaaaaagaaacatcgaggctccatacgaatactcatgataatgaagagaggccggaactcggattcaggtactcagtggcctgctcacatgtaatcccgaaatgcagctcacgatggctgtaatgttcgagnacccgcnnnnctgttcactgnnnnnnnnnnnnnnnnnntnnnnnnnnnnnnnngnnnnnnntgtngccnnnnnnnnnnngtgcnannnnctnnntnn

SEQ ID NO: 7610 - DNA, 3417 bp, Zea mays
  misc_feature (1)..(1): n is a, c, g, or t
  misc_feature (13)..(23): n is a, c, g, or t
  misc_feature (28)..(29): n is a, c, g, or t
  misc_feature (36)..(54): n is a, c, g, or t
  misc_feature (2688)..(2691): n is a, c, g, or t
  misc_feature (2693)..(2693): n is a, c, g, or t
  misc_feature (2739)..(2739): n is a, c, g, or t
  Peptide Sequence Number=SeqID_12935
  Probeset Number=SeqID_22013
ncgacccacgcgnnnnnnnnnnnacatnncaggcannnnnnnnnnnnnnnnnnnatccagtcgaaacccactcacttgatggcaagtagcgaatcccacgtttcataatggctcggttccaatttctcccttcccaagcatggcgtccctgccgcagcccccgcgatccccttctcaagcctggcgtccctgccccccgcgatcgcgcctgccaagcatggcgtcgtcgcggccgttgcccccgcgatccccttccatcgacctgccaagcatggcatcgccccggccgttgccacgcccgccgcacacgccgcgatgagatcctggaccccccgcgacatcctcctccaccgcgccatggccgcccccgacgtcctcgcgcgccgctccccgaggtgggcatggtgcgcacgaccatcgcgggggtcacgacggcggcgcggttccaggagctggtggactggatggaggagtggaaggcggcgttcagggacaacagcaagtggacggagacggtgaacctggggctcgggagcctcgcgctcatcatgtccgggctgcttccgttcgccatcgacggggacctcgggttcgggaagcccagcctcgtgctaccctgggtgcgccatggccggctgggatccgcgtccgtgatggtggtgccctgccccagcggcgacatgtcgtggttcttcggcggcaccaggatgtggctgcggctcatggaggtggtcgaatccgaccctttgatgaagcagacaacgaacctgggaatggcgacagaggcgggatcccgtctgtgactgtgagctcgcgctggcggtacctgccattacggtgtacgggtatcatcaccatcatcatccagatccaggacatttccggatagatgacataatctgttcatctcaaatgccacaacattcgtgggcacatgttgccttgttggcttcatttagctcgcccgacatcatattttagcaactatctgtcatatataatctactaaaatggtttattttttcatttactcttatactctcatttttccaaccaggacttctgagcacatggaagatgaaggagacgttgcaactcctttacactttccaaatttttattaaatataccaatatcacgaggtgaaccttcgagtttagtgatttttcatatccatggtttgcaggcaagtaaacttattacatataatccattgaacttcatgtctggtttgtccaattcgacatcgaagggctcgccatgtggggtgacgtcgacggggcttcacctgtcctattctatcattattgtgattactgactatgccattgtttgtgctactgctgcttatgcttgcagtgccacaaaggcaagcgaacctttgatttggtccatgttctggtctaaccttgttgggtccacactccatgggtcactttcacattactactaccatatctgtgaggtaaccattgttacatgacctactcatatatcttttgcttgtacattcaagtaaagattgtctatttcaaccacaccaaaagtaaagaaaattattaagttggtgaattgacaaaagaaatgaagcaagtttttaggtgttgaagtataagtgattcgcccaacttttcccatcagcttgacttttagtttgggggtaaactaacctacacatagcaggcatcagatatagcatattacaataagctaggtatgtgtttgtattcttagttcttttagtatattacataagctacatccctcgtgatgccttaatctaggttatatctcaatgatgatttctttataacatgctgatcataaagcatttgtagacagtgcattcaagtaacggtacaatacaaagggtggcaaatgataatagcctgaagaatgatggcacaaaatgatctagagtattctttatcttacttagacgttggcaacattccatcatcatataatctcgaatattttcataaactggttgtgtaaaatggggggatctttctccatgaatctcaatggatctgttgtgcactgcatagctgcggagaagaaaaaggtatcaaatatcaagcagctttacggcagcgaaggatcattcactatgagtggatattaaactgttgcaaggaaaacatcttcattttcatcctaggaagttgaacgatcattctctttttgggcactgctgaaggtgatgttgttcacccaactgagtgtatgccccagctgcttgagcaagttcggcatcacaaagcgaatatcgattgcaatgattatattgtcatggtgactacattggttcttgaggttgaggatttgtctacacaacaagtgaatgataagctcctagaagctgtacaaccttaagcactcgagcaatggagcaatgtggtatgatgagagcataggaggtttgtcgagatgaggtcgaaacatggccccaatgtaactagaccagagcaattgacaatctaggcaatatccgctatctggtccattgtttctctcgtgggtccattgtttctgtcgtgggtcagacgtcttcgacgtgaagagaggttgttttgtcatttccacattctgaagcgtaatgtagtgcagtggacgcatatagctactacgtatgttaaagttgtattttttatatctcatattggatgtatttactattttccnnnncnaaaactttgcttgttggtaccgctattgaccatccaatgcagtgtnctcaaggtccaaagtacgtggaccttcagttggtgtaatcagaagcaatatccaagatattcatcatgcacttctacaaaatgtaatgtaatcctaagtgttcatcctcttttatttttcttgagtgaatgaaatgttactaaaattattctttttccagatatttaccatgtgccatattctttttttagatatggcccttggttcccactaatcctctcacgtaccagttagccatgtgttctgtttgacaaggagaaggaagcaggaacaaggtcgaaggagaagagtaactcagctccagccaatgacaagctcatgtgtgcattgtgataggaactgcttcggggtctgtttatgcgcaacgacggtttatgagaggaggtggcccccatctgtggtcgcaaaggagctaggccaactgcgacaacgacatcctgtgtctggttgtaattgtagtatttgttggtaaataattttgtcgaatattttgtatgccgtttcaaagcacgggcatataactagtggagcatatatacttctacaatcccacgttcgtgttacacaaaacaagcaactccaagtctccaacgcacccatgttggaactaggacactacttgtaaaggatatgaaccaacatctcttttattaaccccatggagtttgggcgccaaaa

SEQ ID NO: 7611 - DNA, 1639 bp, Zea mays
  misc_feature (1)..(1): n is a, c, g, or t
  misc_feature (1639)..(1639): n is a, c, g, or t
  Peptide Sequence Number=SeqID_12936
  Probeset Number=SeqID_22014
naagcaaagcccgtgttctgcttctgcattctggaaaaacagggtccacctccgtaaaaaaaaaaagaaagcctcgcgccgccgccgccgccgaggaaggttgaggaagaggatggccgagggcggggaagaagcccgccgccgtgctgcgatcgccgagtaccgcaagaagctcctcacctgccgggagctcgaggcgcgggtcaaaactgggagggagaatctaaaaaatgcaaagaaaaacttggaaaaaactgaagaggatctaaaatcactgcaaagtgttggtcaaattatcggtgaagtgcttcgacctttggacaaggaacgatttattgtcaaggctagcagcggaccacgttatgttgttgcctgccgaagtaaagttgacaaagaaaagttgattgctggtacacgagttgttcttgacatgacaacacttaccattatgcgcattctgccacgtgaggtcgaccctgtggtttacaacatgctacatgaagatcctggcaatgtaagttactcagctgtaggtgggttgtcagatcaaataagggaactcagagaatccattgaattacctcttatgaacccagaattgtttctccgtgtcgggattaaaccgccgaagggcgtgctgctctacggtccacctggaactgggaagacgctcctagctagagccattgctagcaacattgatgctaattttttgaaggtggtgtcaagtgctatcattgataaatacattggtgaaagtgcacgcttaattcgtgaaatgtttaactatgcacgtgagcatcagccatgcatcattttcatggatgaaattgatgccattggtggccgaagatttagtgagggcacaagtgcagatcgtgagattcagaggacattgatggagcttctaaatcagttagatggattcgatgagcttgggaaggtgaaaatgatcatggcaaccaaccggcctgatgttttggatcctgcactccttcgacctggtcggttggacaggaagatcgagatcccactgccgaatgaacaagggaggatggaggtcctcaagattcatgcagctggcatcgcaaagcatggggagattgactatgaagctgtagtcaaactagctgagggcttcaatggagccgatatgcgcaacttgtgcacagaagccggcatggctgctatccgagcggagcgtgactatgtcattcacgaggacttcatgaaggctgtgcgcaagctgaatgatgccaagaagctcgagtccagtgcgcactacagtgctgacttcggcaaggattgaacggggtatcagtgtatcacctgatccggagctgttctgatcatattgcaaactgtattttctggggatacttttcaaccctgtaaaacaactatttgcttttaatcttgggtgcgaaatccgaggtggctcttgatttttctaaattctatctgatatctgatagattccaggatggttgtggagggaaatttggcagttggatagattccaggatggatgtggagggacatctggcagttgggtcatggatgtagtctgtagacgtccaaattcatgtgaagctcttgttcttgctttttatctctcaatacagggtgcgttcttttn

SEQ ID NO: 7612 - DNA, 1813 bp, Zea mays
  misc_feature (1491)..(1494): n is a, c, g, or t
  misc_feature (1568)..(1569): n is a, c, g, or t
  misc_feature (1581)..(1583): n is a, c, g, or t
  misc_feature (1813)..(1813): n is a, c, g, or t
  Peptide Sequence Number=SeqID_12937
  Probeset Number=SeqID_22015
aactgattagtaactaataattgtttacatattagtcgttgcccatataaatataaatggagttctttgtgtcaaatgaacgctagttgaaccctagccggcggatctccgcgggcggcagtcaggagtggaggcgtggtcgcacgggcgaggtcgcaataggagaggctcagagagatggggcggccttacgcggtgaaggggcggaagaagaagcgcaagctcgaggaggcggcggcggcctcggacgctgccccgcccgtcgaagaagcggaggagctgccaccgccagaggtgagaagcggcgaggaaaagagcagcgaggaggatgaggcagcagcgggggaggaggagcacgcggcggcggacgggctcccaatcctacccaggacggttgatgggaagcggcgacccggcgccatcttcgtactcgagagggcctgcctcgaggtcggcaaagtcggcaagactatgcaaattttgaactctgatgatcatgcgaattatttgaggaagcagaatcgcaatcctgcagattataggcctgatatcattcatcaggctctactagcaatatttgatagccctcttactaaggctggaaggttacaggctgtttatgtgagaactgaaaagggcgtattgtttgaaatcaaacctcatgtccgcatgccaagaacctttaaacgtttctgtggtttaatgtcacaattgttgcaaaaactgagcattacggcagttggaaagcgtgagaagcttctcaacgttgttaaaaatcctgtcactcgttatctacctgttggtgcacgtaagattggcctttcatttagtgctgagaagtcagtcaacttgtttgactatgttgccaaatccaatgacgacgaacctcttgtgtttgtggttggtgccatggcccatggaaagatcgacaaggaatatacagatgattacatacaaatttgcaactaccctctcagtgctgcctgctgtttaaatcggatatgcagtgccctggagcagaagtggaacatccaatgaggaacttttgacaagcatgggaatcttgttttattatatacatcttacatgtacttccctctgcttatgtacaatgtttgaaagttaaaaccaaatgtttcagtgtggcattatgacgtgttttagacatcaattcatggctttaaactggtttgttcagagtcattttagcaaaaactgagtgttctgcatgaaccaaacttcggtaactcaaacattggtgtcagatcttctcgtgttcttccctccgcctttcttctacgtccctctgcttatgcccaatgtttcagtgtggcatcctgacgtgtctgtgtcgccttttcacggcttttagccggcttgtcctggctcttttctcctttgttcagagtcattttacctcctacttgtagtagcagtagcttatacgtcttgttgtatagggtactggtacctagctaactgatcgattannnngagtgagtagagtggattttggcaggcgtgcatgcaaatgtaaataaaaccaaaccccagcgcggattcttctnnatcaaccagtcnnnggggacgatcttgctcttgctccaccctcgggcacgggttttgctttcgctccagctccacggcggcggcggtcagatccgtctctcaacgtaagctcgtgcatgtacataagctagcgtcctccagtccagacgccgccgccgccgccgcacgggatctcctgacagtggcttgatgcacctgcacctgcccaggaaacgatggatggaactgcttcctcagcttcttn

SEQ ID NO: 7613 - DNA, 2870 bp, Zea mays
  misc_feature (1)..(12): n is a, c, g, or t
  misc_feature (14)..(110): n is a, c, g, or t
  misc_feature (112)..(171): n is a, c, g, or t
  misc_feature (181)..(185): n is a, c, g, or t
  misc_feature (2613)..(2613): n is a, c, g, or t
  misc_feature (2767)..(2870): n is a, c, g, or t
  Peptide Sequence Number=SeqID_12938
  Probeset Number=SeqID_22016
nnnnnnnnnnnngnnnnnnnnnnnnnnnnnnnnnnnnnnnnnnnnnnnnnnnnnnnnnnnnnnnnnnnnnnnnnnnnnnnnnnnnnnnnnnnnnnnnnnnnnnnnnnnnnannnnnnnnnnnnnnnnnnnnnnnnnnnnnnnnnnnnnnnnnnnnnnnnnnnnnnnnnnnntctttacccnnnnntcctcaacttcactcctgggagcatgagccactaccttgctcatatgtctacgttgaacgaaatcttactcggtgtgtcttatggtgatgtcatccacattctttcgttgtatggaatggttccagatgttgccgtggctttaatgccactatgtgaggcttttgggtcaatagcaccgccacctaatcacaagtctaccattcttggtgaaacatctgtttatacagtcttctcttgtgcattcctttgtcttcttcgtttgtggaagttttatagacctcctcaagagtattgtcttgctggtcgtggaggctcagtaaagctggaactgactctggactatctgttgttgatgcacaataatcgcattttctcaaattcgtctgcccctaatagggattcttacaacagtatgggctcagtcaatgaggtctctgctcagccgatttatattgattctttccccaagctaagtgcttggtatttccagaatcaagcttgcatcgcctctacactttctggtctttgcaacaaaaaccctgtccatcaagttgcgaacaaaattttgaatatgatttgccgaaaaatgaataaaggtggagtatcatctagtaatctttcatctacttctagtagtagcgttagtggttcttctgtaagtgcatcggatgattcttaccaaaggcctgctgttcctgcttgggaatttttagaagctgttccttttgtacttgaagctgttctgacagcatgtgctcatgggcggctttccagccgagacttgactacaagcttaagggatcttgtggactttttgcctgcttctcttgctgcaattgtaagctacttctcagcagaaattacacggggaatctggaaacctgttccaatgaatggaactgaatggcccagtcctggtgcttctcttcattccattgaagctgaagtaaaggaaattcttgcatctgctggtgttcagattaacagctgctatccacgtggtgtgccgccaatgcttcctttgcctatggctgcacttgtcagcttgacaattacatttaagctagataggagtttggagtacattcaaggggtcattggacatgcactagagaactgcgcagggggaagttcctggccaagcatgcccattatcggggcattgtggacacagaaagtgcgaagatggcatgacttcattgtcctctcttgtatgcgttctccatttggcagagacaaagatgcagttgcgcagctcatccgaagctgcttttcgtcctttctgcagtcatcatccagtggttctgacataatcgcaaaccgtggagttggggctttattaggggactcaatcacggatcaaggtcttaggctcccaatggcacctggtttcgtctacctgagaacatgtcgaactttccatgacacatacttcgttagtgaagtgatcctcaagcaagtgattgaatgggctcacaaacttgcaaatggatggtctttcaatgggcctccgcagttgaaatcaggccggacaccactatcttgtgcagcatctatggcgcatcaggtcgcgatgcttggtggtggtctcctatgcatagcaggtggaccacttgtggtccaggtgttgtatgaagacacactaccgacactgctgctgtcagccagagaacagagtttgaaagaccctgggccagtttctagcacactacaaggttacgccatggccaacatgctcttttactgtggtagcctactttggggagcggacaggagttctcctgtcatgaaattgtctttcctctcgaggcggccacgggtggtgagaaaccacatggatttcatagctggtgtactggacggacacattcttctgggctgtgacccgggtacctggaaagcgtatgtttctcagtttatgttcctggtggtgaagtttgttccatcatggttgccggacataaagctggacacgctaaagaagatagcagctggacttcggagttggcatgaacatgaccttgctctatcccttcttgagcgaggaggaccacaagcaatctctgttgtagtcgagacctttctgtgatcctgccatttggacattttgccccccacctgacatcgcagccgctgttagggtttgaagtcggtggtctgaggtctagctgaagtaatcaggatgacccttccagaattccacttgagcaaccaggataactgatgtttttctcatgtatggcgaacccattttgtttttgtgaattcaatacggaagaacattcaacctactagagtctagagtgtattgacatcagccctaacatgtaacctatgggaaattcaataaattgagagaacaaaaaaaaaaaaaatgttcaaacacaaccaagttggaactggtgtgtggaaagagagccgatgtcntcctcgtgtacggcgaacccatactgaagaacagacaaccaagcggcaaaagtttcggccagcccgagcctggagaacataggggtcatccgtggcacgtaatctaggggacttccagtaactttttttgaaaggcatcgggccccggaccttnnnnnnnnnnnnnnnnnnnnnnnnnnnnnnnnnnnnnnnnnnnnnnnnnnnnnnnnnnnnnnnnnnnnnnnnnnnnnnnnnnnnnnnnnnnnnnnnnnnnnnnn

SEQ ID NO: 7614 - DNA, 2364 bp, Zea mays
  misc_feature (1)..(1): n is a, c, g, or t
  misc_feature (2156)..(2163): n is a, c, g, or t
  misc_feature (2170)..(2170): n is a, c, g, or t
  misc_feature (2180)..(2182): n is a, c, g, or t
  misc_feature (2197)..(2202): n is a, c, g, or t
  misc_feature (2210)..(2239): n is a, c, g, or t
  misc_feature (2267)..(2268): n is a, c, g, or t
  misc_feature (2288)..(2291): n is a, c, g, or t
  misc_feature (2301)..(2303): n is a, c, g, or t
  misc_feature (2306)..(2310): n is a, c, g, or t
  misc_feature (2312)..(2320): n is a, c, g, or t
  misc_feature (2340)..(2346): n is a, c, g, or t
  misc_feature (2358)..(2364): n is a, c, g, or t
  Peptide Sequence Number=SeqID_12939
  Probeset Number=SeqID_22017
nggatgtgttgctactcccggtgtttggcggcgctcaatcaccaaaggttctgacaccacgttggactccccttcctcctcgtccgcgacctccgcagggtggctgttgcacttgcacctgcaccgtagtggggattccagcttccaccactgccccccgtccccgtcccggcgccggcagtagctcggaggccgggaccacgctcggtggcgtgtcgtacgtcagcacgcccatcccgacgacgacgcgttcgattcaggcggcgacaaatacctgctggccaagacctatttcgactgccgggagtaccgccgcgccgagcacgtgctgcagaaccaggtcggtcgtaaggctgtgttcctgcgatgctacgccttctgcatgagtgcatgtctggagggaagcggaaaatgctgttaatcaggaactagttgctttggagaaagagctctcaacacaccgaagaactggctctattgattcgtttggactttacttgtatggcattgtcctacatgataaaggatgtgaaggtctaactcgaaagatcttggtagaacctgtcaatagctatccttggaactggagtgcttggtcagagctacaaactttatgcaccagcagtgacattttaaacaaattaaatctgaagaatcgctggatgaaagacttctttcttgctagtgcatatctggaactagagacgcatgaagaagacttctttcttgctagtgcagattctttctttggcttgtcttgcacaatagatgctggaccgcagaccgtcttgctaaaagaggactttcccatcccagtgcgtgtcccctttgtgaccaagaagaggaaacaatacaacatcttttcatctcttgcgtctttgcaagacagttctggtacttcttgttgagcaggtctgggttgcctaatctttcaccggacaacgctttttgcagcctagatgactggtggagcagggctgtggagaagattccccgtgatctccaatcaggagaaggagactgctaaaaatatattgcaagggataaaaatgttacagtcaggatttccatcaatggatattgaccattttgcactgtaaagtccacccgcagataagttggaacattggacagtaagtgtcaagaagtcaatagccaaaaagccaacagccggaagtcaaaagctagcttcgagccaaaatcccaaaactgcagtacaaacaaacaggccctgaagggaatgattctaacgagggctgcccaactgatggaagctcaattgcacatctcgatcgggaattacttccaatcttcggtcacaggctcacagcgtgatgcttattgtttgtatcctcgtcacgagactccatgctgctggatacgatgacctaccgcgcatgatgctggctcgtagttcctggagcttggcaacaaggagaaccaggcgcctacatggcgcgaagatgagcgtcattggaatgagccagacccctaatgcaagtatcaacatagctgtcttctgtgagtagagctctaaatatctgcgggtttggcttccttcaccggacagctatctggatagtgttctccccatggttgcttgcatatataagcttcattggaagaccttgccttgccttgcgtgcaatgtgcatgtcaaattattggttataagtataacagcacacttgtcaaatgccttacctctgacatttcgtaaaactaaccactgcagattttaaaatcaaaggcgagggtgtaggacaacggggtggaagtactttgcacggtatgctcgaggttctactggaatgaaacaaatctttttggtgttgaaacgcgttggtagtcgtcatgttagcctacgtcagggccgcattttgccattttgtcagtcatgtaggtttggtttatgtactctagtgtttaccccaatttttttgcatgtattgagctagattagagtgtttaccataattttttacatgtattgagctggataagagtgtaaaccaatccatttcaacacatgtggattgagatgaatactagagtatccaaacaataccttagggcctgttcggttgcgtctgatccgatagggggggaaatccctctccaatcaaatagaacaaaaaaaaaaaaaaaagcggccnnnnnnnnctctaancttcaattcnnnagttattcttggcgnnnnnngcctctgnnnnnnnnnnnnnnnnnnnnnnnnnnnnnngaggtcgtcgagcctagcgagtactctnnccctcgctggcgatgagctnnnnatgtggtgtnnngcnnnnncnnnnnnnnngaacctgctttcaactcttnnnnnnntgcttgacccannnnnnn

SEQ ID NO: 7615 - DNA, 1744 bp, Zea mays
  misc_feature (1)..(3): n is a, c, g, or t
  misc_feature (5)..(5): n is a, c, g, or t
  misc_feature (16)..(23): n is a, c, g, or t
  misc_feature (31)..(33): n is a, c, g, or t
  misc_feature (36)..(40): n is a, c, g, or t
  misc_feature (136)..(138): n is a, c, g, or t
  misc_feature (270)..(270): n is a, c, g, or t
  misc_feature (324)..(327): n is a, c, g, or t
  misc_feature (356)..(362): n is a, c, g, or t
  misc_feature (1428)..(1428): n is a, c, g, or t
  misc_feature (1431)..(1436): n is a, c, g, or t
  misc_feature (1499)..(1501): n is a, c, g, or t
  misc_feature (1503)..(1503): n is a, c, g, or t
  misc_feature (1506)..(1506): n is a, c, g, or t
  misc_feature (1508)..(1510): n is a, c, g, or t
  misc_feature (1572)..(1574): n is a, c, g, or t
  misc_feature (1590)..(1594): n is a, c, g, or t
  misc_feature (1648)..(1651): n is a, c, g, or t
  misc_feature (1653)..(1674): n is a, c, g, or t
  misc_feature (1678)..(1678): n is a, c, g, or t
  misc_feature (1680)..(1687): n is a, c, g, or t
  misc_feature (1690)..(1695): n is a, c, g, or t
  misc_feature (1697)..(1699): n is a, c, g, or t
  misc_feature (1717)..(1721): n is a, c, g, or t
  misc_feature (1741)..(1744): n is a, c, g, or t
  Peptide Sequence Number=SeqID_12940
  Probeset Number=SeqID_22018
nnngncgggggtacgnnnnnnnnctccctannncgnnnnncgcccgagcgccgccagatcgacaaccgccacgacgacatcctcgccaccggcggtgtgcatatcggcggtaccgacttcgacaagcaactctcgnnngccggcatcgatgccgctcgttcggctacggcagccgcatgaaaagcggcgcctacatcgcccaccagccaccacatcgaacctggcgacctggcacaccatcaactcggtgtactcgcaaaaatccaagcnggcgctgggcagcatcgcgctacgacatcgaggacacgggcggcatcgaccggnnnntcaacctgatcgaacagcgcgccgggcannnnnnngcgatggaagtggaagaaaccaagatatcccaggtcccagcaaggcagcaaccctagctcagtagctcccaggtggccgacgggccgaccgccgacggcgtcctcctccaggctctagtccggctcctcccaagctcccaggccccagcaggccagcaccgtagtgcgcacagacgcgcagtcctcctcccaggctccccgctcccagcggccaccggccagcaccgcttttcttcaacctgggcacctggcgcccgcctggcgaagtttctatgtacaagcatagcttcaccttcaccccccaaacttgctacttgagatgcagttaaaatttatgtaacaatagtactttgtctcagttaactgaaaacctcgagacaaaattgaaccaagcaaaaggttaactgcatctcaagtagcaagtttggggggccggcgctgccgacgcggagtctcgccgcgggccgccgtctacggtgcgtttcttccccgatggggagcgccacaaggcacggcagccgccgccaataaagctcgaggaggaggagggcgtcccgccgccgcccgccaccgaggaggagatggccccgcgcaacctctggcaggtgtatgcgcttggggcgttcattgtgttgagatgggcctgggctaagaggaaggagaaccaggacagaaaggactcacctgatgctggggatgggaatgcaccggacagatcgacttaatctccggttgctgctgcgtggactaggctacccgcgaagatgaatgccgtttcgcgataagccaacgatgatggatcattctagctaatgcatcatataatggtcatcgatgttgctgtggatttatgtattttcctgacaatttgcaagttacattctccccctttttcactctagtgggatcctttttatctgaggtgtggcacctgcctgttcactctactgataaacgatgcctgtcaatgaacatgcgtggaagagaaccaaaaaaaaaaaaaaaattggcaggcatcgggttaaaaaaaaaaaaaaaaaaaaaaaaaaaaaaaaaaaatccgtantgnnnnnngaccgggtcgaaccagggttgagcgtggaattgagtcgggcattgttcgagtcggccattgannncntgncnnngagcgggtggcgcaacagcgtgacccagttgctcaacgatgcctcggtggacgtggcccagnnngacacagtgttctttnnnnnggggttccagcgggattccggcgctgcgccacagcatctcggcgatgctgccgnnnngnnnnnnnnnnnnnnnnnnnnnnttgncnnnnnnnnagnnnnnngnnnattgaggccagcaagcgnnnnnctactgagttttagctgaannnn

SEQ ID NO: 7616 - DNA, 498 bp, Zea mays
  misc_feature (271)..(271): n is a, c, g, or t
  misc_feature (298)..(298): n is a, c, g, or t
  misc_feature (314)..(314): n is a, c, g, or t
  misc_feature (476)..(476): n is a, c, g, or t
  Peptide Sequence Number=SeqID_12941
  Probeset Number=SeqID_22019
taaacacggaaccacacccccagagaaaccattctacatattctcatatacactcattagcacatagcgctaggcgcataccaaccatgagcaaactgttatcctacatttccaaggtcatgtgcatcaaggcaagaacggaggcaacacaagccggcgaggacagcagctgcacagcggacgaatgccgcatctgcatgtacaagattcggctcggcgaggctacccgcaggctgcagtgtcgccatgtattccaccgggactgcgacgnccggtggctctcgtcatgccagcaaanctgtccgctgtgtcgngtttatgtggccgttcggggctagctgccggtggcggcttagcacaccagccgtgatgcacaggctctcgccgacgaccttgttatctggttctccaccgtgcttgttcccggtttctgatgccaaattccttcgtctgttcgttcgtttgattcagcttgnttggtgtgtctttttttttttt

SEQ ID NO: 7617 - DNA, 350 bp, Zea mays
  Peptide Sequence Number=SeqID_12942
  Probeset Number=SeqID_22020
ttccttggatcccgcagcggcatttagccccctttcaaagaaaaagccacatacttgatcaaatataaagggcggtctctctcgtataaagctcccagctccaaagcagtctatttttttgaataagtgggttggctggagtgatttacctgtacatgtatgtgttagttagaacccccggtttataggcagcaacctgttttaaattagctttgaggttttatccccctttccctgctgattgaacatattttagattgtaacatctgctttgtagaatgctaatgaatctttagttttcagtgggtggccttttaaaaaaaaaaaaaaaaaaaaaaaaaaaccaaaaa

SEQ ID NO: 7618 - DNA, 588 bp, Zea mays
  misc_feature (370)..(370): n is a, c, g, or t
  misc_feature (456)..(456): n is a, c, g, or t
  misc_feature (496)..(496): n is a, c, g, or t
  misc_feature (509)..(509): n is a, c, g, or t
  misc_feature (517)..(517): n is a, c, g, or t
  misc_feature (530)..(530): n is a, c, g, or t
  misc_feature (540)..(540): n is a, c, g, or t
  misc_feature (542)..(542): n is a, c, g, or t
  misc_feature (545)..(545): n is a, c, g, or t
  misc_feature (558)..(558): n is a, c, g, or t
  misc_feature (574)..(575): n is a, c, g, or t
  misc_feature (581)..(582): n is a, c, g, or t
  Probeset Number=SeqID_22021
ggcggctgtgctgaacagcaggaagacgccgcaggcggtggtggccgtgctggtggcggcggcgctgctggcttcgtccgcttcggcggcgatcacctgcgggcaggtggggtcgtcgctggcgccgtgcatcccgtacgcgacggggagggccagcgcgctccccgcgtcgtgctgcagcggcgtcaagagcctcaacagcgcggcgcggaccagcgcggaccgccaggcggcgtgccgctgcctcaagagcctcgccaacagcgtcaagagcgtcaacatgggcaccgtcgccaccatccccggcaagtgcggcgtctcgtcggattcccatcagcatgtccaccgactgcaacaagatcagctaagntacgacgaccaaagctaataagcctaccgaacgtacacgtaccgttccgcgcgctgacgagtgatgaaaccaggggaagaaattanataaagcccgtgtattggcaggaacaagcatgcagtatcnatctatatatatnctttctgnagtactctatatnatggtatgtngnggncttgcaatgcgantttgtttcgatccaannaaatannaaaaaa

SEQ ID NO: 7619 - DNA, 155 bp, Zea mays
  Peptide Sequence Number=SeqID_12943
  Probeset Number=SeqID_22022
tcacgcctcttacgaagtcagtcggaaccggctcgagtccatgggcggttgtaaaatctgacaacaaagtggtgagtgtgaatttggatctggtggtgagtgtgaatttggatgagtgtggtgtctttgtcccgaggtgcaggacacagactgtt

SEQ ID NO: 7620 - DNA, 255 bp, Zea mays
  Probeset Number=SeqID_22023
ggtacctgggagacatctaggcgaggacgaaatccaaagtagcgacagtcctggcgagtacagagacggagccctgaagactccccacgattgagtccaagcccgacaagcccaacgcggcagcactggtggagagtacagatacaggctgaacgctcgaggtggctgcaatgattgctgctctcagtagcgtcacaagcactgccagctcggacttgacgaatgcagcgccaagtttcttgagaccgtcaattg

SEQ ID NO: 7621 - DNA, 768 bp, Zea mays
  Peptide Sequence Number=SeqID_12944
  Probeset Number=SeqID_22024
gtcgacccacgcgtccgaccgaagcagccaaaacctgctagaagcctataaggccaagttccaccgttcccaaatctacgacttgagcaaaaaccacagctatagccatggcaaaggcaggggcaacggccgtgctggtgaccgtcctggtggtcctggcggcgaccgccgagatggcgcacggcgtctgcaacctgtcgagcgccggcatccgcgcgtgccagcccgcggcagccatccgcaacccgacagaccagccgtcgtctgagtgctgcgccgcgctggcgggggccgacctggcatgtctctgccggtacaagaacgccgccggcgtgtgggtgaggttctacaggatcgacatcaaccgcgccatggggctgccgggcaagtgcggccttgccatgccggccaactgctgatgtcacactgcaactgcatgcatgccgtgctgcgtgcgcagctaagtttacactacatgcgcgtcaaggcgtatgttctactgctatatagctacgacatctatgcaataaacgaaggcatgcacacaatgatacgtgcctctcttgtgcacgcagtgcaatatgtcgatgaactatgggtgcggacgtgagcttaagcttattaatcagtgcagaagtttatgttacagaactgcattatgtttgagtacagaactgcattatcaaatctgaagtttatattaatatagtaatatgaattaaaaacgacctttgatgcaaaaaaaaaaaaaaaaaaaagggcggccgc

SEQ ID NO: 7622 - DNA, 1046 bp, Zea mays
  misc_feature (950)..(950): n is a, c, g, or t
  Peptide Sequence Number=SeqID_12945
  Probeset Number=SeqID_22025
gatccaacccagatgcatggattttactgctacgcgaaacgcatcgcacacttcttcttttttttttttacacaggaacacagacccatcaacgtcaacacaaagatacacactagaagtactagcaaaaaacaaacagcagagcacatcaacctcgtacatctaagctagatagctacaggctcggacatctacgccgacggggtcggatcatacaaaacgtggcgccagtgggcccatggactcatgctgctctcgtcaaggacaaggagtcacgggcacttggtcttgttgccgtgcgtggtccagtcggtgtagcacttgccgcacgtctgctggttgccggcagtgcccgccggcacgcagcggcagacgccgcagcacttgaggcacgcccgggtgcagatgttcttgcgcgagtgcgcgccgcaccgcacgtcgcacgcgcccccgcagtctttggcgaggtcgacgatctggtgcggcggaggagcccgtggtgggtaggcgcccggagcagcctggccgagcacgaacaggccaagcttggtgttgctggtggtgagcaggaggagcgacgctaccaaggcgacgaccaccgcaagcttgctgggagccatggtgtgtgtgttgtgcctctggacgaagggtggagctggactggaggtttctcgagtggagagctgtggactggctggggactggggcctcttcttgattctcgagccgaattccggtctacgtacggcatgcgcccgtcatagctcttctatagtctttggcgaggtctcccatctggtccgtcggaggagcccgtggtgggtaggcgcccgcaacagcctggctgagcgcgaacaggccaagcttggtgttgctggtggtgaacaggaggaccgacgctgaccaatgacggccagaccacacgcaaggcttggctggtacaccatggntgtgtgtgttgtgcctctggacgaagggtggagctggactggaggtttctcgagtggacagctgtggcctgcgtgtggactggggacctcttcttg

SEQ ID NO: 7623 - DNA, 2549 bp, Zea mays
  Peptide Sequence Number=SeqID_12946
  Probeset Number=SeqID_22026
accacacgtccgcccacgcgtccgcctacgcgtcggcggactcgtgtgcggacgcgtgggggcatgggactgggccccccggccgcgacgaatatactcactcctgtcttcatacgtagccatatccggcaggcggcagtacctgtatatggttttagctatacgcgacctcagttcgggcgcaagctacaaccccgaccaggcgagaagaagcatcgctagtgtgacgagcttaaccagcaccagcaacgtgatccaaatccctgaccgccccctgccatggacgccctactccacagcccctcccccgccccccgtgatgggcgcgcccatcgcgtatcctcccccgcccggcgccgcgtaccccgccgggccgtacgtgcacgcgccggcggccgcgctctaccctcctcctcccctgccgccggcgcccccctcctcgcagcaaaatggagacgccgacagcccgccacagcacaccaccccggtcactatttcatcccccgctctacccgaacaccaaagacatcaccccctaaaagcacctccctcttcctcttcctccgcccccaatccccctcgtctcacaaccctagctgcccccgaatccatggatcctaacaaatccagcaccccgccgccgcctccagtcatgggtgcccccgttgcctaccctccgcctgcgtaccctcccggtgtggccgccggcgccggcgcctacccgccgcagctctacgcaccgccggctgctgccgcggcccagcaggcggcggccgcgcagcagcagcagctgcagatattctgggcggagcagtaccgcgagatcgaggccactaccgacttcaagaatcacaacctcccgctcgcccgcatcaagaagatcatgaaagccgacgaggacgtccgcatgatcgccgccgaggctcccgtggtgttcgcccgggcctgcgagatgttcatcctcgagctcacccatcgcggctgggcgcacgccgaagagaacaagcgccgcacgctccagaaatccgacattgccgctgccatcgcccgcaccgaggtattcgacttccttgtggacatcgttccgcgcgacgacggtaaagacgctgatgcggcggccgccgcagctgccgcggctgccgggatcccgcgccccgccgccggagtaccagccaccgaccctctcgcctactactacgtgcctcagcagtaatgtatcatcatcacgttattgttccgtctatgtgcctgagcaataatgtatcatcattgccttattgttccggggcagttgtgttatttgtgtctgtttagttgctgctgctgttaccgcgtaatagcatatgtgttatctgtgtctgtttagttgctgctgctgttgccgcgtaataaaacttggtcatttacggggctccctcaagattaagaattgagttgtttgatggtagaatcctggtaaggttgttgtaactggggggcgcctttgtttgggctggtagtgtatgcctaggcctcacttatctgatgctgtaatgcgacaagtattatgtggttgtctggtaattattgtccaattaatgctcaaaaaaaaaaaaaaaaaaaaaaaaaaaaaaccgatctgccctgttggtattggtacccacgttcttgttgttgttgcccttgccaaccaataactcttaagatggcgttccatcgccgcatctcgtttctggtttcgtaatcaagagggaggcttgtgtgatggtcatggctcatgccatgcttaacagagtgtaagggggtttgcctgtggactgtcgtaactggagtattaatcagtgtattactacttaccctgtcaaaaaaaaaaaaaaatgcctgtcctgcccgtttgacatgaacctatctgtataatgtcatgctgttctttagatctctggtaggatagagaagcagtgatctcaggcttgttggtgtcgcgcgcaaatttgatccattttctatgtgtgtgtgtgtgtgtttttccccactggtgtgtaatcatgctcctccttggaatagtttcagggacctaattatgtctgctaaatttccagaacatgaatgcgttcctcgccaaaattccagattaacccggcagcgccctcggttcgcggcgcctgggaccggcgtcgtcggggctggcgccccgggcggggcgccagcagccgggatgccctactactatccgccgatggggcagccggcgccgatgatgccggcctggcatgttccggcctgggacccggcctggcagcaaggggcagcggatgtcgatcagagcggcagcttcagcgaggaaggacaagggtttggagcaggccatggcggcgccgctagcttccctcctgcgcctccgacctccgagtgatcgatcggcgcgtctcttggtcctggcctcctggcttagctacatgtgcatgatgtcaatccttcaatgtgccatgctgtgtatactctacagcaaacgtggtaatggagctgctatgcatacagaacgaataatccggggggagataggccgtaag

SEQ ID NO: 7624 - DNA, 240 bp, Zea mays
  Peptide Sequence Number=SeqID_12947
  Probeset Number=SeqID_22027
atggccattgttggcgccgggcggtcggtagtcgtttacctccacatccatcctcgcctccggcctgccgcccaggtccatcatcgccgcttcctgtttcattccggcacaaaatcatcagcagcagaattactacagcagctaccatcgatgaataattggttagctacggtattaccgtacctgagaagaagcgagattcagagccggcgggtgctgctgctggctccccaggcgcag

SEQ ID NO: 7625 - DNA, 749 bp, Zea mays
  misc_feature (22)..(22): n is a, c, g, or t
  misc_feature (36)..(36): n is a, c, g, or t
  Probeset Number=SeqID_22028
ttttttttttttttttttaggnccgaccaatttcanaactgggtcattttcgttatagtaaaaaccaagttgcaggtaccaattcagccataaaaagaacaggtataccgagatcttaaaatacggtataccacaaaggagatgatacaattgcttagagaagcttcactcgctctgagttctattgtatatctctcactacgcctgaatcagctaagaacagggaatatgcgtgttaggtgctcaaatggaacggtatcagctgtgttcttcttgagctgggggtgattgaactcattgctccgtcaggctttcgcccattgcggaaaattccccactgctgcctcccgtaggagtctgggccgtgtctcagtcccagtgtggctgatcatcctctcggaccagctactgatcatcgccttggtaagctattgcctcaccaactagctaatcagacgcgagcccctccttgggcggatttctccttttgctcctcagcctacggggtattagcaaccgtttccagttgttgttcccctcccaagggcaggttcttacgcgttactcacccgttcgccactggaaacaccacttcccgttcgacttgcatgtgttaagcatgccgccagcgttcatcctgagccaggatcgaactctccatgagattcatagttgcattacttatagcttccttattcgtagacaaagcggattcggaattgtctttccttccaaggataacttgtatc

SEQ ID NO: 7626 - DNA, 472 bp, Zea mays
  misc_feature (96)..(96): n is a, c, g, or t
  misc_feature (376)..(376): n is a, c, g, or t
  misc_feature (385)..(385): n is a, c, g, or t
  misc_feature (394)..(394): n is a, c, g, or t
  misc_feature (441)..(441): n is a, c, g, or t
  misc_feature (454)..(454): n is a, c, g, or t
  Peptide Sequence Number=SeqID_12948
  Probeset Number=SeqID_22029
gggggcacgagagacaccattgacaacgtcaaggccaagatccaggacaaggagggcattccaccggaccagcagcggctgatcttcgccggcaangcagctggaggatggtcgcacccttggctgactacaacgatgcatttttgtatgagcaccctccaccttggtgcctccgccgtcaggggtggcatgccagatctttgtgaagacattgactggcaagaccatcaccttggaggtggagtcgtctgacacaatcgataatgtcaaagccaagatccaggacaaggagggcattccaccggaccagcagcgcctgatctttgctggcaagcagcctggaaggatgggccggtaaccccttcggccggactancaaacaatnccaggaagngaggaggcaacccttccaacctgggtggcttccggcttggcgaaggngtggtattgcaangatctttggtgaaggaac

SEQ ID NO: 7627 - DNA, 674 bp, Zea mays
  misc_feature (607)..(609): n is a, c, g, or t
  misc_feature (618)..(621): n is a, c, g, or t
  misc_feature (638)..(640): n is a, c, g, or t
  misc_feature (650)..(651): n is a, c, g, or t
  Peptide Sequence Number=SeqID_12949
  Probeset Number=SeqID_22030
cctttttgcaaacaccaaaaccaaacagaaggaggagtaagaagatatctcatttccattttgctagaaaaaaaattgctccctctctttctcaaatctgaaagaataggggaaaatggggttgtctttcacgaagctgttcagccggttgtttgcgaataaggagatgcgtatacttatggtgggtcttgatgctgctggtaaggccaccattctctacaagcccaagcttggtgagattgtcaccactattcccaccattgggtttaatgtggaaactgtggaatataagaacatcagcttcactgtctgggatgttggtggccaggacaagattcgtcctttgtggagacattatttccaaaatacacaagggcttatttttgtcgttgatagcaatgaccgagatcgtgttgttgaagctcgggatgagctgcataggatgttgaatgaggatgagttgagggatgccgtgcttctagtcttcgcaaacaaacaagatcttccaaatgctatgaatgctgctgaaataactgataagcttggtcttcattctcttcgtcagcgtcactggtatatccagagcacatgtgctacctctggtgannnactttatgnnnnacttgactggctctcgnnnaacattgcanncaaggcatagtgattgatgatag

SEQ ID NO: 7628 - DNA, 420 bp, Zea mays
  Peptide Sequence Number=SeqID_12950
  Probeset Number=SeqID_22031
atgatgcaacaggaactaaaataaattggagtacggtaggggcagagggaatttccggtggagcggtgaaatgcattgagatcggaaagacaccaccggggaaagcattttgctgggccgacactgacattgagagacgaaagctaggggagcaaatgggattaaagaccccagtagtcctagccccaaacacagccggtaagggcaaaggcaacgaggtcatcttcgacgacgcgcgaaaagccgatgaaaataataaaaactcttgcaggagagtggtggcagaaaggactcctgatggaggtgagactctaaagtctaggacatcgctggacagtccggatcattgcagcggacggtacgacagcgcccaggagccaagacgaccacgtaccttcaaaccacgacgaccagaaatag

SEQ ID NO: 7629 - DNA, 222 bp, Zea mays
  Peptide Sequence Number=SeqID_12951
  Probeset Number=SeqID_22032
aacggcgcaaaagcccaccagccccagatccaagcggactctctcaagactaacaccgagacggacggcgcgcatcaggcacccacccctcacacggacggccaatcccaggcagcggcgcgtccaaacctcgcggtggaggacctgccgatgacggccaagccaccaccccagagcccggccccccaaggggagacacagagacgcgtatcagaggcatag

SEQ ID NO: 7630 - DNA, 574 bp, Zea mays
  Probeset Number=SeqID_22033
atcgcacatattattgagaccaactagcaacatagaaagcacaatattgtaccaataatggcagccaaaagattttgcctcattatgctccttggtctttctgcaagtgctgctactgcgatcattgtcccgcaatgatcacaagctcctatagcttcccttcttaccccatacctctcaccagcgatgtcttcagtatgggaaaatcctattcttctaccctacaggatccaacaggaaagtcacagcaggtgatctatacctttatcaccccttggttccccccaaaggtgtttcaggccctttttcccacccccccttgggggttttttggggcaaaaatttgggcgaaaaaatcaaaaatccggttaaaaaaattttgggtgacccttttgaaaaacaggaccccttgtgggtttttgggggaaaaacaattgggggaaaaagaataaaagaggtcctggtaaaaaaaaatttggggggtctttcctcccaaaagaaatatttttttgtttttttcgcccaacccaccaaggcgggaaacctctattttggtgtaaaatatatatgaaaa

SEQ ID NO: 7631 - DNA, 263 bp, Zea mays
  Peptide Sequence Number=SeqID_12952
  Probeset Number=SeqID_22034
gcgtgtgtgaatatctctctctctctctgtctctctctctctctctctctgtctgcctgactcacaggctgaaaagcgtgtacatatctgatcaacaccagcggtcgcccgtcagtgcgcgcgtgcatgtaacgcaggcaccaacagctgccaagcgagtgcgtgcatgagcatgacgagtcacgctatgtgttgtacgtatttttccatgatgataagtataacacaccgtgtttagctgcagagacgcgagcagcggtttt

SEQ ID NO: 7632 - DNA, 570 bp, Zea mays
  Probeset Number=SeqID_22035
tcagggccccagctcgccgcgccctggacctcccatgcgtcgtcgtcctggttcaagttctgcacgccgagctccctcagctcgctcctcccatggctgcctgcgccgcgcgccctgctcctcttccttcctcccgttttctctctgcttgccgcgtccggccgagcgttcctgcgccttgctccccctggtgcgcgcgccccatctcccggtgctcggccagcccgcccatgggagtcgcgtcccagccaagctccctactcggcgtccgtctcctagctcgcgccctgcttccatggccatgcgcccatcttcctccctctctgcttgccgcgtgcgcagctccctggcgcgctcgtcctgcccctgtacgacacccatctcccctgctcctccggcgacacggcttcctgcttcctcgtcagcgcgtctctttctctggtctcttgtgtcgcgctcgcccagatcgtcgccgttgagtttcctgtcacgctccctcagctcacttgccgcgctcgcctcggctcctagttcgacgcgcaattttggagctctgcgcgaacggcgcat

SEQ ID NO: 7633 - DNA, 216 bp, Zea mays
  Peptide Sequence Number=SeqID_12953
  Probeset Number=SeqID_22036
gagcaaattagcacaccccggcaaagatgcagatcattgtgtaaaagccttacgggaaaagcgaatcaccgtcgagatggagtcctgcgacaccatcgacaatgtcaagggcaagatccaggacaaggaaggcatcagtccggaccagcagaggatggttttcgccgggaagcagcacgaagacggccccacgctcgccgactacaacatccagtg

SEQ ID NO: 7634 - DNA, 677 bp, Zea mays
  Peptide Sequence Number=SeqID_12954
  Probeset Number=SeqID_22037
ctgcagcggaagctgccgctcgttggccgccggtgttggtgacgaaggatgagcaccgcgtgcaggcatgctctgggggtcccacgtctgttgcaagagtcaaccctctgggcaggggcaaatcctcctcgggacatcctgctgccgctggcccggcttgctcagttaatgcggtttggctttacaatagctccctaccacccctgctggactcacctcgggtcccgtcgcatcaccttgctgctgggacgtcacctagcatctctacccctgctgccttgagctccgagtccgagctccttaacaaaccctctttccgtgacgtgctccttcatggtgtggtggaaccccacccatctccctcggacccccgtggcccccacatcaaaatccacccaaactcctgcttccgctgttttgctacggaccaccaaattgctgcttgtcgcgaccctatccgttgtcgctcttgcggccgccaaggacaccggagccgacagtgctcagcacctccgctgcctgtgtcgaagtctcactcgccgccgccctccctgtctgcactacctgccctctcacccgctcttgtcgccgatgcgcctaccgccattccttccgtctccctgcgccatcgtgcctcgccccactcctttgcttgctcccgcctatcgttgcccctg

SEQ ID NO: 7635 - DNA, 345 bp, Zea mays
  misc_feature (24)..(24): n is a, c, g, or t
  misc_feature (26)..(26): n is a, c, g, or t
  misc_feature (107)..(107): n is a, c, g, or t
  misc_feature (115)..(115): n is a, c, g, or t
  Peptide Sequence Number=SeqID_12955
  Probeset Number=SeqID_22038
ggcgtgtgattgattgtttcgatngncatgcagtgctctgcgtactgctagcgtcgtgagtcgtgtgagtctagtattcacagcagacatggtagtctatctaccgntacatagnactcggatgctctatctgggctgcttcatgtcgccgctgtttgcgtcgacgttcgtgaacttgcggggtctatgggaggagcgaaagacatgcttgacgagagcgacaaggggttcttctcgaacatgatgcacggcgatgccggcggtcatgggtacctccaccagggatacacttcgcaggtctacccaccgcaaccaggagcatacccgtctccaccatgtgcgtat

SEQ ID NO: 7636 - DNA, 687 bp, Zea mays
  Peptide Sequence Number=SeqID_12956
  Probeset Number=SeqID_22039
atggatgctctacattttgaatatcctgattatgagcggttgaacaagggcgccgaagggcagaaaaggaaaagagttgtcagtgttgtgggcagacaggccgctagaatggtaaaagaagatgaagaaaaattgaagaagaggaaattgagccctgagccgacgacggttgctccgaagaagagaaaagctacagctccgaagcagaaggcgactgatatagaagaagaaactcctgcatcaccttctgctaccgatgtggcagaaattctaaagacaccgccgccggcatcagcgccaaaaataccaattactgaaaccgctggcgccgctgaaggcgccggcggtaccgaagctgcagccaccggagccgaaggtgccagagctgagaccgccgaagattctgatctagaaaccacacttggtgatattgataacatacttctaaaaatggctgaggaagaagctgctggggccgcgatggacacaacaattgagaaaggaaaagagcaaattaaagatactttggaagaagaaaacttcaattttcaagatatactagggcaagagttatcagaaactgaaaaagaagaactgaagaaatatgctgtatcctgtgggtacaaaccaggggctttgctgtttggtggagtcaatgaagggaagttgaggtgccttcggaattga

SEQ ID NO: 7637 - DNA, 269 bp, Zea mays
  Peptide Sequence Number=SeqID_12957
  Probeset Number=SeqID_22040
atgaacaagtacgctctggctttagcgctcgtcaaagtccctaagccccttgcaatcgatcgcacgcaccccgtccccgtactctcaataatcacactacgaaggaaagtactagctagtgggctgatgagcacactcgtcgcgcacgcactgactgcacgccccaaccacggcggcgcggcctgcccccatcagagctcggccgtgaagatcagcaaagtgaggtacacggacatccaggggacgtcggcgtcgcaggtggcggtcaa

SEQ ID NO: 7638 - DNA, 336 bp, Zea mays
  Peptide Sequence Number=SeqID_12958
  Probeset Number=SeqID_22041
ggtctgatctcgctcccgaaagcaggctggtggaatgggtggagcggaaatgggagcgggaggaggaacaatggaagcgggagtggtggaggtggtgggtatggcagaagtggtggatggctctggagcgactggagtcgctttgcctgctctgctgctgctgccgctgcaagagctgctcgggctgctctatccaaacgccgcttcttgcggccttcctgctgctctaagtacacggtcttgcccttgacttggctgaaggggcgaggagggtcctcatcgtctcctccccctggcactgacacattcttcgtgcgcaccatcatgacctgaggg

SEQ ID NO: 7639 - DNA, 250 bp, Zea mays
  Probeset Number=SeqID_22042
ctgcaggtcggcgccatgctcgcccctggcctgggccttgccggcgcagtgctggctcatcgctctgggcaccggtgtgggtgtgctgttgctgggggctgccggtgtcattggcagcgataccggcctgtcggccatgggcacgctcaagctgagcctggggggccacggcgcgcgcttgccggcgctgctcaacctgctgcaactggtgggctggggcgcgttcgagatcatcgtgatgcgcgatgcc

SEQ ID NO: 7640 - DNA, 296 bp, Zea mays
  misc_feature (29)..(29): n is a, c, g, or t
  misc_feature (63)..(63): n is a, c, g, or t
  Peptide Sequence Number=SeqID_12959
  Probeset Number=SeqID_22043
tggcttatgctgccttgcatctcctctcncgtacagccgcagcgtgctcctcgacctcgctanaagccaaccgccctgtctcccagtctccctcactcaccacgcacgcacaaagcagagcaggcaacggcacagctcagcacagagagagaagcgcggagctaagaagctgagcaacaacagcagcccggagaagagaagaggacgccaggaggcagcagccaggaggaagagcagagcaagatgctgcgcgggggctcgagcgtgctggggatcatcaacttcatcaccttcct

SEQ ID NO: 7641 - DNA, 330 bp, Zea mays
  Probeset Number=SeqID_22044
ctatgacgtctcgtccgtgctgacaccgggcgccgacggccccggtcttggcggcaagcgctggcaggtagcggcgccgaacgaggcggaccgaagtaccccgaccccggccatctccagcgcgttcgagagcttgaggagccgcctgagcttgccgagccccgtcacgtaatcctcgccgtcgcggaagatgctcaacaccggcgcacgcagcgggacggacggccacgcccgccgctgcagggccgccatggacaacacggcccgcctgacgggccggtcatgatagccgccacagtacgaggatacctgcgtccgcacacgtactat

SEQ ID NO: 7642 - DNA, 348 bp, Zea mays
  misc_feature (3)..(3): n is a, c, g, or t
  misc_feature (79)..(79): n is a, c, g, or t
  misc_feature (304)..(304): n is a, c, g, or t
  Peptide Sequence Number=SeqID_12960
  Probeset Number=SeqID_22045
atngctactacggcagaactcgccgacgaacggacgcgtgcaccagcgcagcttcaagatcttctgcaaggccgacgangggtactgcctcatcgtccgctgaggcaagtgtggtgtggctcgcgcgcagtcgcgcgatgagcatcagtactggtacaaggtcatgcgtctcagcacccaggtaaaggacgaggacgggcacgctgcgttcgccctcgtcaacaaggccactgggctcgccatcaagcactccctcggccagtcacacccggtgaagctgcgtgcgttcaactcggagtaccangacgagtcggtgctgtggacggagagcggcgacgtggggcaagg

SEQ ID NO: 7643 - DNA, 213 bp, Zea mays
  Peptide Sequence Number=SeqID_12961
  Probeset Number=SeqID_22046
ttcggcaccaggcttatactactgtcagtttaatttggctaggaaatgcatggtgctggtgtgacagtgtgtgtgctatgcatgtgtgtgcacggtgcacctttactcctactgcgcgttggagagagagaggagagagagagagagagagagagataagaaaacgcacataaaaaaaaacagctctaattccccaaaaaaaaaaaaaaaaaa

SEQ ID NO: 7644 - DNA, 500 bp, Zea mays
  Probeset Number=SeqID_22047
catttggccatgagctaacttcctcagtagcactacataagcatcaaccaagaactcagcggaactaagacatagccacacttcctgatcgtccccacggccgaaatgaacatgatgtcttggagcatctttagaaggggggtcacgacagccatccctattgccacggctgctgcggccggtgcgccgatcaaatccctcacaaatacatcgtctcccatccctgcttcttgttgcctgcctcgtcagttccgtgtgcgccatcagcccccgacgcaagctcctggacaaaggggtggtcgtgggccgggaagcgagagcctgagtgaagggcacaggtcgcgagcgcggagactgtcttgacgagacaggaagcgagtcgtggggcggggaggccacgaggggcgcgatgaggagcggtagggtgacatctgacgggaggtcggggcgggaggcggtgagatgggcgagggaggccgcaacgtgcgtggcaactgcag

SEQ ID NO: 7645 - DNA, 246 bp, Zea mays
  Peptide Sequence Number=SeqID_12962
  Probeset Number=SeqID_22048
ctgaaggagatggacgacatcacagccaagacagtcctgctggtgctgcggaacctcgagaacaacctgtcggcgccccagttcgagcctgtgctcattctgcttgctctgctctgctctgctcttctctcgacagagaaggctgctgtcgacctaacacgcacggatggacggacgttttttccccaagttgttttgttcgacgaacgaagcaaggaggaggctgaaacgcagcagaatagatgg

SEQ ID NO: 7646 - DNA, 489 bp, Zea mays
  Probeset Number=SeqID_22049
tgctcgagcgactcggctgagcgggctcgagggcgactctggaccgtcgaccaccacaggacaccttatactacaagcttggaacgaatgcacggcacgtgatcgagaggttcgagaaggaggctgctgatatgaacaagcggtccttcaagtacgcgtgggtgctcgacaagctcaaggctgagcgtgagagaggtatcaccattgatatcgctctgtggaagtttgagaccaccaagtactactgcacggtcattgatgcccctggacaccgggacttcatcaagaacatgatcactggtacctgccaagctgactgtgctgtgcttatcattgacttcaccactggtggttttgacagctgtatctccaacggtggccataccccctaacattctcttctttggttaacccttgggatgaagctattcatttgctgctggaacaagatgtattcaccctcttgcaatttcttcatggttcgttttt

SEQ ID NO: 7647 - DNA, 287 bp, Zea mays
  Peptide Sequence Number=SeqID_12963
  Probeset Number=SeqID_22050
tgcagcatgagtatgctggaagtgattctgtgctactggatggggctgagaagccatacgacgtgtttttggagtatggtggttatggccataatgacgtgcttataagaaagcctaaggcgagggtgcgtaagtgtattgcctccgtccagacttcctcgccttgcttctttctgcccgccgcagacgtcgagctctggtttcaggcgaagctggtgggcggctcggcgctggacgccattatattggtgtgccactccttgacgagacgctcgactaggccaaag

SEQ ID NO: 7648 - DNA, 502 bp, Zea mays
  Peptide Sequence Number=SeqID_12964
  Probeset Number=SeqID_22051
ctagccagggtttgcaaggcccttagaccagcgcggaggatgtgggtggaggagccgtcgaagaggcaaccatgtcggcccacgtgggagcagtgagggtgaagcccagcgggggtcgacgagggcgctgctgcgcgggtgagagggttccggggagaggtccgaggccggcgataaagggggggtcatctcctgcaagtgtgctgtgcccaggggtgttgtgttcgcaccgggggtgagccagagggcgccggaggtggggaaaccgagcagcgcagcctgagaggtagcgctggcgacctggcggtctgcctgcgtgggggctagccagagggccgctaggctcgcgttgggggtggtggcggcggcaagctggccagagagggagagctcgaccatggaagggccggggcaggaggagcgccggggctggggacgaaccgacggctggggggcgccgctgctgggggctggggaagatccgacgactgggagctggcgg

SEQ ID NO: 7649 - DNA, 269 bp, Zea mays
  Probeset Number=SeqID_22052
cgcacgcgtccgtccaaggagagcttcgtgttccggagctcgtgctgcgaggctgctgtaccggctaagttctccgatgacgactactactgtcgctgcctgctgacgatggacgtcttcactgagactatgccgctgggcagctcttttcacactgccgctcaagatcgcgtccccttcgcttcagaacacgcctgctatccgtgcgtctggccctcttgtgcctgactcctgcgtggtgtttctggacggacatctcttagcttgcg

SEQ ID NO: 7650 - DNA, 273 bp, Zea mays
  Peptide Sequence Number=SeqID_12965
  Probeset Number=SeqID_22053
cctcgagccgattcggctcgagggcacttccccgtgacaccgtttcctccagtttcctaccttacctctcgtcccagcagccgcgagccaaaaccctagcaagcaaaccaccggagcatcggcgctcgcgcgggcggagcataggcggacgacgattacaacgacatcgacatgggctatgacgatgagcctccagaacctgagcttgaggaacgggccgaagacgagcttgagcacaacgatgatgcccctgatgatgtcataggtcgacag

SEQ ID NO: 7651 - DNA, 205 bp, Zea mays
  Probeset Number=SeqID_22054
ccagcagcagcagatcatcggcgccgagtccgatagccacttcgcccgccgcttcaggttaacggaccagagggctgtgtcccccactgtcatcggcaacgatcgagcgtcaggatcccaatcgcttcccggcctccaaccgtctaaggcacgcacgctgcatgtcaagtccatcctcgaagacgcctacgacgtccggcacaag

SEQ ID NO: 7652 - DNA, 488 bp, Zea mays
  Peptide Sequence Number=SeqID_12966
  Probeset Number=SeqID_22055
ggctggccggctggggtgtgagcgatcaatcatgcgctcccccctcccaccgcgcacatgcgttcgccggggagccggggctactcggccgtcgcggcaggcaggcaggcagctttttggtggcgaccaccacgtcgcgctcgctcgaccagtacgtgcccactcttgccctgctgcaccgaccactgcggctttgggaagaaaaaggaaggggggatcactttggggccggatcggagaccacacaagttcattgtgtaggcaaggtccacgtgggccatcgagtactacgtacgtacgtgcgtgcaagcagtgatgccattgccgcgcgggtagcgcgcggtgcacggcgaataactgggagacgacgggcgcgtgcatcatgcgaggcgctggcctttgattcggtcgttcattggtggggtgggaatcttgcaatggaagcatgcaattgcgcaagcaacctggggatctcatgtcctagctag

SEQ ID NO: 7653 - DNA, 488 bp, Zea mays
  misc_feature (106)..(106): n is a, c, g, or t
  misc_feature (369)..(369): n is a, c, g, or t
  misc_feature (371)..(371): n is a, c, g, or t
  misc_feature (383)..(383): n is a, c, g, or t
  misc_feature (420)..(420): n is a, c, g, or t
  Probeset Number=SeqID_22056
gccgggtccgaacgagactcgttcgctcgctacgtttccctccgcttgccgagtgccgcgcgggagcacgcgcccatggcgacgccgccttcggccgcgacagcgncggcgattccccagactggggcgcagtccaagggctacaactttgcatccacatgggaacacagcgcgcccgcttacgtgcgaccgcgagggcgagaacgaccgtgtcgagatcatcgcgaacgaccagggaaaccgcactacaccctcgcacgtccacttcattgagtccgagcgcaccatcggagatgtttttaagaaccaggacgacacgaaaccgaggaaatttttgggtggctctcccccccccccccccgggaggangnaagagagagggngagtgggccaggagcgagcaaaaaaaaaaaaaaactncaaggccatccccgggcccggcgaagaagccaacgacagacgaccagcacaagggggcaggagaaaca

SEQ ID NO: 7654 - DNA, 287 bp, Zea mays
  misc_feature (144)..(144): n is a, c, g, or t
  Peptide Sequence Number=SeqID_12967
  Probeset Number=SeqID_22057
caacttagcgacacaaggtcgcagatccaaggctaggtgcttggaatgatcagggcaggcgtccaagctccatttggaccatgcggtcgagcagaacggacggagatcggcaagggccgatggagggaagaagccttgagaagngccatggtcggcttaatggctcttgacatcgtgcagactctcatcgtggacatcgagccatacgagcatgtgaaccgcgcaatgtacgagatcgacgcagcttcgatggtcaaggcggctgcaaacgaaaaggcggaggcgga

SEQ ID NO: 7655 - DNA, 521 bp, Zea mays
  misc_feature (190)..(191): n is a, c, g, or t
  misc_feature (195)..(195): n is a, c, g, or t
  misc_feature (197)..(198): n is a, c, g, or t
  misc_feature (205)..(206): n is a, c, g, or t
  misc_feature (217)..(217): n is a, c, g, or t
  misc_feature (341)..(341): n is a, c, g, or t
  misc_feature (356)..(356): n is a, c, g, or t
  misc_feature (362)..(362): n is a, c, g, or t
  misc_feature (366)..(366): n is a, c, g, or t
  misc_feature (373)..(373): n is a, c, g, or t
  misc_feature (377)..(377): n is a, c, g, or t
  misc_feature (387)..(387): n is a, c, g, or t
  misc_feature (405)..(405): n is a, c, g, or t
  misc_feature (414)..(414): n is a, c, g, or t
  misc_feature (416)..(416): n is a, c, g, or t
  Peptide Sequence Number=SeqID_12968
  Probeset Number=SeqID_22058
ggcgacgagccaaaccctcggtctgagtcccttctcaccctgcttcaccggagtcacctgctgtccaaggctccaagcacccgccaatcggccgctgccgaacccgcaaccggaacctgcctccaggctgcttccacaccggtcgagggcgatgggcgaagggccgaaaggggccgaaggccaaccacgnntcgncnnaaacccnngcagtaaccgnctacacgccggggcacgccgcacggcacacaacaaacaacgtgccctcgccctgcagtctaccctggttctattgtgccccgacagaagatcctgagagctagagctgtttttttccctacatnatagttaaaggttanaaaatntaanattcctnggcnaaccaaggcnccggataaggaatgggtnctccgggcngngaattccaaattggtctcaattggttaaccccccttgcgccaaagcgccggggggggggagatacacccaaagggttacccccaaagaggggttgtttttgggaa

SEQ ID NO: 7656 - DNA, 492 bp, Zea mays
  Probeset Number=SeqID_22059
aaaccgaaccagaataccggattacttaaaacgcgtgccacgataatattgttcaccaacaaaagggtctaacgcggatacaccgcgacgacgacgataaatcgagcagcgactgggccagccagccactgcagcagacacacgagactgacacaaaccgcttagtccacctcctcgatcttggggccagggccaccggttccaggcggagcgtcctcgtccatgccgccggagcctcccatgtcgggacccgcgccctggaacatcttggcgatgatggggttgcaaagggtctccaactccttcatcttgtgattgaactcgaccgccttggggagctggttggggtccagccagctgatggccgcgtggatggcgacctcaatcttttttttggcgggggcagccagcttggacgcaaacttatcgaccttgatcgggttgcgcatgttggaggcgtagttatccagcgagttcttggactccaccttc

SEQ ID NO: 7657 - DNA, 430 bp, Zea mays
  Peptide Sequence Number=SeqID_12969
  Probeset Number=SeqID_22060
tgcatgcctgcaggtagtagtcaggaacgacaagtacttgttcgctgtcacacccccgactactgtggactgcctggagtcgcaagcgaacgccggcctgcctagaaccgcttctgtcccctcgttatccaggagctgctgcacaccgcgcttctgctggcagccgctgcggaagccggacgtttggagcggctacacggattctggcgcccagaagcctggaggcggctgtgcgtacctgtattccgatccaggcatgcaagcagagcaaagtgaagcaaagccggcggatcaggtggaggagtggaaaggggtttctgaggtgagagaaagcgatgcaagcatgcggcgcgcgcctaccggatcacttgtgaaatatgttggtgatgacgcggatgtgctggctgccgactcggactgccaacgtgcg

SEQ ID NO: 7658 - DNA, 276 bp, Zea mays
  Peptide Sequence Number=SeqID_12970
  Probeset Number=SeqID_22061
agactcagctgcagacacaacccaccgccactatgtctgacgaggaaactgaacaagttgaggaacagtacgtagaggaagaggaggcccaggaggaagaagtccaggaggaagctcccggaaccagaggaagtccaagaagaggagaaaccaagacccagacttactgctcctaagatcccggaaggagagaaagtagacttcgatgatatccagaagaagcgtcagaacaaggacctcatggagctccaggccctcattgacagtcatttgaag

SEQ ID NO: 7659 - DNA, 378 bp, Zea mays
  Peptide Sequence Number=SeqID_12971
  Probeset Number=SeqID_22062
tgcagcgtcgcctgcacgaggagcaggagcgccgatgccaggagtaggagcaggagcaggagaagcaggactcttccccctcgcctcagcaggaggtggagtctaagaggccgccttccccgacacctcaacaagagatgccccctgcaccaccacagggcatcctggctgctggaggagaccctgacggagatggagacgacgccggtgatgacaccggtggcagctcgagccacgacacggaactttcggaggagccggagccagagggatggatcgcaagacccatcactcgtgacgccgctcgcaggtgtcacttccacgacgctctcgataccctgctacgtcgggccttcggccaacacacttggtccatag

SEQ ID NO: 7660 - DNA, 272 bp, Zea mays
  Probeset Number=SeqID_22063
gttgtacgcggtggtcgctggcatcagattgtcttggccgtgagtgtatgctgagaattaatgtgagcgctggtactgtgcgctggatccatgctgcttttgtacacggttgtgctctggagtttatcctggataaaaaatggcagctactgcttctgctagaaactaatctgctcttaagtggacttgagttgcacgatcaacatgaagatatgagatcggatatcgacaatatgtcttatgagggactgcttgctttgaaagagcatatt

SEQ ID NO: 7661 - DNA, 373 bp, Zea mays
  Peptide Sequence Number=SeqID_12972
  Probeset Number=SeqID_22064
ctctcgagtcgacctgcagagcctgtgcctgcaattccgtccgaggtcggacggaccacgtgcttgcattgcgttggggcaaggcaacggcagtcatcatctgccatgccgccaccaaccaccacgtcgccacccccctaagggcttcaacgacgcgccaccaccagtacggcgatatggacaaggacaaggacggactggccttactttactacactacatcaaccgagctcccgaggaaggagccggggctcaactcaaacaaggagcaaatggcagctaccaagagctatcaccacgccggccaggtagccagcgagctccgacactccggcccaccaccgtaccgccagacgacgatcactggctgctg

SEQ ID NO: 7662 - DNA, 309 bp, Zea mays
  Probeset Number=SeqID_22065
tcctgctcctgcaaatggtagtcctggtggcgtgggatatctgagcccatctctctcaaatggcaatgctctaaaacctggcaggcttcctttgcttcgcctgcctgtgataaagttttttggcactgctgctgctctcagcaggaaaataaaacttgaagtgctaccaaagaaaattaaatcccatgctgaagaggctgcccaaaaggatcgggaagaaaaacttgcagagacacggaaaaaccggctacacatcactgtgcaaggaaataaggcagaattcatccagcatgctgaagcgaagcagag

SEQ ID NO: 7663 - DNA, 267 bp, Zea mays
  Peptide Sequence Number=SeqID_12973
  Probeset Number=SeqID_22066
tcagccgagcggcgcgcgtggcaccaccgcgtgacaggacgtagcaaccgtcgacgattcaagcttgcgtgctacgccgcacccaacccctcggctacgacgagacaatcggccgtagtgcgcgtgacgtcggcgcgagggagcgcgcgtgcagcaccgacgccctctccctcccgcgtccgcccctcgctcgggatcgctgtgcgccgcgcagctctaggcccggcgctggagtctggagatgggagaaatcacaaggggcggtga

SEQ ID NO: 7664 - DNA, 296 bp, Zea mays
  Probeset Number=SeqID_22067
atgtggcggtcgctggtggggtgtatggaggaaggattccgacctctaatagtgcgttggtgtggccttaagaggggcgaggtcgggaacgtgggacttaccaacgatttcgcggtgccgggccccgtccatggtgtgatgcagtcgacggtgaaccggcggagagagtccgggcacgcgcgggtcaaaaccgaggtccccggcggcagctgcggaagagttgttgacccagcgtcgcaagcggaatccgttgcaagggagaagaccgagctgaccaccatggcccacagcacagc

SEQ ID NO: 7665 - DNA, 540 bp, Zea mays
  Peptide Sequence Number=SeqID_12974
  Probeset Number=SeqID_22068
cttccgcgcctccctccgcctccttggcatccacggccgcgcgcgcggttctccgccgtccgtttcgtggctccggagatccggcctcatccgccccgccccgcccgcctcccggcctcgtcgtctcctcgtccccccactcccgtctcgtccgctttctttaatcaatcctccgcgccccacaaccccaagcaactcccactaatcgtcccctttccttccctttcccggcgggggcaacaatggtcggtgacggcgatcggtttgctgcatcggcggttcctgcggcgccgtgcaggtttctcggtcacctgtgagctcgatttgaccgcccccacctggcgtcgtgctggttccgttctgggtattcttggcgctggtctgggctctggggcgatcgggacacacctccgctctgcttatcgagggtcgaggcacccgacgatcttctccggaaaaggtaggcgctgtccgtttctgcttgctccctttggttttcaaaagataacacgcttaaagctcgttgctttctcgctttaa

SEQ ID NO: 7666 - DNA, 279 bp, Zea mays
  Probeset Number=SeqID_22069
ctgaacaggaatagtccgatctccagctacactctctaggtactttatgtccttccactttttccttgcaggccaatgatcaatgcatccatggtagaagttgaagtactggatcaatgcacttgccggttggatgggtcttgtatccaagattttgcccctgctgttgtggctaatgttgggaaacgagctatttcttctagaacggtggcccatgctcttcaaaattggcagtggatcagtgacattgagacccctcttagtttgcttgggctgcag

SEQ ID NO: 7667 - DNA, 375 bp, Zea mays
  Peptide Sequence Number=SeqID_12975
  Probeset Number=SeqID_22070
cagtcgcctctggccgcagcagcacaaacgcgtagctcccgccccaccccactgcctctcgccatcggtctcgctgtcggcgcctgcttctaccaggtgtgcgcccttctcgaactcccaccaaccccctgtcctgctcgtcccaccaccatcctgcaaatgccgccgtcgtacaacccctccacagtctccgcaccacaacccgcgccacccggaacgccccccttcagccgtcgtgggagatagaggaggtcgcgtcgtaaccaaccccgcgccacccggcccaatccgcaacaaccgcgcccactccgcacaaaatcgtggatatcgaccagcgtagacgataagaaagccgccgccaccacctcccagcat

SEQ ID NO: 7668 - DNA, 278 bp, Zea mays
  Probeset Number=SeqID_22071
gtgatatgtagatttgcatgcacgatggctgaacctgtacatataagggtcgatcgctttgcgtgattccaatactctttcgtgtacaggctacagaaacgagctatagagtgctagaactccttgtttacggattaaaacatggtagaaattcttttcacgaatgtaaaacatgttcggattgtgacatggcataactttcaggttatgcactgctcacgggaggctaggagatgtcactgtatgcctagatggctcatccaaatgtttcaatccat

SEQ ID NO: 7669 - DNA, 467 bp, Zea mays
  Peptide Sequence Number=SeqID_12976
  Probeset Number=SeqID_22072
cgctccgaggccggcagggctacggaaaaaaaaaaagcgcacacacatacacatgcacaagcgcactctagcaatggcttctgaggttgtccgccctagcgacgccgagctactaaaggcacaagccgacatatggcggctcagcctctcctacctcacgcccctgtcactgaggtgcgccgtggagcttggcatccccacggcgatctaccgccatggcggggctgcctcagccgctgagctggtcacggtgctgactctcccctccactaagctgacgttcctccgacgtctgctgcgaatcctcgccgcgacgggcgtgttcaccgtccacaagtacagtacgtaggaggagcgataccgtataacccctgcagtatacctcctgctggacggcatccctcccagaggcaccccatgaaccaaaccgcctctggtgctcaccctgcaccctccgacgcgcctac

SEQ ID NO: 7670 - DNA, 272 bp, Zea mays
  Peptide Sequence Number=SeqID_12977
  Probeset Number=SeqID_22073
gacgagatccagctctcccatcacactatcacatggagtccaccaccctcctcgcagacttgcagatcgtggctgcgtcctctcgccggctcggtcttgctcacctcgctacctgcaggcgatgttgatcgtgaagcaggcgctaggtaacacgtcaacgctgtcgacgtggacaccagcgtcgcccgacagctgctcgtgggaccacatccggtgtaacgacgacggacgcgtgaacaacgtgttcatcgacggctcggacgacgtgctcg

SEQ ID NO: 7671 - DNA, 1474 bp, Zea mays
  Peptide Sequence Number=SeqID_12978
  Probeset Number=SeqID_22074
gatcctctatattcgacctgcaggagtggaatgtgtgggagactcagataatggtactcctgagcttcatgctacagctgtttttgttgtccactggaagcctccgtcgtcgccacatcagtggactgctgagggctttgatatggttgagttatatgggagcagacgtagtcgctgtttatgccctaggcctcttcagccagtacgaggacaaatacaggctaggagggagggaggcatttgcgaacacactgccgtttctttgggtgccctttctccttgtgcacctgggcggccaagactcgatcagtgccttctctctcgaggacaacaacctgtggctaaggcacttgctaaatctcggaacccaaggagttctagctctgtatgtcttatggaaatcatttgacaggatcagtgtcagtatattggttcctgcgatgctggtgttcgtttctgggattatcaagtacggggagagggtgtgggctctgaagaatgcgagccgagacagccttatcggcaggtcatcacctaatttcatgtcactagtaagggaacttgggagcaatgatgttactggtagcaaggaatggtatgctcgtctgacagtgcttcttgctcgaggattatttgttgggcgaactgtgctccaggtgggagccgtgggtccagcaatactagataatggtttcaagaaatgtcagggtatagaagagaagttgaagatggtagcgatggagcttaacatgatgttcaatctcctctacaccaaggcaatcgtgcttcaaagaagtagtggtgtcctattccggtgtgcttcccaggccttgatggtcgttgccctggttctcttcatgatacgacgtgaggaaggcgcccacaataacaaggttaatgtcgcgattacctacacattattcagtggcgccatttttgtggagacctgctgtgttgctgcggcgattgcgtcgcattggacaagggcacacttggagaatgagagcagctatcttcatggcctctacaactttgctacgtccttctttggggctattcatcaatgcaacaagaggcacaagatgactctgctgctgagcaccactgctaccttggggcagtttaacttaatggattactgcttcgctatgaactcccaacctagagttttctcatatgccctcagttttattggtctaggtaagcaatggaggaactcatggtacgtccaccacatcgatgatgcaggtggcaacgatatgtactggtggattatcaaccgtgttttggaatatttggccacatcatcggacgatgaccttacacatactctaccccctcatcatccagcagcgttcggacagctacatgttaggagattgaactctatatttagtctacccttcgaggatgccctctaccgcctacacttgtacactgacctacatctaagcaggcacttcaacaactgcag

SEQ ID NO: 7672 - DNA, 704 bp, Zea mays
  misc_feature (687)..(689): n is a, c, g, or t
  Peptide Sequence Number=SeqID_12979
  Probeset Number=SeqID_22075
gtagatatatatatatttgtttatgacctgcaggacctgttcgtaaaaactttcctttgttcatttggtcttcttttttttatttatgatttataaatacaatataaaaaagagaaatcatttttaacacaataaacccattcttattacgtttccacaccaaagtgagatatacgacttcatttttttatacattaaatgcccattggtgttccaaaagtgccctttcgaagtcctggagaggaagatgcatcttgggttgacatatacaatcgactttatcgagaaagactactttttttaggccaagaggttaatagtgaaatatcgaatcaacttattggccttatggtatatctcagtatagaggatgataacaaagatttgtatctgtttataaattctccgggcggatgggtaatacccggaatagctatttatgatactatgcaatttgtacaaccagatgtacagacaatatgcatgggattagccgcttcaatgggatcttttattttggcaggaggggaaattaccaaacgtctagcattccctcacgctagggtaatgatccatcaacccgctagttctttttatgaggcacaaacgggagaatttatcctggaagcggaggaactactgaaactgcgcgaaactatcacaagggtttatgcacaaagaacgggnnnacctttatggcttgt

SEQ ID NO: 7673 - DNA, 701 bp, Zea mays
  Peptide Sequence Number=SeqID_12980
  Probeset Number=SeqID_22076
ggtttgagcatggagctgattgagcaaaagggtgttgacagaaatgttgaaaagcttccacctttggtatttgttcatggaagctaccatgctgcttggtgttgggctcaacattggttgcctttcttttcagcttctggttatgattgctatgctctcagcttgttaggccagggtgaaagtgatgcacctgctgattcagttgctggtacacttcagtagacacatgcaagtgatgttgcagattttatctatcaaaatattagatcaccacctgtcttgctcggacattcatttggaggacttattattcagtattatatttcccatttaggaaatgacaaattcaaagaaaatttatacccgaagcttagaggagctgtccttgtttgttctgtacctccatctggtaatggtgggctagtccggcgatatctcttttccaagccaattgctgccttcaaggtgacatggagcttggctgcaaaaggttttcaaagctctctttctctctgtaaggagacatttttctcagccacaatggaggatcatgttattaaaagatatcaagatctaatgaaagaaagctcaaggatgccattgtttgatttaagaaagctgaatgcaccacttccagtaccttcagtgccaaactgccctcttgaagttcttgttttgggtgcaagcaatgacttcattgt

SEQ ID NO: 7674 - DNA, 710 bp, Zea mays
  Peptide Sequence Number=SeqID_12981
  Probeset Number=SeqID_22077
gggataagttccgcaaagctcctgagaattctcctaaaaaagatacagctcagaaacaagttctggaagcaatgtctcacagaatgcatatagacaacaatgtgaaacttattggaaagctcttatttggcattgtaaagggtccagaagtgctcaacactgtcagacctgccgggttaccgcttgttgatgattgggactgcttgaaaaccatggtaaggacttttgagacacattgtggatccttgtctcagtatgggatgaaacatatgaggtcctttgcaaacatctgcaatgtaggaatacatcatgagcaaatggctgaggcctctgcacaagcttgtgtcagtattcctaccaatccctggagttctctgcaagggggtttcagtgcataattcctaaaatgcacaataataaagaccaaagtacaattattgttacattatgttttatagatatacatgttgtatattggacataatttcttgtcctgcctctgtaaatataattgggaaactacttgggtggggggtgtcctctttagtctttgaattatagtttctcaatcagatgctgcacctacatttgtaatccatttatggggttgtatcattgaaaaaatgcaatttcaagagatgaggcattcacaacataagaagcgataaaggaccaatagctttggaatgtccaatatgacaaggcacaag

SEQ ID NO: 7675 - DNA, 663 bp, Zea mays
  misc_feature (517)..(521): n is a, c, g, or t
  misc_feature (564)..(566): n is a, c, g, or t
  misc_feature (592)..(594): n is a, c, g, or t
  misc_feature (609)..(610): n is a, c, g, or t
  misc_feature (623)..(624): n is a, c, g, or t
  misc_feature (636)..(638): n is a, c, g, or t
  misc_feature (648)..(649): n is a, c, g, or t
  misc_feature (655)..(656): n is a, c, g, or t
  misc_feature (658)..(659): n is a, c, g, or t
  Peptide Sequence Number=SeqID_12982
  Probeset Number=SeqID_22078
gagaacactgcagcctcatcatttcaaggccaaacaaaaagagaaagcgaaaaaagataaagagagagagagagaagagagagagaagagagaagaattgaaggaggaagaagaagaagaggagttggaacacgatgagtgaacagcaaactcaaccgaacaaccagttggtggtgcagaattctgggagcctcagcttcagtagtcacttgtctaaggaagatgaagagatgtcaaggtctgctctttcaaactttagggccaaggaggaagagattgaaaggaagaagatggaggtgagagagaaggttcagcttcagttgggtcgtgtagaagaagaaaccaagcgtcttgctaccattcgtgaggagcttgaagccttggcagatccgatgaggaaagaagtggcacttgtccgaaaaaagattgattccgtaaacaaagaattaaagccactaggtcatacctgccagaagaaggagaaagagtgcaaagaagcccttgaagcttttaatgnnnnnaacagggaaaaagtacagctaatcaccaggttaatggagctgnnnagtgaaagtgaaaattgaggatgaannngctggaggagctganntaaaatatagatnncatgcattgatnnncccgacagcnnattacnntnngatt

SEQ ID NO: 7676 - DNA, 708 bp, Zea mays
  misc_feature (655)..(656): n is a, c, g, or t
  misc_feature (702)..(703): n is a, c, g, or t
  Peptide Sequence Number=SeqID_12983
  Probeset Number=SeqID_22079
gatcattgattggtttatggttcgcatgatagcatcggaaagcaaccggagtacctaacaatgacgttttcttctgcaaccgccaccaaacaccaaatactgatcactcactacgactttaagtgataatttgtgaaaggaaggcagttggcgaagtataaggtgtaatggcctctgagagggaatattttgacctctgtggacccttacatctaacttatgtcgactgggataatgcagatcatcgaaggtctattgctgctagtttggtccaaggtgtttacgttctagaaaaggaccggcaagaacgacgtgaaggtcccaatgctcttgcaccgccttggtgggcattcttccactttcagttgctacgtacactagttgatgatgttgattcttccatctttggtgcaatttatgagttcaagcctccaccatccatgtgcaatgacaccttacatagaagtccccgttatgtaattgcctttcgagggactataaccaaggcagactcagtttcacgtgatattgagttggatttgcactttgtccgaaatggacttcatcaaacttcacgctctgagatagctattcaagctgtccgaaacatggtggctactgtcggtgattcgaatatctggttggctggccactnnctaggatcagcaatggcattgcttactgggaaaaccatggccaagnntggct

SEQ ID NO: 7677 - DNA, 707 bp, Zea mays
  misc_feature (593)..(596): n is a, c, g, or t
  misc_feature (681)..(681): n is a, c, g, or t
  misc_feature (683)..(693): n is a, c, g, or t
  Peptide Sequence Number=SeqID_12984
  Probeset Number=SeqID_22080
gattctaaaccttcacctcttcaatcttactattgtcttcaacattctcagaatgggaagttctggaacaacagagtatggtgcatacacttatgcagaacttgagagagagccttattggccatcagaaaagctcagaatttccatcactggggctggtggttttattgcctcacacattgcccgccgcctcaagaaggaggggcattacattatcgcttctgattggaagaagaatgaacacatgactgaagacatgttctgccatgagttccatcttgtggatctcagggtcatggataactgcctcaaagttaccaagggtgtggatcatgttttcaatcttgctgctgatatgggtgggatgggttttatccagtccaaccactctgtcattatgtacaacaacactatgattagcttcaacatgattgaggctgccaggattaatggtgttaagaggtttttttatgcctctagtgcttgtatctaccctgaatttaaacagttggaaaccaatgtgagtttgaaggagtctgatgcctggcctgctgagccacaagatgcatatgggctggagaagcttgcaacannnnagttatgcaagcattataacaaggattttggaattgagtgccgcattgggagattccataacatatatggcccttatgggacatngnnnnnnnnnnnggagaaggctcctg

SEQ ID NO: 7678 - DNA, 569 bp, Zea mays
  misc_feature (7)..(7): n is a, c, g, or t
  misc_feature (40)..(40): n is a, c, g, or t
  Peptide Sequence Number=SeqID_12985
  Probeset Number=SeqID_22081
cccctgnactttctgggtaccacatcaccttcaaaccaanaacagtgaattaatcacaagtcctggcagacttcatcgtcgactggacggtaccaacaaggcaacaagaagagtccccagagaaagtatgactattcactatgacagcgcgtggtgccatgcaggggcgggcgccacgacaattatcatttcacccacaggcgtcaaatacagatacgcagcccgcctaagcttcgccttggagtccaacagatgcaccaacaacatagcagagtatgaagccgtcatcttgggactccacaaattacgtgcactcggtgtcaccacttgcataatcagaacagactccaaagtagtcaccgaccaggtcgagaaggaatattcagccaaagaccccacgctcatgcaatatctcacagtcgtccacagcctcgagaaacaatttaagggtttcaccctgcaacacgtcgaccgcgccaagaatgaagaggccgacgctttggccaaagcaccggccaagggcgaggccttgccctttgacgtgttctaccacgtcatcggcacaccag

SEQ ID NO: 7679 - DNA, 405 bp, Zea mays
  misc_feature (127)..(128): n is a, c, g, or t
  misc_feature (147)..(148): n is a, c, g, or t
  misc_feature (152)..(153): n is a, c, g, or t
  misc_feature (157)..(157): n is a, c, g, or t
  misc_feature (168)..(169): n is a, c, g, or t
  misc_feature (172)..(173): n is a, c, g, or t
  misc_feature (177)..(178): n is a, c, g, or t
  misc_feature (180)..(180): n is a, c, g, or t
  misc_feature (228)..(228): n is a, c, g, or t
  misc_feature (345)..(345): n is a, c, g, or t
  misc_feature (372)..(372): n is a, c, g, or t
  misc_feature (384)..(384): n is a, c, g, or t
  Peptide Sequence Number=SeqID_12986
  Probeset Number=SeqID_22082
gggtacctcgagccggccgggagcggttcggttgactcttctgtctacgcacctacctcttcacccaactgccgcccctgctccgagaaccagaatggccgccgccgatgcctcttccttgcctccnnccgccctcccctgccgagnngcgnnggcngtgggcaccgnnccnncccnngnccaccgccgcccgcccccccccgccccgccccccgcctcccccccccncccccccccccccccccccccccccccccccccccccccccccccccccctcccccccccccccccccccccccccccccccccccccccccccccgcccccccccccccccccccncccccccccccccccccccccccaccncccccccccctncccccctcccccccccccccc

SEQ ID NO: 7680 - DNA, 697 bp, Zea mays
  misc_feature (4)..(10): n is a, c, g, or t
  misc_feature (23)..(23): n is a, c, g, or t
  misc_feature (470)..(471): n is a, c, g, or t
  misc_feature (478)..(478): n is a, c, g, or t
  misc_feature (487)..(489): n is a, c, g, or t
  misc_feature (492)..(492): n is a, c, g, or t
  misc_feature (497)..(497): n is a, c, g, or t
  misc_feature (500)..(502): n is a, c, g, or t
  misc_feature (504)..(509): n is a, c, g, or t
  misc_feature (511)..(511): n is a, c, g, or t
  misc_feature (513)..(517): n is a, c, g, or t
  misc_feature (520)..(520): n is a, c, g, or t
  misc_feature (522)..(530): n is a, c, g, or t
  misc_feature (532)..(532): n is a, c, g, or t
  misc_feature (534)..(535): n is a, c, g, or t
  misc_feature (537)..(537): n is a, c, g, or t
  misc_feature (539)..(546): n is a, c, g, or t
  misc_feature (548)..(557): n is a, c, g, or t
  misc_feature (559)..(562): n is a, c, g, or t
  misc_feature (564)..(697): n is a, c, g, or t
  Probeset Number=SeqID_22083
agtnnnnnnncaaactggactcnccgcggtggcggccgctctagaactagtggatcccccgggctgcaggtcgtgacctcgggcctcgcccgcggcatcgacgcccgggcgcaccgggccgcgctcgcgacgggaacggttgccgtgctcgcgggcgggcatgacaggatctatccggagaatcacgcgccgctgctgcaggagattctggagaacggaggcgccgtggtggcggagatgccgctgggctgggtgccccgcgggcgcgacttcccccggcgcaaccggatcatctccgggctgtcctacggcaccgtcgtggtggaggcggcgcgccgctcaggctccctcatcaccgcgcgcttcgccctggagcagggccgagaggtcttcgccgtgccgggttccccgctcgatccgcgcgccgagggcaccaacgatctgatccgcagggggcgacgctggtcggnnaggtcgnccatatctnnnggngatcngcnnntnnnnnncntnnnnntcntnnnnnnnnncnanntntnnnnnnnnannnnnnnnnntnnnngnnnnnnnnnnnnnnnnnnnnnnnnnnnnnnnnnnnnnnnnnnnnnnnnnnnnnnnnnnnnnnnnnnnnnnnnnnnnnnnnnnnnnnnnnnnnnnnnnnnnnnnnnnnnnnnnnnnnnnnnnnnnnnnnnnnnnn

SEQ ID NO: 7681 - DNA, 507 bp, Zea mays
  Peptide Sequence Number=SeqID_12987
  Probeset Number=SeqID_22084
atgcgggatgctgatgatgaccggttgcaggcgcatgcctactctatatggcgcactctgaagcacctacgctacgtgctccgcctccacttcccggcgtccaacaatgtggctgagtacgaggctctagtcaatggtttgcgcatcgccatcgagctaggggtccgacgcctcgacgctcgcggcgactcgcagctcgtcatcgaccgagtcatgaagaactcccactgccgcgacccgaagatggaagcctactgcgatgaggttcggcgcctggaagacaagttctacgggctcgagctcaaccacatcgcccgacgctacaataagactgcggatgagctggctaaaatagcctcggggcaaacaacggttccctcggacgtcttctcccgagacctgcatcaaccctccgtcaagaccgacgacacgcccgagcccgaagcgccctcggctcagcccgaggtaccctcggctcagcccgaggtaccctcgactcagtccgag

SEQ ID NO: 7682 - DNA, 475 bp, Zea mays
  Peptide Sequence Number=SeqID_12988
  Probeset Number=SeqID_22085
gcagaccgccccggaaaaacaggggggtcccacgcggctgctctcaggcagaaaaaacaggaaatcgcgctgctgagacagggggcacatccaaacattgcccagaactatggcagcgacagagcgcaaggagacactcctggcctatctggagcatgaatctgggggctctaaccataagccgcgtcaagaatatggaccgcctggggaggcagcgcttcggaattacacagcacaaaacctttctggccaggcatacttgcatgggcggaacacagggcatagggatatcaaaggggcaaacatacttgtagaacctaatggagacataaagcttgccgaattagggatggcgaaacaaatatcagcatacacaacgatcaaagccctcaaagggagcccccacaggaaggcaccagaagccataagaaaagcaaagggtacaagccttacaaaaaaaattaggagcctaggc

SEQ ID NO: 7683 - DNA, 436 bp, Zea mays
  Peptide Sequence Number=SeqID_12989
  Probeset Number=SeqID_22086
gctcggaattcggctcgagctgggttgtcacctcatgttgttgttggcacagctagcggtaccaagaaagatgattcatagttgctaatgctgcagctcttggccggcacactaggtgcaactcatacagaagctcaagatgtccacattaagtctgcagagacagcttccgtgcatcaagcggaagcaatttttgctgatgggaaatgcacacaagctaaggctgaccatcttgataagatccaaaagcaggtcggcttgcctactgaacatgcacagaaaatcattaagggtgtcacaacgacgaagttatcttctggaattgaagcctctgctgctcgctggcagatcggtttacagcaggcccgaggattgaaggaagcacacttccaactagatagcttgattgcggagccgcagcgagaaagcatttcta

SEQ ID NO: 7684 - DNA, 668 bp, Zea mays
  misc_feature (586)..(586): n is a, c, g, or t
  Peptide Sequence Number=SeqID_12990
  Probeset Number=SeqID_22087
tcgattcctccattttccatactcgcaaccacacaactgcaaatatgggtttcaccgatctcgtctccgaagcaggcctgactctcctgaacaactatgtcaggacccgcagctacatcgttggctactccccatcgcaggccgatgtaaaggtctaccagcagatcaagcagatccctgctcccgagaagtacccatacgcatggaggtggtacaaccacatgctcaccttcgaggccgagttcgactccctccccggtgacccaaccaaggacttcactgcctacggccccgagtcctccgagctcaccctcaaccccgccaaggcccctgagaaggaggctgaggacgacgacgacgaggtcgacctgttcggctccgacgacgaggaggaggacgctgaggctgcccgcatcaaggaggagcgccttgctgagtacaacaagaagaaggccggcaaggtcaagcctgctgccaagtccatcgtcacccttgacgtcaagccatgggatgacgagacaaacatggacgagctcaaggcgaacgttctctccatcgagaaggacggtctcgtctggggtgcctncaagttggtcgctgtcggtttcggtatcaagaagctccagatcaactgggtcgtcgaggaccgacaggtctcgctggacgag

SEQ ID NO: 7685 - DNA, 509 bp, Zea mays
  Peptide Sequence Number=SeqID_12991
  Probeset Number=SeqID_22088
gcaaggggtatcggcgctgctcgccttccctcagagcctgggggagatgatggagctcgacttggtcagctccgtcctgcacattccagttatcagcatcgtgcgctacgagtttccacgggagagtcagaatccccttcacctccaactgagtttagaaaattcattaagttctgatgctgatgtcactgtctcaatcctgaccatgaacaactggtacaattttagcttgttgctgtgccaggaagactggaacatcaccgacttcctcctccttacccagaataattccaagttccacctgggctctatcatcaacatcaccatcaacctctcctccactgaggacctcttgagcttcctgcaggtccagctggagagcattaagaacagtacacccacaatggtgatgtttggctgcgacatggaaagtatccggcggattttcgaaattaccacccagtttggggtaatgctccctgaacttcgttgggtactgggggattccc

SEQ ID NO: 7686 - DNA, 530 bp, Zea mays
  misc_feature (280)..(280): n is a, c, g, or t
  misc_feature (292)..(292): n is a, c, g, or t
  misc_feature (295)..(296): n is a, c, g, or t
  misc_feature (323)..(324): n is a, c, g, or t
  misc_feature (327)..(330): n is a, c, g, or t
  misc_feature (332)..(332): n is a, c, g, or t
  misc_feature (350)..(351): n is a, c, g, or t
  misc_feature (359)..(366): n is a, c, g, or t
  misc_feature (368)..(368): n is a, c, g, or t
  misc_feature (371)..(372): n is a, c, g, or t
  misc_feature (376)..(377): n is a, c, g, or t
  misc_feature (382)..(382): n is a, c, g, or t
  misc_feature (403)..(403): n is a, c, g, or t
  misc_feature (424)..(424): n is a, c, g, or t
  misc_feature (432)..(432): n is a, c, g, or t
  misc_feature (435)..(435): n is a, c, g, or t
  misc_feature (451)..(452): n is a, c, g, or t
  misc_feature (466)..(469): n is a, c, g, or t
  misc_feature (471)..(473): n is a, c, g, or t
  misc_feature (476)..(506): n is a, c, g, or t
  misc_feature (508)..(508): n is a, c, g, or t
  misc_feature (512)..(514): n is a, c, g, or t
  misc_feature (517)..(518): n is a, c, g, or t
  misc_feature (525)..(526): n is a, c, g, or t
  Peptide Sequence Number=SeqID_12992
  Probeset Number=SeqID_22089
ctgcttgtatattcggcacgagggccacacgtccaccctccatggtcggccaccgtgcctctttctgaccgcaaatccaacctcgacggctagtcccgctaacactttccggcaacttacgccggcttccacctccggaaagctccacttcccgaagatctcgcctcgcttcccccggcatgcctgcgcaaggacctatcgctccgccgcattcggaaggggatcgcctgtggccgggcgtagatagaccccctactacgccacgctgaacatccgccgngactccacgctncannacatcaaatctgactaccggattcttnnccnnnngncccatgctgatgtgagtnnaaaacctnnnnnnnnanaannaccnnagaanaatcaccccctcctatttacnccctgtgggggtcccaccccnaatcatcntcntcatcccctccccccnnccaaacccctcccnnnncnnnccnnnnnnnnnnnnnnnnnnnnnnnnnnnnnnncncccnnnccnnccctccnncccc

SEQ ID NO: 7687 - DNA, 419 bp, Zea mays
  Peptide Sequence Number=SeqID_12993
  Probeset Number=SeqID_22090
tgcaggtgtttcgcggcctcgccggctctggcgtgatcggctcgctggttaacggtcccggtccggtcttcgggctgcgcgccgattttggatgccctgccgattaccgaaaaagccgagccgcagtggaattcgagccggcctggcgtgatgcacgcctgcggtctcgatggtcgcaccgcgatactgctggccgcagcctgtcagctggccgccacgcgtattttcaaaggttcggtacatttcctgtttcagccggccgaagattatctcggtggtgcgcgcaaaatggtggaggaaggtctgtttcagcgcttcccgatggatgccgtgtactctatgcacaactgtccgggattgccggtgggttcgctgtcggtgaatccgggcgcgatgatggcatcgctggattcgtttga

SEQ ID NO: 7688 - DNA, 1497 bp, Zea mays
  misc_feature (33)..(33): n is a, c, g, or t
  misc_feature (60)..(61): n is a, c, g, or t
  misc_feature (108)..(110): n is a, c, g, or t
  misc_feature (112)..(113): n is a, c, g, or t
  misc_feature (127)..(127): n is a, c, g, or t
  misc_feature (133)..(135): n is a, c, g, or t
  misc_feature (139)..(139): n is a, c, g, or t
  misc_feature (143)..(154): n is a, c, g, or t
  misc_feature (165)..(165): n is a, c, g, or t
  misc_feature (181)..(181): n is a, c, g, or t
  misc_feature (183)..(184): n is a, c, g, or t
  misc_feature (186)..(186): n is a, c, g, or t
  misc_feature (280)..(280): n is a, c, g, or t
  misc_feature (294)..(294): n is a, c, g, or t
  misc_feature (370)..(370): n is a, c, g, or t
  misc_feature (415)..(415): n is a, c, g, or t
  misc_feature (495)..(495): n is a, c, g, or t
  misc_feature (565)..(565): n is a, c, g, or t
  misc_feature (688)..(688): n is a, c, g, or t
  misc_feature (747)..(747): n is a, c, g, or t
  misc_feature (774)..(774): n is a, c, g, or t
  misc_feature (794)..(794): n is a, c, g, or t
  misc_feature (816)..(816): n is a, c, g, or t
  misc_feature (836)..(836): n is a, c, g, or t
  misc_feature (842)..(842): n is a, c, g, or t
  misc_feature (844)..(844): n is a, c, g, or t
  misc_feature (880)..(880): n is a, c, g, or t
  misc_feature (902)..(902): n is a, c, g, or t
  misc_feature (908)..(908): n is a, c, g, or t
  misc_feature (919)..(919): n is a, c, g, or t
  misc_feature (933)..(933): n is a, c, g, or t
  misc_feature (1085)..(1085): n is a, c, g, or t
  misc_feature (1108)..(1108): n is a, c, g, or t
  misc_feature (1115)..(1115): n is a, c, g, or t
  misc_feature (1152)..(1152): n is a, c, g, or t
  misc_feature (1219)..(1219): n is a, c, g, or t
  misc_feature (1224)..(1224): n is a, c, g, or t
  misc_feature (1280)..(1280): n is a, c, g, or t
  misc_feature (1286)..(1286): n is a, c, g, or t
  misc_feature (1298)..(1298): n is a, c, g, or t
  misc_feature (1302)..(1302): n is a, c, g, or t
  misc_feature (1320)..(1320): n is a, c, g, or t
  misc_feature (1340)..(1340): n is a, c, g, or t
  misc_feature (1396)..(1396): n is a, c, g, or t
  misc_feature (1457)..(1457): n is a, c, g, or t
  misc_feature (1497)..(1497): n is a, c, g, or t
  Peptide Sequence Number=SeqID_12994
  Probeset Number=SeqID_22091
gcgaggtggggaggcgtcgcagaaacgggaggncgcagggagaagccacgagagagcggnngacacaaagcagaaggaagaaagaagattggagagagagagaagatnnntnncttttccccgcacnccgcannngggngggnnnnnnnnnnnnttttttcacanaaagaagggggggagngnngngagagagaaaaggaagagagaagaagagagaggaaaaggagaggggaggagagagggagagagaggaggagaaaggagagaaaggagaggaganagaaagagagaaangagaggagggaggaggaggagaggagagggagaagagagagaaaagagaaagagaagaagaaaaagaaggagaggnagaagagaggggagagaaaaaggaagaaggaaaaagagaaaaagngagagggagagagaaagaggagaagaggaggaagaagaaggagagggagagaggagagagagagaggagaagggagaganagaagagaggagaagagaggaggggagggaagagagagaggagagaggagaagaggaagagaaaaggaanaaaaagaaagaagaagaggaagggagaagagagaagagagggaagaggagggaagaggaagaagaaggaggagaggagagaagaagaggaagagaagagggaagagagagggagggagagagngaaagaggaagagagggaaaaaagaaagaggagaggaggggaggaggagagagaagggnagaaaaagaggagaaggaagaagagangagagaagagagaaaagaangaagagagagaagagaggaagngagaaggaaagaggggaganagagananagcgacagggaggcagaggaagaagagaaagccganagaaagacagagaacagacacngcgganggagcggaccngacaggcgaaaganagacacagaaagacagcgcaagacagaggcaccgagacgagacacggagaagcagacacagcaagacgagagcagaacacgacacaaacacaaaggcgaagcgcaggagacacgaccggaggacaaaacagacaacagacacaagagaaggnagagcggaagaacgacgaggagncgcaggngaccaaggacaaagacgaaagagcaggacggagagcncggagaacgaaacaagacggaggggcgggagagacagcggacggggaaagcggagcaagacagcaangacgncgagggcacacgcgacaagaaggaccgagaagagagagaaggggaggaagagacgncggagngagcgagagganacgncaccacacgcgacagcgngacgagaggacgaagaacgngcagacgcggagaagaagacgagcacaaacgcacgcgcgccgacagcgagacgagngagacgagagagagaaggcacaagagacgaagcgagagacaggcacaagtctacacggcanagatagtgtgaggagagacgcagtggacgagagagcacan

SEQ ID NO: 7689 - DNA, 679 bp, Zea mays
  Probeset Number=SeqID_22092
aattccatctcagactccggcttccgccgccggtagataaatcccctcctcctcctccctgatgctgcacgccggagccggtcctcgctcctcatcgtccgctcgtaaggatactgatctgctcactccgcaagaacgttgacttcttgctaagctaccgatcggcggatgacgcccccatggattactatggcaagcgcctaactacatcctcctctcgataaaacaatactaagcattgctctacgcgcaacctcacaccatgagattgctacttatgacgcagaccacggcccactatgccaagtcacatgggctcatcccaatgttgatcccatgcttgcatcctgcaactaccacggccgagtgatcatctgtaaagaacgaaccaagactgatgaatgtgcactgctacacacctttgctgagcacaagtcctccgtgaattccatcgcgtgggcgcctcatgagctggatctatgcttgcgcttgagcttcatcagatgccaacatttcagtcttcactgctcgatctgatggaggatgcaataccacgcatattgatcacgcgcatccggttggtgtgacctcagtttcttgcgatcctgcaatggcaccgggagatctaatcaccgcggggtcttctggtcagttcgagcatgatcagaagctcacttcc

SEQ ID NO: 7690 - DNA, 682 bp, Zea mays
  Peptide Sequence Number=SeqID_12995
  Probeset Number=SeqID_22093
agcccccgctccatcgctctccttccgcacttcacttggaagacatggcgtaggcccagggagatctatgtagagtttcccgcatcggcctccgccacccaccgccgccgacgcgacccgcaccactgaaggaacgcaggatgaaaaccccgacgtcaacgtacacctcctcggcgaaaacaagacgcgacactgcgaggccgtccacaacagactgctcaagagcgaccaactctaccaatacatcctggacaccagcgcgtacccgggttatgcggactagaaggaacgagctgatgcgagatctgcgacaggcgcccatggaatcagaggaccacctccgccgactagggccagtacctcaacatgctcatcacgttcatcgttgcctggaacaccatggagatcggtgatgacaccgggtacgcgctcctcgccaccgagctcgaagtcccggaggacggaacgatcttggccatggacatcaaacgtgagaactactagctatgccttccctgcatcaactgggccggcgagagccacaagatcgacttccgcgagggccccgcgctccccgtcctggacgacctcgtggaggcacatgatgagcacgggtcgttcgacttcgacttcgtggacgccgacaaggacaactacctcggctaccacgagcgaatcctga

SEQ ID NO: 7691 - DNA, 623 bp, Zea mays
  Peptide Sequence Number=SeqID_12996
  Probeset Number=SeqID_22094
aaatctggtacataggaggattcaacctaccaggagcatactgcacctacacaactaatgcttgaacgacccatgtaacagcttctcatcttcgacgaaggacaaggataaacatccaaaaaccacactaaagatagagggagcagtcggtgtctacgccgaacgccgagcacgcccggggctccatcctcgttcagcgtagctctagccacacactgaccactactgctgcagctgcgaggatactgaggggccttttccttgcatgcttgcgcactaagctggctgcattgggaaaagtgcctctgaacgactaactgatgtgcagcctggagatcatggcattccttgctacccagcagaatgcaaagaatgcaagtgttgcaagacgcggaaagaccaacctctgcggtaaggcccgtagtgacacaggcgtaggtgtcatgatgaatgatatgaagagcagggtctctgaaaatggaaagcccatttaccatttcatgaggacatcaacattcagacagtacactgtggtgcatgatgtcagcgatgcaaagatcaacccacaggcacccttagataaagtctgcctgctcgggtgtggtgttcctactggtcttgga

SEQ ID NO: 7692 - DNA, 713 bp, Zea mays
  misc_feature (3)..(3): n is a, c, g, or t
  misc_feature (5)..(14): n is a, c, g, or t
  misc_feature (46)..(46): n is a, c, g, or t
  misc_feature (100)..(100): n is a, c, g, or t
  misc_feature (571)..(571): n is a, c, g, or t
  misc_feature (578)..(578): n is a, c, g, or t
  misc_feature (597)..(597): n is a, c, g, or t
  misc_feature (600)..(600): n is a, c, g, or t
  misc_feature (616)..(616): n is a, c, g, or t
  misc_feature (632)..(632): n is a, c, g, or t
  misc_feature (634)..(634): n is a, c, g, or t
  misc_feature (640)..(640): n is a, c, g, or t
  misc_feature (647)..(647): n is a, c, g, or t
  misc_feature (651)..(651): n is a, c, g, or t
  misc_feature (659)..(659): n is a, c, g, or t
  misc_feature (661)..(661): n is a, c, g, or t
  misc_feature (667)..(667): n is a, c, g, or t
  misc_feature (671)..(671): n is a, c, g, or t
  misc_feature (679)..(682): n is a, c, g, or t
  misc_feature (686)..(686): n is a, c, g, or t
  misc_feature (690)..(690): n is a, c, g, or t
  misc_feature (692)..(692): n is a, c, g, or t
  misc_feature (694)..(696): n is a, c, g, or t
  misc_feature (698)..(699): n is a, c, g, or t
  misc_feature (702)..(702): n is a, c, g, or t
  misc_feature (706)..(706): n is a, c, g, or t
  misc_feature (709)..(709): n is a, c, g, or t
  misc_feature (713)..(713): n is a, c, g, or t
  Peptide Sequence Number=SeqID_12997
  Probeset Number=SeqID_22095
agngnnnnnnnnnnctggagctccaccgcggtggcggccgctctanaactagtggatcccccgggctgcaggggcgcgagcccatggcctgctgcttcancaacttcaagcagctgtttgccaacgggcaggaatttacgtacagcctggaagatatcggccggtactaccgtacgtatgtcgagctgatgcagcattgggacgctgtgttgccgggaaaggtcctgcgcatgcaacacgaagtcgtggtggaagacctggagggcagtgtccgccagttgttggaattctgcggactgccgttcgaagccgcctgcctcgagttctggaagaccgagcgcaatgtgcgcaccgcgagctccgagcaggtgcggcggcccattttcaaggagggattggatcaatggcggcatttcgagccgtggctcgggccgctgaaagaggctctatcgtgagacgtgttgtggccgcgctcgcggcgtccgtgtgtattcatgtcgcgttcgctgctgtgccgccggcgcccgctccgcgtgccgcagtggcgccggcttcgcaggccgcgggtgcnccgcctntgctgttaacctcgatcanttnacgctagcaagaactntgggcttgccaatggngncacttncctaatnactnggcgaccnanggtccnccgntgtctatnnnnggtnacananannncnngantggngcngttn

SEQ ID NO: 7693 - DNA, 721 bp, Zea mays
  misc_feature (6)..(9): n is a, c, g, or t
  misc_feature (21)..(24): n is a, c, g, or t
  misc_feature (176)..(181): n is a, c, g, or t
  misc_feature (676)..(678): n is a, c, g, or t
  Peptide Sequence Number=SeqID_12998
  Probeset Number=SeqID_22096
ttccannnncattgggtctgnnnnacaccctagatttacatctagattttggaaagctttacaattgtcctttgggacaaagttgctttttagcacagcctatcacccccaaacagatggtcagactgagagaacaattcaaactttggaagacatgttgagagcttgtgtcttgnnnnnnaaagaaagttgggatagatacttacctctcatagaattctcttacaacaatagttttcatgccagcataggaatggccccttatgaggctttgtatgggagaaagtgtaggtcacctctttgttggtttgaagaaggagaagcacagttactaggaccagatatagttcaacaaaccactagcaaaataaaagacatcagggaaaagctaaaagtagcccaagacagacaaaagagttatgctgatcggagaaggaaacctctggaattcaatgaaggggaacatgtgtttttaaaattgagccccactactggtgttggtcgaaccatgagaataaagaaactgagtccccgatttcttggacctttccaaattctcagaaagataggtccagtggcctatcaattggcattgcctcctcaattgtcaaaacttcatgatgtattccatgtatctcaactgagaaaatacatttctgactcttcacacatcatnnntaatgaagctcttgagttgaaagctgatttatcttaccaatcc

SEQ ID NO: 7694 - DNA, 669 bp, Zea mays
  misc_feature (164)..(165): n is a, c, g, or t
  misc_feature (407)..(408): n is a, c, g, or t
  misc_feature (524)..(526): n is a, c, g, or t
  misc_feature (647)..(649): n is a, c, g, or t
  misc_feature (652)..(656): n is a, c, g, or t
  misc_feature (664)..(666): n is a, c, g, or t
  Peptide Sequence Number=SeqID_12999
  Probeset Number=SeqID_22097
gatgcacattccattccagaagcagaagaaacagagaagcgagttggggatcgatcaaatcgaagaagatgacggaagcgatgataaggaagaagccagggatggcttcggtgaaggacatgccggttctccaagacggtccaccaccgggtgggtttgcaccnnttcggttcgctcggcgaatccctaacaccggtccaagtgccatcgtctttttcctcaccactttcggcgctttctcttggggcatgtatcaggtcggccagggcaaccagaagcgaagggcactgaaggaagaaaaatatgccgcccgccgagccatactgcctgtgctacaggctgaagaggatgagagatttgttaaagagtggcataaatatcttgagtatgaggcagaagtgatgaannatgtgcctggttggaaagttggtgaaagcgtctatcactctgggagatggatgcccccagcaagtggggagttgcgtcctgaagtctggtgatgttatttcagtcatcactatctnnnattgttctgcttcctgcatgtctgaaataaagttgttcctggaacatctgtaattgctttgtggaattgtaaaacaggaatgctttttgaatttgtatttcatgttgaccagcaaaaaaannntannnnnaattaaannnaat

SEQ ID NO: 7695 - DNA, 694 bp, Zea mays
  misc_feature (575)..(577): n is a, c, g, or t
  misc_feature (667)..(671): n is a, c, g, or t
  Peptide Sequence Number=SeqID_13000
  Probeset Number=SeqID_22098
ggatcaattcaatcatgggaaatgccctcagattcctctacagccattgctgtaagccaacagatgattctgaatcacttggaccacatggtgtgtcctcagccaccattggtgtttcagcacttgcccaagatctctttcactttgacatcacctcccaggtccctgaaggacttggcaagcatgttgtgtcttctaagaaagctcaagctaactggtatagaaagttagcagttgcttggaaagaggcaaaaccccctcccaggacgcctgaagaaacatcaagacttgtcattcagaccttgaaaagacaccaaaaagcagatgttgagggattgttgactttctatggtcttcctctaccacacaccttagttgaagtagctgctaaaccccctacttccttgccagatggagtacaatttgaaatgcacaccttgccagttgatgcaaaagcagtggcagatggtgatactataacagtgtatgttagcacagcagaccgcagggaagcatcagttgtccctggaaatgtgcatgcagcagctgtgcaaagatcagaagcacgcgctagnnngaactatgcagaggcagatgcatttcacaaacagattattgattcaggatatcggatgcttgcttttcaaaatgaggaaatccttgctannnnntataggattcgactaaggggaat

SEQ ID NO: 7696 - DNA, 683 bp, Zea mays
  misc_feature (6)..(6): n is a, c, g, or t
  misc_feature (527)..(527): n is a, c, g, or t
  misc_feature (591)..(592): n is a, c, g, or t
  misc_feature (600)..(600): n is a, c, g, or t
  misc_feature (602)..(604): n is a, c, g, or t
  misc_feature (676)..(676): n is a, c, g, or t
  misc_feature (681)..(682): n is a, c, g, or t
  Peptide Sequence Number=SeqID_13001
  Probeset Number=SeqID_22099
ggtcgnttttcttcattcgcgctccgttgagatctagtgttgttgcctcagaactcacaaagcttcacgagaactctagggtttgtgattcgatcggattcgtgatcttgcggatttcgctcttgtttttgatcggtgattgtgattgtgatcgtgaaatagaatataagatgtttggtagggcaccgaagaaaagcgatgacacgaagtactatgaaatcctcggcgtttcgaagaacacttctccggatgatttgaaaaaggcttataaaaaagctgcgatcaagaatcatcctgataagggcggtgatcctgagaagttcaaagagctggcccaagcctatgaggttttgagtgatcccgaaaagcgtgagatatatgatcagtatggtgaagatgcactcaaggaaggaatgggtggaggtggtggtggccatgatccatttgatatcttccagtcattctttggtggaagtcctttctcatctggtggtggtggcagaggacggaggcagagacgtggagangatgtggttcaccccctgaaggtctctttggaggacctttaccttgggacgtctaagaaactcnntctttcangnnntgtcttgtgctctaaatgcaaaggaaaagggtcgaaatctggagcttcgatgaagtgtgctggttgtcaagntactnnt

SEQ ID NO: 7697 - DNA, 698 bp, Zea mays
  misc_feature (403)..(405): n is a, c, g, or t
  misc_feature (617)..(619): n is a, c, g, or t
  misc_feature (672)..(675): n is a, c, g, or t
  misc_feature (685)..(689): n is a, c, g, or t
  Peptide Sequence Number=SeqID_13002
  Probeset Number=SeqID_22100
gactcactctcgctcttgcacctcattcactctctctctgcggcgtagtgatttcgaggtttctcttcacatcgaaacgcacgcagtttcagtcttgtgcggaagtgttgtctagttcgtgaatagattgttgctggttctaaaaagtagtggatattcaaaaaataaagaaagaagacacctgaattgctgtaagagaaaaatgcagaataaagaagcagtcttggaggatggggaaatcaagcctgtgactggtgcagagtctggatttgatgagtgggccaattttggggatgatgacataatgcagcagcaattttcaattcaggccgaggaagccaagaaagttccattcgtgggtgacaaggaaccactgagtagcttggctgctgaatatcaatcnnncagtcctatcttgctggagaaaataaaggtgcttgatggacaatatgctgccattcggcgtactcggggagatggaaactgcttctttcgaagctttatgttttcataccttgagcatattttggaatgtcaagaccaagcagaaatagatcgtatcaaagacaatattgaaaaaagtagaaaagcactgcagacattgggttatgcagagnnnacttttgaagatttttttgcgttattccttgagcagctggaatgtgttattcnnnngaaagagacnnnnntaagtcatg

SEQ ID NO: 7698 - DNA, 471 bp, Zea mays
  Peptide Sequence Number=SeqID_13003
  Probeset Number=SeqID_22101
aagggctcgacaacctgcttgcgttcccgttcgatcacgatccgtcggtcgatgccttcgatccgcatgaaaagccggtgctcagtattccgaacctgtcgatcgagccgggcgagcgggtggcgatcctcggccgggtcggcgcgggaaaatccacgctgctgcggttgttcggcgggctcccgacgccggtgcaggggcgcatcctgttcaacgacacgccgatgccgctgatcgatgtcgccgatgtgcgtccccacgtcgggatgctgttgcaggaatcgagtctcttctacggcacgctgcgggagaacctgctgatcgcgaatccgctcgcgaccgacgacgcgatgctcgccgcgatcaaggtcgcgtgcgcggaccagttgctgctgcggcagccgcacggcctcgacctgaagctgcgcgagaccggattggggttgtccgcagcccacaagcagggcttca

SEQ ID NO: 7699 - DNA, 742 bp, Zea mays
  Peptide Sequence Number=SeqID_13004
  Probeset Number=SeqID_22102
gggtacctcgagccggcgggagttcagtactaagtatcatggaggcatgctcctctctactcactcctgcgcttactcatcgagcgtgtacttgtccctgatcctcctttggatgcgcatgaatggcttatgtggagggccggctcatacgcagttggcccaccgaggagctcggatgaagaacgcacgcacacaacctacacggagatcagaaagataggcagggtgatctaaaagggctgggagcatgcctactagaaccccaacttcccctggtgggtccagggtgcaagaaggatctgcggatgagctcgagtggcagggccatcaatacattgtcaccgatgacaaagaaggacacaactgtgaactggataagcacgttggagacatgcatgttctgattaccaccccattccacccagattatgtcactgcagacaggataaagaaggagaagaatcttgagcttcttctcacggcaggaatcggctccgatcatagtgatcttccagtagatgctgctgcggggttaactgtggctgaggtcactggaagcaacactgtctctgtgggacaagatgagctcttgcgcattctggatctgctcaggaacttcttggctgggtaccaacaggtacttcaaggcgaatggaacgtagcaggcattgcccatagaggttatgatcttgaaggaaaaactggtgggactgttggggatggtcctattggcaggctcttg

SEQ ID NO: 7700 - DNA, 661 bp, Zea mays
  misc_feature (12)..(16): n is a, c, g, or t
  misc_feature (171)..(172): n is a, c, g, or t
  misc_feature (498)..(498): n is a, c, g, or t
  misc_feature (500)..(500): n is a, c, g, or t
  misc_feature (584)..(585): n is a, c, g, or t
  misc_feature (613)..(615): n is a, c, g, or t
  misc_feature (626)..(633): n is a, c, g, or t
  misc_feature (640)..(641): n is a, c, g, or t
  misc_feature (644)..(644): n is a, c, g, or t
  misc_feature (646)..(646): n is a, c, g, or t
  Peptide Sequence Number=SeqID_13005
  Probeset Number=SeqID_22103
cattgcaaacgnnnnnaccatttcgccgctgatgggtctctccaaagaacacctccttgcacggttacaggagcttcagattgaattttctaagtacgagcatccagttgttttgactgttgaagctcaagcaaattatgttggacatttggggggtgggatcagtaaatnnttatttttgaaggacaagaaaaacagattttatattgtttctgctctagctgataccaaagtagacctcaaagtgttatcccagcggcttggtttgggaaaaggtggtgtgagaatggcccccgaagaggctttaagtgaaatacttcaggtatccttgggttgtgtcactccgtttgcagtggtgaatgaatcagcacgagatgtttcactgttattggatcaagggttcaagacacagaagcactgcatcttccatccactatcaaatgacatgtccatatctctaactgcacaagatcttgacaaatttcttaaatcaatagnangaaatcctgcgtatgttgatttggaggccaatccttcagtggggaaagatcaaccccccgacctagctgcactggttccatctnnttcagttattttacctgatcaaccacannngcaatcttctnnnnnnnntcccaannacngnaaccttgtttctgtg

SEQ ID NO: 7701 - DNA, 679 bp, Zea mays
  misc_feature (527)..(529): n is a, c, g, or t
  misc_feature (566)..(566): n is a, c, g, or t
  misc_feature (601)..(601): n is a, c, g, or t
  misc_feature (664)..(665): n is a, c, g, or t
  misc_feature (668)..(670): n is a, c, g, or t
  Peptide Sequence Number=SeqID_13006
  Probeset Number=SeqID_22104
gcccataaaaacaaaacccattttcttcaccgccacaaaacgccaccgttttcagctttcaccggagcttcaccctttgcatggcagtgagttttttggcacgtgaagtatctgacctctgtctcgggaagcctccgttgaggtctctgtctgcgtccgccaccgtcgcggaggccttggccgtgctcaaaaactccggcgagagctccgtcagcgtgtggatctgcaaccactcgcgtggaatcgaaagcgaggaagtgggtcggtgtgaatgtgtcgggaaactgtgcatggttgatgttatttgtttcctttgcaaagaggaaaacctcttttctccttcttctgctctaaaagctcccatttctgaaattttaccaaaggttcctggtcttgttgtgcatctagaaccttcttctagcttattggaagccattgatcttataatccaaggagcacagaatcttgtggtgccaatattaccaacaaaaagaaatggtatttcaagaagaaaacagcttcagaannngtcagcaatcaacagccacaatggtcgtgaattctgntggttaacccaagaggatgtgatccgatttgtgcntggttccattggtctcttcgctccactgcctgcactctctgttgatactcttgggattatcanntcnnntgtgcttgc

SEQ ID NO: 7702 - DNA, 714 bp, Zea mays
  misc_feature (7)..(7): n is a, c, g, or t
  misc_feature (12)..(12): n is a, c, g, or t
  misc_feature (29)..(30): n is a, c, g, or t
  misc_feature (75)..(78): n is a, c, g, or t
  misc_feature (152)..(153): n is a, c, g, or t
  Peptide Sequence Number=SeqID_13007
  Probeset Number=SeqID_22105
tttgacntttgnatgtaagtacattactnnataggattatatgtcttgaaattatatgctgtcttcaaatttttnnnntacacttgtctatttgctcttacttccaatgtggtacattcccttgtgtagtcatatatgtttatgtgtttttnntgcctggattaggagctgctaggaaaggaatgaaggctatgtgcttgatgttgttgttgttgttggtggatagtgcattggggaattcagatgttgatgtactccttgaactcaagaagagtattcagaaagacccttctggattagttgttaattcttgggattcaaagtctttaggttcagatggatgtcctcagaactggtatgggatattgtgtagtgaaggcaatgttatatcaatcaatttggataatgctggtttagttggagagttcaatttccttgctattaatggccttacaatgctgcaaaacttgtcagtcgcgaacaaccagttcacaggaaatatctcacatattggtccaatgaaatcacttgaattttttgatttgtccctcaacaagtttaatgggccgttactctctaactttcttgaattgcgtaatttggtatatctgaatctttcttcaaatgaacttagtggtactcttccaattgggtttcaaaagcttgagaagttgaagtatttagatttgcactctaataacttctctgggaata

SEQ ID NO: 7703 - DNA, 581 bp, Zea mays
  Peptide Sequence Number=SeqID_13008
  Probeset Number=SeqID_22106
gacttcaccccggccttctcagacgtctgtagcgatgctctgctcgaagcccacgaggctgagatcgcccgcctcgagacactcaaggagcagcgtgcgcccacacttgagctgattgaaaagcatcgcagcatcctagctgacaagcaggcgctttccgcgtcaagtcaagatgcctctcgactgatgggccgaggaaataagggtgaaaagcgtgaccctggcaagctgctacgcgaggagaagatgcgtaagcgaattgcaaaggagttgcccaaggttgagagtgagttgagaaaggagctggagcactgggaagatgaattcggtcgacccttcttggtccatggcgagcgttatctcgacaacttaactccagttgtctccaagccacctcctcgctccaagactccctctgcacctccatctacgaccaagtccgttaccaactcaattaaacgtgatcctgtatctcgccccggaagttctctacgcggaccaccacctccccgatctgccacgaagaccccgaccagtggtgtgcctgtgaagcacaataccaaggatatctgcaggcagca

SEQ ID NO: 7704 - DNA, 513 bp, Zea mays
  misc_feature (169)..(171): n is a, c, g, or t
  misc_feature (426)..(428): n is a, c, g, or t
  misc_feature (430)..(430): n is a, c, g, or t
  misc_feature (432)..(436): n is a, c, g, or t
  misc_feature (472)..(473): n is a, c, g, or t
  Peptide Sequence Number=SeqID_13009
  Probeset Number=SeqID_22107
gagtggttagtgtgctactacgcgaaagaacagcctctcccatatcatcacgtttcagtacccgctctctctctctcaacaattcaagaagaaaatggttgacaacgattcactctcggaattcctcgcatctgctgtggacgctgctcagaaagctggtgagattttnnngaaaaggattctaccagacaaaacatgtagagcacaaaggacaggttgatttggtcactgaaactgataaagcatgtgaagaactcatctttaatcatctcaagcagctttaccctactcataagctcattggggaagaaaccacagctgcttgtggcgctacagaacttacggatgatcccacatggattgttgatcccctagatggaactactaactttgtgcatgggttccccttcgtttgtgtctccattnnncntnnnnngggaaagactcctactgcgggtgttgtgtccaatcnnatatttaatgagcttttcactgcattccgtggaaaaggtg

SEQ ID NO: 7705 - DNA, 824 bp, Zea mays
  Peptide Sequence Number=SeqID_13010
  Probeset Number=SeqID_22108
agggacttaccctaaccccagccgcccacccccattctcacccaactcaccaccgaatcgcgcatctcgcacggaagaccaccagagaggaagagggcgagggagagcggatctgcacgatggtgatgctccagcaccagaaccagggggcagcggagccgatgaccaccacgggtcggcgggctgcgcgccatggacctctacgagaagctggagaaggtcggggagggcacctacgggaaggcgtacaaggcccgggagaaggcgacgggccggatcgtggcgctcaagaagacgcgcctcccggaggacgacgagggcgtgccccccacggcgctcagggaggtctcgctgctgcggatgctgtcgcaggacccgcacgtcgtgcgcctgctcgatctcaagcagggacagaacaaggagggtcagaccatcctctacctcgtcttcgagtacatggacaccgacctcaagaagctcatccgcgggcaccgccagaaccacgagaagatccccgcccacaccgtcaagatcttgatgtaccagctctgcaagggcgcggctttctgccacggacgaggtgtcctgcaccgtgacctctagccacacaacctgctcatggaccgcaagaccatggctctcaagatcgccgatcttgtgctcagtcgtgacttcacggctcctctcgagaagtacacacacgagatacttagtctgtggtacacagctccggaggtccttcttggagccacacactactcaacgccgtgtgacatgaggactgagagctgcatatttgctggagtgatcactaccacgtgact

SEQ ID NO: 7706 - DNA, 583 bp, Zea mays
  Peptide Sequence Number=SeqID_13011
  Probeset Number=SeqID_22109
ggtcttggattgtccccagaacttaacttttctgggaattatgaaagggggaacctttttatccaataaaagttccatttccctgagacccaaggggttcaaattttttggtccagtccagatcaccgtggaacctggccacaccgttcctgtttctggtgaagggtattaggaggtgggcatgggccagaagactccattgttttgcttggaaaagtgcagattgctggcaggttcattccatgcggtgtgatgtgggctactcctgatgagaaccttcatgagggtccaaagggaggatcaacatcaagagtgaattatcgcactagcaatgaggtggaacagaagctatatgctgcctcggaggagatacaattccttaggtcaaaactgacactcatggagagatatatcaatatacttcacatctcaatcttccgtaagccacttgatgaacgggcgctaacacgttcccttcaggaatattccgtctttgatatcagaaaggaatttgagaacattttggatgcagcagatactgacgaacttaatcgtgtagagatctgctaccgcagcatgcttt

SEQ ID NO: 7707 - DNA, 720 bp, Zea mays
  misc_feature (679)..(679): n is a, c, g, or t
  Peptide Sequence Number=SeqID_13012
  Probeset Number=SeqID_22110
gggtaccctcggagctctgccgggtagtgccttataggcgagatggccgcgtgctcaccctcgcgagcatggcgtctggtccgtgcgaggccctcgcgcggcgtcctctcccagcttgagctgatatagatctccacccccaatgctgaccaccgcccgttcctgcgcctgctctccagctacaggcgcgatgactgcctcacactgcgtgcctcagctaccgaaaggtcctaggcggccctatcatgctaggacgtgataggctgacgaggaggaggctggaggatggatgcgctgtcgcaaataggactgcaaaagtatgcgaagcagagggctgtcagccgggtggagcgtggcagggcatcacacgcacacgggcacgaggcaagactgccatcgcccgcgtggagctccaggagggcaccggcacggtcttcatcaacttacgcgacgcttacgagtatgtgcagggaaatgcaatgtggatggagtactgcaaggtgcccttgatgactctagggtttgagaacaactatgacgggtttgtgaaagtacacgggggtggtctgtcaggccaggtccaggccatttgccttggtgttgcccatccgctggtgaagatcagcaatgccaacagggtttcctctgaagccggaagggttgctgacaaggggacacncgtttcgttgaaaggaagaaagctggtcttaaaaaggcacg

SEQ ID NO: 7708 - DNA, 462 bp, Zea mays
  misc_feature (139)..(142): n is a, c, g, or t
  misc_feature (187)..(188): n is a, c, g, or t
  misc_feature (385)..(388): n is a, c, g, or t
  misc_feature (407)..(410): n is a, c, g, or t
  misc_feature (426)..(428): n is a, c, g, or t
  misc_feature (436)..(436): n is a, c, g, or t
  Peptide Sequence Number=SeqID_13013
  Probeset Number=SeqID_22111
gtgcgtggccacttcaccaagaaccctgaggagattggtgctggtgaccagggtcacatgtttgggtatgccactgatgaaacccctgaatacatgccattgagccatgtccttgcaaccaaactaggagctcgccttnnnnatgttaggaagaacggtacctgtgcttggctgagaccagatggtnntacacaagtaacagttgagtactacaatgagaatggtgctatggttccagttcatgtccacactgtcctcatttcaacccaacatgatgagactgtcagtaatgatcaaattgctgctgatcttaaggagcatgtcatcaagcctgtcattcctgaaaagtacttaaatgagaagaccatcttgcaccttaaccctnnnngccgttttgacattggtgnnnnccatggtgatgctggnnncactgcanggaacattatcattgatacttatggt

SEQ ID NO: 7709 - DNA, 510 bp, Zea mays
  misc_feature (361)..(362): n is a, c, g, or t
  misc_feature (386)..(386): n is a, c, g, or t
  misc_feature (395)..(395): n is a, c, g, or t
  misc_feature (417)..(419): n is a, c, g, or t
  misc_feature (430)..(431): n is a, c, g, or t
  misc_feature (456)..(457): n is a, c, g, or t
  misc_feature (475)..(479): n is a, c, g, or t
  misc_feature (493)..(494): n is a, c, g, or t
  misc_feature (503)..(504): n is a, c, g, or t
  Peptide Sequence Number=SeqID_13014
  Probeset Number=SeqID_22112
tggattttttttggtgttcctctgcaaccatggcggaagaggtggttttgttggatacatgggccagcatgtttggtatgagagttaggattgcattggctgaaaaggatgttaagtatgagtacaaggaagagaatcccagaaacaagagccctttttttctgcagatgaacccaattcacaagaagatcccagttctcatccataatggcaagcccatatgtgaatctgcaatcattgtgcagtacatagatgagatttggaaggacgaaactccaatcatgccctctgacccatatgagagagctcaagcaagattctgggttgattacattgacaaaaaggtgtctgatacttggannaaaatgtggctttctaagggagangagcatgangtagggaaaaaggaattgatcnnnatctttaagcnnctagaggagacacttggtgacaaanntttctatgggggtgacannnnngcgtttctcgatannggtatgatnnctttct

SEQ ID NO: 7710 - DNA, 461 bp, Zea mays
  misc_feature (154)..(156): n is a, c, g, or t
  misc_feature (333)..(335): n is a, c, g, or t
  misc_feature (403)..(404): n is a, c, g, or t
  misc_feature (413)..(414): n is a, c, g, or t
  misc_feature (429)..(432): n is a, c, g, or t
  misc_feature (447)..(448): n is a, c, g, or t
  Peptide Sequence Number=SeqID_13015
  Probeset Number=SeqID_22113
acgcacctcacgggcctgcagaagtaatatttgagaatgtttgtgtgccagcgaaaaatatcatactgggtgaaggacgtggatttgagatcgctcaaggtaggctaggtcctggaaggctacaccattgtatgagactgattggtgctgctgnnntttttatgcatttgatggttcaaagagctgttagtagaagagcatttgggaaattgattgctcaacatggctcatttctttcagatatggccaagtgccgaatagagctagagaagaccagattgttggtgttggaagctgctgaccagcttgataggcttgggaacaaaaaagctnnngggatattagcaatggctaaggtatccgcacctaacatggccctaaaggtacttgacatggcgatgcnngtgcatggnnccgcttggtatatcnnnngacacaagtcctggnncatctatgggcaa

SEQ ID NO: 7711 - DNA, 599 bp, Zea mays
  misc_feature (157)..(159): n is a, c, g, or t
  misc_feature (443)..(443): n is a, c, g, or t
  misc_feature (445)..(446): n is a, c, g, or t
  misc_feature (514)..(514): n is a, c, g, or t
  misc_feature (550)..(550): n is a, c, g, or t
  misc_feature (562)..(563): n is a, c, g, or t
  misc_feature (565)..(566): n is a, c, g, or t
  misc_feature (577)..(578): n is a, c, g, or t
  misc_feature (580)..(582): n is a, c, g, or t
  misc_feature (589)..(592): n is a, c, g, or t
  Peptide Sequence Number=SeqID_13016
  Probeset Number=SeqID_22114
gaagctcacccgaaaccattcatttatcgtggctgctctgaaggaatcttcactgcttgttgttagtggtgatgagaaaagggttaagcggctcaatccgcttcatttcaatgaatttagagatcataagttatatacagttttggtagagaatttnnnggaggaccattcaaagaagaacattcagcaaatattccgtgaagctggaactataaagaggataatcattcatgacccgcattctactgtagagtctgcaaaacatgtcaagcaagaaaagtttatcagtaataagttacatgctctggtggaatacgaaactattgaggctgctgagaaagcagtggctatgttaaatgatgaacaagactggagaaagggcatgcgggttaaacttctcaagcaaacgggcaagtatggacacaaaaaacaagcttggaagntnnctaattctgagaagaatagctcaagccatgtatctgaaccatcctggggataaggaaaatcatggccncaaatgagcatcgtgaaaatgcacctgaggaagagnatggggagcatnnanngaacgctaaanncnnncccaggnnnnaaactca

SEQ ID NO: 7712 - DNA, 468 bp, Zea mays
  Peptide Sequence Number=SeqID_13017
  Probeset Number=SeqID_22115
cgggtccgggttgaataccttggcaacccgagcctgatccacgcgcagagcattctggccatttgggggtgccaggtggtgctcatgggccccgtccagggggaccgcatccccggtggcccgctcggggaggtggttgaccccctgtaccccggcggcagatttgacccgcttggggttccccacgacccggaggggttttcggagctcaaggtcaaggagatcaaaaacggccccctccccaagttttccaagttcgggttttttgtgcaggccattgtccccggcaagggtcccgtttaaaaccttcccgacccccttgctgaccctgttaacaacaaagcctgggcctacggtaccaaatttgtccccggcaagtgagcgagggcaaaaacaaacttgtatgggtgtcccgtaaacaaacgtatttgtatatgtactccccggaaatgtccctagtattttttt

SEQ ID NO: 7713 - DNA, 579 bp, Zea mays
  misc_feature (387)..(389): n is a, c, g, or t
  misc_feature (478)..(479): n is a, c, g, or t
  misc_feature (486)..(487): n is a, c, g, or t
  misc_feature (502)..(502): n is a, c, g, or t
  misc_feature (527)..(528): n is a, c, g, or t
  misc_feature (546)..(553): n is a, c, g, or t
  misc_feature (572)..(573): n is a, c, g, or t
  Peptide Sequence Number=SeqID_13018
  Probeset Number=SeqID_22116
ggaagattgttattattcctggtagttagaaaatactttctccttgaagctctaaatatttgcagaccatcatcggcagatggggtctgaaggtccttcagcagctgtaacaacagtttatttaacaggtttcaagaaattccatggagtttcagagaatccaacggatacaattgtcaataatttgactgagtatatgaagaagaagggtttaccaaaaggtttagttattgggagctgcaacattcttgagactgctggtcaagcagcacttattcccctttaccagacattgcaatctgctattagtgcgaaggattctgaatcttcaagttccaacagaattatctggctgcattttggggtcaacagtggtgcaacaaggtnnnctatagagcgtcaagctgtcaatgaggctaccttccgttgccctgatgaaatgggatggaagccccagaaagtccccattgttccttcnnatggtcnnatttcacgaataccngagacttccattcctgtggaggagnncaccaaggccttggcaannnnnnnntatgatgtaatgacatcanntgatgc

SEQ ID NO: 7714 - DNA, 468 bp, Zea mays
  misc_feature (137)..(137): n is a, c, g, or t
  misc_feature (139)..(142): n is a, c, g, or t
  misc_feature (268)..(268): n is a, c, g, or t
  misc_feature (414)..(415): n is a, c, g, or t
  misc_feature (428)..(429): n is a, c, g, or t
  misc_feature (437)..(439): n is a, c, g, or t
  misc_feature (463)..(464): n is a, c, g, or t
  Peptide Sequence Number=SeqID_13019
  Probeset Number=SeqID_22117
cgcctagccgctgagatttgaaaaaggccaagtttcaaagatgagtaagcttcagagtgatgctttaagagaagctatctcaggaatcatggctgattccaaggagaaaaaccgtaaatttgtggagactattgaantnnnnattgggctgaaaaactatgatccacagaaggataagcgtttttttggctctgtcaagttgccccacattcctcgccccaagatgaaaatccgcctgcttggtgatgcccagcatgttgaagaagcnaagaagataggactggactggatggatgttcgaagccttgaagaagctaaacaaaaataagaaattggtgaagaaacttgccaaaaagtaccatgcctttttagcttctgaagcagccatcaagcagattcctcgtcttctgggtnntggcctcaacaanncaggaaannnccctacacttgtcactcatcaacnntctc

SEQ ID NO: 7715 - DNA, 420 bp, Zea mays
  misc_feature (166)..(171): n is a, c, g, or t
  misc_feature (252)..(252): n is a, c, g, or t
  misc_feature (294)..(295): n is a, c, g, or t
  misc_feature (413)..(414): n is a, c, g, or t
  Peptide Sequence Number=SeqID_13020
  Probeset Number=SeqID_22118
ggagactcccttggtttcaaaagaaagaatgaagcaataactttttctctgccgccattgatttcgatcccaaacccacgacccttccttgattgaatgatcttgcttttccctctcacttcttcaatcggacggtttttctgggttgtagcaatgtcgactcctnnnnnnaagaggctgatgagagattttaagaggctgcaacaagacccacctgcaggaatcagtggtgcccctcaggataacaacatnatgttgtggaatgctgctatatttggtcctgatgatactccnngggatggaggcacgtttaagttgactctccaatttactgaggattatccaaacaagccacccactgtacgatttgtctctcgaatgtttcacccaaacatatttgcagatggaagtcnntgtttg

SEQ ID NO: 7716 - DNA, 609 bp, Zea mays
  Peptide Sequence Number=SeqID_13021
  Probeset Number=SeqID_22119
cacttcatattattgtttcccgtcattcatctcatcgcccctcacaggtgtgctttctctcctcgcgcgtccttctccctgatcctcctttgagttcatggctcatgacaatgtggagggccgccgctaggcagttggaccagcgtgcgctcgtctcaaggtgcgcgcacacctctacaggcagcaaaaatatagtcaggatgttctacaacgccggcgagtatgccgacgagaaccccaacttcgacagctgcgtagagggtgaactcggcatccacgcttgtgtcgagtcgcagggacatcaatacattgtcaccgatgacgaggaaggccccaactgtgaactgcagaagcacattgaagacatgcatgtcctgattaccaccacattccacccagcttatgttgctgtagagaggataaagaatgtgaataatcttgagcttcttctcacagcagggatcggctccgatcatattgatcttccagcagatgctgctgcgggcttaactgaggctgacgacactggaagcaacactgtctctgtggcataagatgagctcttgcgcattctgattctgctcaggaacttcttgcctgagtacaaca

SEQ ID NO: 7717 - DNA, 300 bp, Zea mays
  Peptide Sequence Number=SeqID_13022
  Probeset Number=SeqID_22120
tgtgctccctgctggccagcggcacagcggccctggcctgtgtcttcctgggggtcaccgtggaacgatttggccgccggggcatcctgcttctctacgagacactcactggcattgcatccctggccctgctgggcctgtgggattatctgaacgaggctgccatcaccaccttctctgtccttgggcttttctcctcccaagctgccggcatccttagcaccctccttgctgccgaagtcatccctaccacggtccggggccgaagcctgggcctcatcatggcactgggggcgctcg

SEQ ID NO: 7718 - DNA, 619 bp, Zea mays
  misc_feature (7)..(7): n is a, c, g, or t
  Peptide Sequence Number=SeqID_13023
  Probeset Number=SeqID_22121
caaatcnaatgtggcacccgggccgaaccagatcagccgcgagcagggtaaacgtcgcatcgtcgtcactgccaacgtgcgcgggcgcgatctcggttcgttcgtcgccgacgcggagcagcaaatcgaggccaaggtcaagctgccggccggctactggatcggatggggtggccagttcgaacaactggtttcggcgacgcagcggctgactatcgtggtgccgatcgcgctgctactgatcttcctcctgctgttcatgagcttgggctcgatggcagacgctctgctggtgtttagcggggtcccgctggccctcaccggtggcatcattgcgttgctgttgcgcggcattccactgtcgatcagcgccggaatcggtttcatcgcactgtccggcgtcgcggtgctcaacggcctcgtcatcatcacgttcatagagcgcctccgcagggaaggacacgcccttgtggatgcggtgcgtgagggcgcgctgacccggctgcggcccgtcctgatgactgcgcttgtcgcttccctcgggttcgtgccgatggcgatcgcgacaggcgccggagcggaggtgcagcggccgccaccgcggggagtcagcttttaa

SEQ ID NO: 7719 - DNA, 716 bp, Zea mays
  misc_feature (11)..(11): n is a, c, g, or t
  misc_feature (15)..(15): n is a, c, g, or t
  misc_feature (25)..(25): n is a, c, g, or t
  misc_feature (52)..(52): n is a, c, g, or t
  misc_feature (82)..(82): n is a, c, g, or t
  misc_feature (86)..(86): n is a, c, g, or t
  misc_feature (702)..(709): n is a, c, g, or t
  misc_feature (711)..(712): n is a, c, g, or t
  misc_feature (714)..(714): n is a, c, g, or t
  Peptide Sequence Number=SeqID_13024
  Probeset Number=SeqID_22122
caaccccaccnaaancggccaaggnacatccggtcagcatgcaaacgccaantcggacagccaaacccattcggctatcccnccancccgaccagaacggtcgggcgcaatgtggcggagcatccggtgtcgtgtcggtgccggccaatgggcttgtcgctcgcgatcgatctcgcgcagcgcggccagcgcgtggtgctgctcgacgatgccgaccggatcggcgaaggctcgcgcgcgatctgcttctcgaagcgctcgctggagttctgggatcgcctcggcgtcggcgaccgcatggtcgagaagggcgtggtgtggagcgtcggcaagatctttcacggcgcctcgcaactctaccagttcaatttgcttcccgaggaaggccacaagcggccagccttcatcaacctgcagcaattctacgccgaggcctatctggtcgaccgcgtcgagcaattgcccgagatcgatctgcgctggcgcaacaaggtgatcgcgctggagagccgcaacgacggcgtcgcgctgaccatcgcaacgcctgaaggctcctaccaggtgcatgcttcgttcgtcgtcgcctgcgacggcgcgcgttcgtcgctgcggcagatggtcggcgctgagttcgcaggccaggtgttcctgcagcccgggggatccactagttctagagcggccgccaccgcggggagcccnnnnnnnnanncnat

SEQ ID NO: 7720 - DNA, 665 bp, Zea mays
  misc_feature (578)..(578): n is a, c, g, or t
  Peptide Sequence Number=SeqID_13025
  Probeset Number=SeqID_22123
acgctgacacggagggcaacatcggctatcaggcgccggggcgtctgccgatcctcggcgcgggggacggctggctgccccagcccggctgggacagcgcgtacgactggaagggctacatccccttcgaggagctgccggtctcgtacaacccgcccgaggggtacatcgtcacggcgaacaacgcgatcgtcggcgatgactacgagcacttcctctcgcgcgactgggactacggctaccgtgccgcccgcatcgcccacctcatcgagcgcaaggcggccgcggcgccgctcgtcgcgcaggatctgcgcgacatccagatggacgagcagatgtggatcggcaagcagttggccgtggcgatggacgccgtggccgtcgacggcaaggggccgaaggcggccgtcgacctgctgcgcacctgggacgcgcaggacgcccccgactcggccgccgccgcgtacgcgaacgtgctgtggtcgaacctcgtgcacaacgtcttcctcgaccgcgaggtgccgctgccggtcggcgatcagggccgcctgttcaccgtggtcggccgatgcttcgancggtacacgtccgacccgctgtggagcaacgaccgcatcgacgtcgacgacatgggcgagatgctggcgttctcggccgagcaggcc

SEQ ID NO: 7721 - DNA, 639 bp, Zea mays
  misc_feature (13)..(14): n is a, c, g, or t
  misc_feature (16)..(19): n is a, c, g, or t
  misc_feature (24)..(27): n is a, c, g, or t
  misc_feature (31)..(31): n is a, c, g, or t
  misc_feature (67)..(68): n is a, c, g, or t
  misc_feature (70)..(72): n is a, c, g, or t
  misc_feature (77)..(77): n is a, c, g, or t
  misc_feature (79)..(80): n is a, c, g, or t
  misc_feature (100)..(102): n is a, c, g, or t
  Peptide Sequence Number=SeqID_13026
  Probeset Number=SeqID_22124
gaagaagatggtnntnnnngtatnnnnggtntatcaattaaagtgactggcatgggagtttatctanntnnnaagcngnnagaatcattcatatcaacannnatatcctttcaagctgtatttaaaagcctatctgtttcaaacaaaaaaatcaacacagagccgagggcgcttgtcaaaaacttcgggcaagggaactcaaatgttgaaattcaatcttgtacagtgttcggtatatgtattgggggagaccggattggaaaatacagttgttccagatcccaagcgagttaattatggttcacagggtggtagagttataataaatgtgtcagcagatgggaccccacgcaatgcaaacatagtgtcaactgtttccaatgagtaccagaagttaaagtactgtatatctcttgaaatctttcattttaagattagtgtgaacaaggagaaacaatctaaacaaatagaacttgaaagggccagatctatctatcaggaatatatgcaggaaaataggcctgtaacaaaggtcgcattatttgatatgcagaatactaaatttgtacaacgcttaggtggcattagagagaatgcagcctgttctcttttcagtgctactgacattacaatgcgatg

SEQ ID NO: 7722 - DNA, 697 bp, Zea mays
  misc_feature (74)..(75): n is a, c, g, or t
  misc_feature (115)..(115): n is a, c, g, or t
  Peptide Sequence Number=SeqID_13027
  Probeset Number=SeqID_22125
cataaatggtactctttttttatcattgtcaacatttaacatgttcagtgtttgattttttccccctgcgaatnntatctgttcagattgatgaaattgtcaatgaacttgctantacggtatttgctcttgacccatcagagaagcaagtcggggatgatttaattgcattgcttcagcaggggagaaagtttaacgactttaatgacggtaatgaacttgaatgttttcatctggctgctactagactcggaatcacatcttcaagagcagctcttactgaaagaagagctctcaagaaactcatagaaagggctcgggctgaggaagacaagcggaaggaatcaattattgcatatcttttacaccttatgcggaaatactccaagttatttagaagtgagttctctgatgataatgattctcagggttctcaaccttgttctcccactctaagattgcttgaggacggtgttcctggtagtcattgtcaagcctttgacagacagctttcaaaacttagttcctttaattttaagccaaacaataggaaatcagggcagatgctccttccacctgaagagttaaggtgtccaatatctctgcaacttatgagtgatcctgttataattgcttctgggcaaacatatgaaagggtttgtatagaaaaatggctcagtgatggacacaatacctg

SEQ ID NO: 7723 - DNA, 472 bp, Zea mays
  misc_feature (1)..(10): n is a, c, g, or t
  Peptide Sequence Number=SeqID_13028
  Probeset Number=SeqID_22126
nnnnnnnnnncgtttatgaggacttcgcacactacaagtcaggagtgtacaagcacatcacaggtggcgtgatgggaggtcacgccgtcaagttgattggttggggaaccagtgatgctggcgaggattactggcttcttgcaaatcagtggaacagaggctggggtgatgacgggtacttcaagatcataaggggcaagaatgaatgtggcatcgaagaagatgttactgccggtatgccctcgacaaagaacacggccagaaacaatgatgtcgcctttggaacggccatactttgagcagcgccctggttacaaacacggttgaagttagctgtttgcatgtcaaatgaagccagtaaattagctttgatggttccaggatactgtattatgtacactagcgcaaacgctgatatgttgctgaaacaacaccttgttcagaaacaaaagggagtaataataataccaac

SEQ ID NO: 7724 - DNA, 487 bp, Zea mays
  Peptide Sequence Number=SeqID_13029
  Probeset Number=SeqID_22127
ccccagccgggcggccggcaccgcggcgaggtgcgttgtgttcgggctgttctgcgtaacgcggttccgggacctggaggacagagccaacgtgtgctcctcgtacaagcaggggcacgtctcgatggtcgtgaactccaccgccgggagcgccccgggtccgcctccgcctccgcctccggctggcgcgatcgccccgccgataccgacggaggagggaggtgagaagaaggggggctcgggctcggcggcgtggaaggtcgccgtcgccgtggttgcaggtgcggccgccttggggctggtgggcgcgctggtgctgtgcttggtgcggtacaggagggacaagaagcttgaggccatggagcggaacgcggaggccggggaggcgttgcgggtggcgcgcgtcgggcgggcgcaggcgcaggcgcccgtggcgtcggggacgcggacgcagccggtgatcgagaacgagtacgctgcgtcgtag

SEQ ID NO: 7725 - DNA, 671 bp, Zea mays
  Peptide Sequence Number=SeqID_13030
  Probeset Number=SeqID_22128
tgcagcagcgcattgacgatcgcatcgaggcgatgatggcgatcggcgtggatgagatgagctgggacgatctcgacgacagccattacagctggccggacgtggccgaggtgcgcgactaccgcggtaaagtgaaaaccgtggtaagtgaattcatccgcaccatgccgctggagctgccgattgactgggacagcccggcgtgggtgattctgatgggcattgagcatgagcgtattcacctcgaaacctccagcgtgctgatccgccagctgccgcttgagtgggttaaaccgcagccgcactggccggcgtgtccgcaggcgcgccacgatcgtgcctcggtaccggccaatacattggtggcgatgccaggcggacgcgtcacgcagggtaaaaccgatgatacctacggctgggataatgaatacggcagccttacaactgagctgaaaccgttcaaagccagcaaaatgctggtgagcaacgccgagttctttcattttattgccgccaacggctataacgaacgccgctggtgggatgacgaaggctggggctggcgcgagtttgcccagccgcagatgccgactttctgggtcggcgacatcgcgcaacctgacgatctccggctgcgcctgatgaccgaaaaagtggcgatgccgtgggac

SEQ ID NO: 7726 - DNA, 628 bp, Zea mays
  misc_feature (5)..(13): n is a, c, g, or t
  misc_feature (15)..(20): n is a, c, g, or t
  misc_feature (32)..(34): n is a, c, g, or t
  misc_feature (63)..(64): n is a, c, g, or t
  misc_feature (82)..(83): n is a, c, g, or t
  Peptide Sequence Number=SeqID_13031
  Probeset Number=SeqID_22129
tttannnnnnnnnannnnnngtcttcctttgnnnttccttagtccaccaccacgccattaatnncggaagcccctaaagccnnccccttcccggagaaccaccgtgaagagatggatgccggagctactttcgtccttcagtcaaaaggtaactctgtgatatctaaccaacacgcacacacattgtgtggttgtgatgatggttttatgatgttgtacattttttatttatggtttaggtcaatggtggcatgccggtttccatttatcaacggcgattgttggtccaacaatactgacattgccgtatgcattcagagggttggggtgggagcttgggctcttctgtctcacggtgatgggggtggtcaccttttatgcctattacctcatgtccaaggtgcttgaacattgtgaaagagcaggtcgccgccacatccgtttccgggaacttgctgccgacgttttaggtgaatgctatttatttactctcggaaaatgatcatttaatatcccatattatagttgtatttctctgtacatgtatatatctaaaaaaaataagactatgatattcttgattatcaaagttttattcagaattttaatattctctatatctctatac

SEQ ID NO: 7727 - DNA, 753 bp, Zea mays
  misc_feature (66)..(66): n is a, c, g, or t
  misc_feature (490)..(490): n is a, c, g, or t
  misc_feature (492)..(492): n is a, c, g, or t
  misc_feature (524)..(524): n is a, c, g, or t
  misc_feature (538)..(538): n is a, c, g, or t
  misc_feature (547)..(547): n is a, c, g, or t
  misc_feature (584)..(584): n is a, c, g, or t
  misc_feature (592)..(592): n is a, c, g, or t
  misc_feature (602)..(602): n is a, c, g, or t
  misc_feature (605)..(605): n is a, c, g, or t
  misc_feature (639)..(639): n is a, c, g, or t
  misc_feature (651)..(652): n is a, c, g, or t
  misc_feature (657)..(657): n is a, c, g, or t
  misc_feature (662)..(662): n is a, c, g, or t
  misc_feature (665)..(665): n is a, c, g, or t
  misc_feature (670)..(671): n is a, c, g, or t
  misc_feature (675)..(675): n is a, c, g, or t
  misc_feature (677)..(677): n is a, c, g, or t
  misc_feature (688)..(690): n is a, c, g, or t
  misc_feature (692)..(692): n is a, c, g, or t
  misc_feature (697)..(697): n is a, c, g, or t
  misc_feature (699)..(699): n is a, c, g, or t
  misc_feature (702)..(703): n is a, c, g, or t
  misc_feature (705)..(705): n is a, c, g, or t
  misc_feature (707)..(709): n is a, c, g, or t
  misc_feature (716)..(719): n is a, c, g, or t
  misc_feature (722)..(722): n is a, c, g, or t
  misc_feature (724)..(724): n is a, c, g, or t
  misc_feature (726)..(728): n is a, c, g, or t
  misc_feature (732)..(735): n is a, c, g, or t
  misc_feature (740)..(740): n is a, c, g, or t
  misc_feature (744)..(744): n is a, c, g, or t
  misc_feature (747)..(751): n is a, c, g, or t
  misc_feature (753)..(753): n is a, c, g, or t
  Peptide Sequence Number=SeqID_13032
  Probeset Number=SeqID_22130
aggttgcccgtgagacaaaggtacgccggaaactggtaaaggaaagggccaggctgaaaagggccncggtcaaaaatccgcaggccagaatcaaagttaaccggggggatttgcccgtaatcaagctgggtaatgcgcgggttgtcctttcgcgccgcaggcgtcgtaaaaaggggcagcgttcatccctgaaaggtggcggcagcgtgcttgtggtgggtaaccgtcgtattcccggcgcgtttattcagcaactgaaaaatggccggtggcatgtcatgcagcgtgtggctgggaaaaaccgttaccccattgatgtggtgaaaatcccgatggcggtgccgctgaccacggcgtttaaacaaaatattgagcggatacggcgtgaacgtcttccgaaagagctgggctatgcgctgcagcatcaactgaggatggtaataaagcgatgaaacatactgaactccgtgcaccgtctggatgcactganancatgacaccgggcacgtttttgatggcccccntgttttgatgagcngatttccgnagtgcgttatctaccgcctgatcccgcgagactgacncatcctgntgcgactctntcnagtttctgcttaggtccgataaactgtctgatgntccgatttccgnntacantccgnctnaatanncatngngatgtttatcnnnanaaatngntgnnanannntttattnnnnagntncnnnacannnnagtgnactnttnnnnntn

SEQ ID NO: 7728 - DNA, 489 bp, Zea mays
  Peptide Sequence Number=SeqID_13033
  Probeset Number=SeqID_22131
atgtccggtggtgcaccggacactgtccggtggcacaccggacagtccggtgcgccagaccagaggagccttcggtgtaaacctaattccctttcacacaccccgcgggagtctcatttcacctctctcaagcgggtcctgcgctacctctgggggttcctcgactacgacctcctacttcgaccattcccgacgtcagaactcgagggctacaccgacgccgactgggctggctgttcagacacgcctcgatccacctacggttacttcgtgttcttgggcgccaacctcgtcacctggaccgccaagcggcagcccgtcgtctctcgctccagtgctgaggccgagtaccgcgccgtggctaacggcgtggcagagacctcctggctgcgacagcttctgcacgagctccacagtccactccagcgcgccaccctcgtctactgccacaacgtcagcgcggtctacctctccaccaatcttgtgtag

SEQ ID NO: 7729 - DNA, 625 bp, Zea mays
  Peptide Sequence Number=SeqID_13034
  Probeset Number=SeqID_22132
ccggccggggactgtctgccagtggacgcgagggagcgcctccgcctcatatccaacccccaccgatgcgagctccggcgatgctccggtgggccgggggggccctcgtaacacatcctactggccttaatagagcgcggtggtcatacctaacctgcgctggatcatatgtgaaggataacagggacccaatcatatgcgcatctgtctcatcttatgaaaggagatctgacacatggatactcatgaaccatatccttttgtgcccttcaatgactgttagcggcggcataaatgttccagtgatgcggaccccggtctgtgctaatgctactgctgagaaaggaggcaagaacttcatgatcgattatcatgatgggtcggcggttcagctgctgttgcgaatactgatgctgctgccatcgagcgtgtgaagctgcttattcagaaccaagatgagatgattaactctggtaggctatcagagccgaacaaggggattgatgactgctttaaacgtaccattaatgatgatggtgtctcttccttggggaggggcaacactgataatgataattagtacttcactactaaggctttgaactttgcatttaaggactacttg

SEQ ID NO: 7730 - DNA, 883 bp, Zea mays
  misc_feature (604)..(604): n is a, c, g, or t
  misc_feature (619)..(619): n is a, c, g, or t
  misc_feature (632)..(632): n is a, c, g, or t
  Peptide Sequence Number=SeqID_13035
  Probeset Number=SeqID_22133
tgcatgcctgcagctcagcagccggtgccgccgacgctcgcgcacacgcggacgccgtgcagcgcgcatatcgcgagtaccaggaaaaatcgctcggccgcacgggcctgcgcaagatgtacatcggcacgctgacgctcgcgctgttcctcgcgaccttcatcgcgatgatgctcgcgctcgcgctcggccagcagctcgcgcggccgctgttcctgctcgcgcagggcacgaaggagatcacggaaggcgactacacgccgaagcgcgagatcaaatcgcgcgacgagctcggcttcctcacgcagtcgttcaacgcgatgacgcgccagctgtccgaggcgcggctcgcagtcgagaagaaccggatcgcgctcgaacattcgaagacgtatctcgaaagtatcctcgcgaacctcaccgcgggcgtgttcgtgctcgaccgccagttccggctgacgacggccaaccgcggcgccgaacgcatcttccggcagccgttcggttcgatgatcggcacggcgctcgaccggatcggcgtcgtcgcggagttcggcgcgatggtgcgcaaggcgttcgccgatcgcgaagcggcgtccgacgncggcagcggcgatcncggccactggcancagcagtttgcgatcgaagtgcccggcgaagccgatccgctgacgctgctcgtgcgcggcacgcgcctcgtgtcgacggtcgaaggcgaggccgacgatccgcagacgtccggctatgtcgtcgtgttcgacgacatctccgacgtgatttccgcgcagcgttcggtcgcctggggcgaggtcgcgcgacggctcgcgcacgagatcaagaacccgctgacgccgatccagctgtcggccgagcggctgca

SEQ ID NO: 7731 - DNA, 776 bp, Zea mays
  Peptide Sequence Number=SeqID_13036
  Probeset Number=SeqID_22134
ctgcagtcgtcgtccaaaccacccagatcgagtcacggcgctgtacctggctaacctcggcctgtccgggccgattccagcctccctcggaaacctatcctttcttagcaacctgaccctatccacaaactacttctcgggcgggctgcctcccctcaaccgtctacggcggcttcaggtcgtcgacctgagaaacaaccagctccaaagcaccatgtccgatgccgtcacaaacttgcctcccgataatctagtggcattagacctgtctgaaaactttataacaggtgaggttccttccagtctggggcttctgttcaagaagctattcttcgtccaactcgccaacaatgctcttaccggaagtatcccaccaaacctgaaaaacgccagccagctaaaattcctcaatcttgcaaacaacaacctgacaggaagcattcctagtgagctcggggagctctcgagtatgctatacttatttctcggtgggaatatgttgtcaggtggaatcccgggcaccctcttcaacatgtcttctctcgcgatactagacgttgctgtgaacatgctaggcggcgtcatggagttcccgccttatattagattctcccctattctttcggcgatcaatatgtctcaaaacctattcgagggggatattccacctgccttgggcaatgcttcaaacctaatcatgctagatatgtcacagaacaagtttacaggccaaatccctgcttctcttggcaatcttgaggcactgacctatctaa

SEQ ID NO: 7732 - DNA, 415 bp, Zea mays
  Peptide Sequence Number=SeqID_13037
  Probeset Number=SeqID_22135
tgcaggaacgcctgatcgccgacacgccgcgctgccgatcatcttcgtcaccggccacggcgacgtgccgatggccgtgtcgacgatgaaaaagggtgcgatggactttatcgagaaaccgttcgacgaggccgagctgcgcaagctcgtcgagcggatgctcgacaaggcccgaagcgagagcaagagcgtccaggaacagcgcgccgcgagcgaacggctgtcgaagctgaccgcgcgcgagcagcaggtgctcgagcgcatcatcgccggccgcctgaacaagcagatcgccgacgatctcgggatcagcatcaagacggtcgaagcgcaccgcgcgaacatcatggaaaagctcaacgtcaacacggttgccgatctgctgcgcctcgcgctgtcgaagaagcaggcctga

SEQ ID NO: 7733 - DNA, 677 bp, Zea mays
  Peptide Sequence Number=SeqID_13038
  Probeset Number=SeqID_22136
tcgaagccggccgggccgggagagcacacacatacacaatgacaatcgcatctctagcaatggattctgaggatgtccgtcctaacgacgccgagctactaaaggaacaagccgacatatggggtgtcactctctcctacctcactcccctgacactgaagtgcgccgaggagcttgctatccctacggcaatctaccgccatggcggggctgcctcacatcgctgagctggtcacgcgctgtctctcccctccactaagctgccgatcctccgccgtctgctgtggttcctcgccgcgatgggcgggctcagcgtcgaccaacacagctcgaaggaagatcggtaccacatcaatcccgagtcctacctcctggaggacggaatacctcacgaggaccacatgaaccacagcgtgtctgtggctcacctgcacctcgactatctacatcaaggatatgatagatgtgtacccagagatcaagagggacgaggtcacgacaccgctcgaggagctgcacgtggcgactctgttccacgatagcatggcgagcctcgacacagatttccacgacatggccagcgaggacttggacgcccacgacaacttcggcatcgagatagctatgcgggagatcatggacttgctgcgaggggatccagaccatgacctactgct

SEQ ID NO: 7734 - DNA, 476 bp, Zea mays
  Peptide Sequence Number=SeqID_13039
  Probeset Number=SeqID_22137
tgcaggtggtaaaaaacgccacgcccaccgaggccgggctacagctgttaccgctgatgggcgggctgctggtcacctcgatcattagcggtcgcatgattagccgcagcgggaaataccgtttgttccccatcgccgggacgctactggccacaaccgggatggcgctgatgaccacgctgacactggatgcgccgctctggcacatttatctgttctccagcgtgctcggcatgggaatgggcatgactatgcaggtgctggtgctggcggtgcaaaatgcggtgacgcccgatcgcatcggcgtagcgacctcatcggttacgctgtttcgctcggtgggcggttcgatcggcgttgcgctgtttggcgctgtgttcagtcacgtgctgaaatccggagcgacccgactgatagagcagggtaacgtgctgccgccttcgctggatccggtcgccgtgaaccatttgcctgca

SEQ ID NO: 7735 - DNA, 834 bp, Zea mays
  misc_feature (2)..(4): n is a, c, g, or t
  misc_feature (12)..(12): n is a, c, g, or t
  misc_feature (628)..(628): n is a, c, g, or t
  misc_feature (685)..(685): n is a, c, g, or t
  misc_feature (700)..(700): n is a, c, g, or t
  misc_feature (706)..(706): n is a, c, g, or t
  misc_feature (708)..(708): n is a, c, g, or t
  misc_feature (711)..(711): n is a, c, g, or t
  misc_feature (738)..(738): n is a, c, g, or t
  misc_feature (746)..(746): n is a, c, g, or t
  misc_feature (754)..(754): n is a, c, g, or t
  misc_feature (769)..(769): n is a, c, g, or t
  misc_feature (788)..(789): n is a, c, g, or t
  misc_feature (793)..(793): n is a, c, g, or t
  misc_feature (796)..(796): n is a, c, g, or t
  misc_feature (798)..(799): n is a, c, g, or t
  misc_feature (806)..(806): n is a, c, g, or t
  misc_feature (810)..(810): n is a, c, g, or t
  misc_feature (812)..(812): n is a, c, g, or t
  misc_feature (818)..(822): n is a, c, g, or t
  misc_feature (824)..(824): n is a, c, g, or t
  Peptide Sequence Number=SeqID_13040
  Probeset Number=SeqID_22138
gnnnatgttgcnttggtccggcccccctcgagcagaaaatgctgccggaactgcaaccgtacactcaggagcgggcagaaaaactgattgatttattgcagtcgaaaggcaccaccattgcccgcagccactgcaatatcgaaccggtttccggcctgaaaaatctgcaaaatttgcaggcggtgctggcgcgacgtcaggcgggctttgagtgtgaaatcgtcgccttcccgcagcacggtttgctgctgtcgaaatctgaacctttaatgcgtgaagcgatgcaggcgggggcgcattacgtcggcggcctggacccgaccagtgttgatggcgcgatggaaaaatccctcgacaccatgttccagattgcgctggactacgacaaaggcgtcgatattcacctgcacgaaaccactccggcaggcgtggcagccatcaattatatggttgaaacggtagagaaaacgccacagctgaagggcaagctgaccatcagtcacgcctttgcgctggcaacgctcaacgagcaacaggtagatgaactgcgaaccggatggtggtgcaacaaatttctatcgctcacggtgccgattgcacctgatatccgtcaaacagtgcacacaangcgtaaaagtgatactgcactgcagcgtatcaccatgtcgcttatggctggcacatntgaaaaaccatctgncgccantnttntctctacaaaaacttccgtctgtttancctggatnttccttantaaaggactgtggcnaacccgagaccctttttgnngccnttntnnggggggntttnanaaaaannnnnangggggggggg

SEQ ID NO: 7736 - DNA, 1411 bp, Zea mays
  misc_feature (28)..(28): n is a, c, g, or t
  misc_feature (56)..(56): n is a, c, g, or t
  misc_feature (81)..(85): n is a, c, g, or t
  misc_feature (104)..(104): n is a, c, g, or t
  misc_feature (111)..(122): n is a, c, g, or t
  misc_feature (142)..(142): n is a, c, g, or t
  misc_feature (148)..(148): n is a, c, g, or t
  misc_feature (155)..(155): n is a, c, g, or t
  misc_feature (233)..(233): n is a, c, g, or t
  misc_feature (235)..(235): n is a, c, g, or t
  misc_feature (237)..(237): n is a, c, g, or t
  misc_feature (246)..(246): n is a, c, g, or t
  misc_feature (330)..(330): n is a, c, g, or t
  misc_feature (385)..(385): n is a, c, g, or t
  misc_feature (464)..(464): n is a, c, g, or t
  misc_feature (513)..(513): n is a, c, g, or t
  misc_feature (529)..(529): n is a, c, g, or t
  misc_feature (611)..(611): n is a, c, g, or t
  misc_feature (1313)..(1313): n is a, c, g, or t
  misc_feature (1340)..(1340): n is a, c, g, or t
  misc_feature (1359)..(1359): n is a, c, g, or t
  misc_feature (1369)..(1369): n is a, c, g, or t
  Peptide Sequence Number=SeqID_13041
  Probeset Number=SeqID_22139
tatgaagagggggacaagagtgacaggngcgcggagggggtgtgcgggacaggganagaagaaaggttagaggaaggagtnnnnnctttaccctacccgaaaanggggggnnnnnnnnnnnnttcccaaaaaaagggggggngagggnggggagnaggggggggaaagagagaagagggagaggaggggagtgtgttgggaaggaggagaagagagaggaggggaggagaggngngnaggaggganaaagaaaaggaggagaggggagggggaagggagaggaaagaggaagggggggaggagggggagaaagaagaaagggagaaaggnggggagagaggaaaagaagagaggaaaggaggaaggagagggaggagggagaggnggaggagaaagggggaggagggaagaaatggaggaagggaatgagaaagggagaaaagaaggagaagagaaggagagangaggaagaaaagagagaaaaggttgtttgttttgatgagagaggagganggagagagagaaaganaagagagagggaaaggtgtggggaaggaggggaagaggtagagatagtaagagaggagaggggaggagaatgagaagatagnagagaggtgagaggtgggagggaggagagaggagagagtgggggaggggaggagaaggaagggaagagagaaagagagtgagagaatggttagagaaaaaatggaagaagaggagtgagagggggaggaagagagaggaggaggaggagaggaaggagggaagaggaggtggagagagaagagaagagaagggatgagtagaggagaagtgagaagagtggatggagtagagaagaggagagagagtgggagagtgaggagagagaatggaggggagagtaacgcagcatactgtgaagcggtaaggaggaagagagaggtaagggtgaagaagaggagaaggaggaagaaccaaaccaggagagggggcggaggagggagagtgagggggagtacgacgaagaagcagagaataagagaggagagagagagagaggaagagaacgaaacggagaaagaagaggaggaagacatgaaaaaagggccagcggcgtagaggacagaagagaggggacagcactagggggatgagggagaggtaggaggggagaggaacgagagcagagcgaggagggaggcggaaaggtggaataattagggaggcagcgcagtgtggagtgtggagaagagaaagccagagagaacgaggatggagcataagagggagatggagtagtgagagcagagcgagaggggagagtntgaacgacagaggggagaggaagggangagagatgagcgatgaganagagaagtgnaggaggatagagagagggaaggtcaggacgatacagaggagg

SEQ ID NO: 7737 - DNA, 693 bp, Zea mays
  Probeset Number=SeqID_22140
gccggccgggtcgggatcatcaccatgtgaactaccagacctcaacacgtccaaatacgaaagtctcaaatgtctgtgactactgagtagagccgccgcttcgttcttgtcgagagcacaatagaggaaatggcgttgagcgagggcgtgatcctgtggatggagaaccccctcctcgacatctccgcggttgtcgatgacgccttcctggcaaactatgacatcaagctgaacaatgccattctcggtgaggagaagcacttgcctatgtatgatgacctggctaactacagctgtgatgaatatattgctggaggagacacccaaaactctatcagggatggccaatggatgcttcataactcctggtgtcaacaagtgtacctgagatgtattgtgaagctccagcgaggtgatgagatgaaaaaaaatgctcaagctgcaggacgtactgctcatgaccatgacgatgatactgctcctactggcacttgtgctgcatgtgaagctgatggtgataggccattagattgtaatctgcctgcggtaatgtgatacaaatctgaggatctcaagagaccagataactgattactagctgagaaggcaaaatacatctacattggtggattcctgctcacggtgtcacctgattctatccagttagatgatgagcatgctgcgtcaaataac

SEQ ID NO: 7738 - DNA, 1834 bp, Zea mays
  misc_feature (29)..(29): n is a, c, g, or t
  misc_feature (31)..(31): n is a, c, g, or t
  misc_feature (37)..(37): n is a, c, g, or t
  misc_feature (45)..(45): n is a, c, g, or t
  misc_feature (55)..(55): n is a, c, g, or t
  misc_feature (58)..(59): n is a, c, g, or t
  misc_feature (61)..(63): n is a, c, g, or t
  misc_feature (65)..(69): n is a, c, g, or t
  misc_feature (90)..(90): n is a, c, g, or t
  misc_feature (103)..(103): n is a, c, g, or t
  misc_feature (110)..(110): n is a, c, g, or t
  misc_feature (113)..(113): n is a, c, g, or t
  misc_feature (117)..(120): n is a, c, g, or t
  misc_feature (122)..(123): n is a, c, g, or t
  misc_feature (132)..(132): n is a, c, g, or t
  misc_feature (134)..(134): n is a, c, g, or t
  misc_feature (136)..(136): n is a, c, g, or t
  misc_feature (139)..(140): n is a, c, g, or t
  misc_feature (142)..(160): n is a, c, g, or t
  misc_feature (168)..(168): n is a, c, g, or t
  misc_feature (170)..(171): n is a, c, g, or t
  misc_feature (178)..(178): n is a, c, g, or t
  misc_feature (182)..(182): n is a, c, g, or t
  misc_feature (184)..(184): n is a, c, g, or t
  misc_feature (193)..(193): n is a, c, g, or t
  misc_feature (195)..(215): n is a, c, g, or t
  misc_feature (221)..(221): n is a, c, g, or t
  misc_feature (303)..(303): n is a, c, g, or t
  misc_feature (328)..(328): n is a, c, g, or t
  misc_feature (360)..(360): n is a, c, g, or t
  misc_feature (367)..(367): n is a, c, g, or t
  misc_feature (397)..(397): n is a, c, g, or t
  misc_feature (454)..(454): n is a, c, g, or t
  misc_feature (521)..(521): n is a, c, g, or t
  misc_feature (545)..(545): n is a, c, g, or t
  misc_feature (583)..(583): n is a, c, g, or t
  misc_feature (601)..(601): n is a, c, g, or t
  misc_feature (689)..(689): n is a, c, g, or t
  misc_feature (695)..(695): n is a, c, g, or t
  misc_feature (717)..(717): n is a, c, g, or t
  misc_feature (896)..(896): n is a, c, g, or t
  misc_feature (993)..(993): n is a, c, g, or t
  misc_feature (1014)..(1014): n is a, c, g, or t
  misc_feature (1099)..(1099): n is a, c, g, or t
  misc_feature (1211)..(1211): n is a, c, g, or t
  misc_feature (1337)..(1337): n is a, c, g, or t
  misc_feature (1415)..(1415): n is a, c, g, or t
  misc_feature (1455)..(1455): n is a, c, g, or t
  misc_feature (1462)..(1462): n is a, c, g, or t
  misc_feature (1540)..(1540): n is a, c, g, or t
  misc_feature (1643)..(1643): n is a, c, g, or t
  misc_feature (1654)..(1654): n is a, c, g, or t
  misc_feature (1656)..(1656): n is a, c, g, or t
  misc_feature (1765)..(1765): n is a, c, g, or t
  misc_feature (1771)..(1771): n is a, c, g, or t
  misc_feature (1773)..(1773): n is a, c, g, or t
  misc_feature (1794)..(1794): n is a, c, g, or t
  misc_feature (1796)..(1796): n is a, c, g, or t
  misc_feature (1824)..(1824): n is a, c, g, or t
  misc_feature (1826)..(1826): n is a, c, g, or t
  misc_feature (1834)..(1834): n is a, c, g, or t
  Peptide Sequence Number=SeqID_13055
  Probeset Number=SeqID_22141
taggtgggcggtgagaagtgagactactncncacatntcagaggnggcgtgagcncanncnnncnnnnngcagaggaagagagatagcgncacggcaaactgnctagatnggnacgnnnnannaaggaacanananaannannnnnnnnnnnnnnnnnnnttttacantnnccgagcncgananaggaggagngnnnnnnnnnnnnnnnnnnnnnttatancacacaacacaacaaaggagagaggagagaagaggagagagagagagaaaagaggaaaagagaagagaggagaagagagagngagcagcgagaagagaagaggcagngaggacacgacacgagaaggagagagaggagngacaggnggcaagagagaagagagagagagacagaangagcaggcaggcgggggagaagcagagcgaagaggaaaggaggaggaggagcagggncggcggcgagagagagaagacgagggacgggacgggagcacgaggagcaggacgggaggggacaggnacgacgaaggagaggagagagagngagaggaaggaaggagagggagaggagacgagacaagnaggagagagaaggaaggngaagcggaacgacgacgagacgcagcgagccagagaggggagagagagacagagagaggagagaggagcagggcacgaggaagagagncggcanagagagaaggcgagagaggagnagagaggggacgagagagggcgagagagagagaaggagggaaggaagagagggacgagaggaggacaaaggcgggagggagcaagggaagaaggaggaaagaggagagagagaaagaagacaacgagagcgggcgaggagagagagaggaagagaggagagggagagacgggagagcgnacgaagcagagcagaagagcagcgggagggagaaggaagagacaaagagtgaggaggagcaagaagcaaggcacgagaaggagaggaagggaaaggnagagggaagagcgggagagangagagagtaggagaggagcggaaaagagaagaggagaagagagagagagaagaggaagaagaaaagagaaggagaaaagtgacangagaacgaggagaagaaacgaaaagagagagtgtgagagtgtaatgaggaatagaggaggagcaggagagagagagtcagaggacgggagagcaaggagagcgagggtaganacgatgagagcaggaaagcgaacgacggagaaaggccagagaacgagctgtaagcgagaaacgaaacgaggaacacaggcgtgaggaagggacgagcggagtacgaggagagagagaacagaacangagggagaggaaggagaaggagtgacagcagacgtagataggtatagacgacacggagatgaagagagcgagatgtanaggtagagaatgtataacgcagtgagaagaaggagggtancggagancaggcgagagtgagggaacgaggcgagaagaggaggaggaaggagggagcacgtagattaggagatagaacatatagnggatagtgacacaaaggagagggcgtgcgagacgtagctagaacaacaaggacgcgagcagatcggagcacagtgaagtagcgcataaggaatcaggagttanagacatagagngnagagggtatgggagctcacgcggagcgcaatgaggagagcgagagagagtatgtaggtagtgcgatggagcgcgatacaatcgtcacggagataggcgagcgagaagancgtgangngacatgtgagaagaatgagangngcgacggatagtagagagagacgagacngngatcagan

SEQ ID NO: 7739 - DNA, 786 bp, Zea mays
  Probeset Number=SeqID_22142
cctcgaggccggccgggccacttttcttgggagcctctctcagacgtgcctcgtcacatcctacgatagaaagctctctctgctcgcaggtcgcagccatggccgaagaacgtacccgattcgtgagccgccgagtacagagcaggatgaagaagaagggcaggcggaagctccgagccctcatcgccgaggagagctgcgacccggtcatgctccgcctcgcggggcactccgcggggacgctcgacgcggcctcgaggaccggcgtgccattcggcacggtgaagcatcaggaggaagtggctcacggtgctaacgcggggcaggacatcgcggcgcgagctgctcgagcccatcgaggattagttcccaagcctctcttacgacgatgtctaccagctcgcgggagctgtggccgaggaggtcaccggagggcctgagattgccttccaccccgggagggaggacaagcctcagaccccacctgagggacgccttcctgatgccactatagggtctgaccagctgaggcaagcttttgggaagcagatgggcttgagcgatcaggacattggtgccctctctggcgcgcacaccttgggaaggagccacagagagcgatgtggtatcaagggggcctggactacgaaccctttgagctttgacaactcttacttcaaggaacttctgagtgatgataaggacgcgcttcttcagctcccaagtgacaaagtcctgctgagcgacgctgacttccgccctcttgacaagaatatgctgcggatg

SEQ ID NO: 7740 - DNA, 686 bp, Zea mays
  Peptide Sequence Number=SeqID_13056
  Probeset Number=SeqID_22143
gccggactatgtacgtaaggagggagaaaagagtgatatcttggcgtcctccgcgttcctcagcgctctcgacctccgagcgccatcaccggcgctctcgccctctgctaaccgtcagaggcgagagaggccgcggcagtcaaggagcacttaaaggactatctgtacggcacgaaaagctgcctgcgggcgtccagagagtcgcggaccaaagtgctgcagctcatcacgcaactcgagacgctcaaccccacgccggctcctacggaggtgcttacgctcctcaacgggaagtggatcctcgcgtacacgatcattttcccacctattcccactattgaggatggtgaatctgcctcatgctgctgaaggtgcaggaaatatcacaaaccattgattctgagaacttcacagtgcaaaactgtatcaagatttcacgaccgttgtctacgacctcagttgccactagtgctgaatttgaaattatagagtcccaagcgtcgtgcagatcgaaatttgatgaaaggactgttgacacaccacagtagaccgactccattgtgctaccacagaagtttgagttatgtggacagaacatcaacctgagtccactgaaaggtatattatcttccatcaaaaatgcagcgtcctcgggtgttcagaccatatctgatcagactccgatc

SEQ ID NO: 7741 - DNA, 793 bp, Zea mays
  Peptide Sequence Number=SeqID_13057
  Probeset Number=SeqID_22144
tcgaggccggccgggatctcatttcccatcgaccttcaagtctcgctatgtaaaaaagaatgccgccgatcacccattggacttgcactaggcggttgctcataattactagtctcttcacgaaacaacaaacaatgggaccgaggctagcgtgtctcctaactctggccatggcagccatcgacgtggcgccgtgcacggcccagaactcgccgcaggactacgtggacccacacaacacggcgcgtgccgatgtggccgctggcccggggtcctgcgacgacaccgacgccgcatacgcccagagataaccggtgcaacgccagggcgattgccagctgatccactccggtggcccctacgcggaaaacctcttctgggcatccgccgtggcccattgtgcggggtctcacgtcggggtttcctgagtggctcagaagcagtactacgaccacgacaccaaccgttgggcgtaggggcaggtgtgcgaccactacacgcgaggggacgggactcgattccaccgccatcgcttgtgcccgcgtagactgcgataacaatgtgggcgtgttcatcatctgtagttacaacccgccgaggaatagtcgtcggcgagagccctactagactgtcatgcatactacaattatatatatatacgcttaatattaacttcagcatgcatgcatattataaaatagtgttggcaactctgtatatcattatattacgatgactgatattgctgatgaacataataagtcaataaaaccatgcaggcgatttgtgagcc

SEQ ID NO: 7742 - DNA, 706 bp, Zea mays
  misc_feature (6)..(10): n is a, c, g, or t
  misc_feature (21)..(22): n is a, c, g, or t
  misc_feature (25)..(27): n is a, c, g, or t
  misc_feature (656)..(657): n is a, c, g, or t
  misc_feature (665)..(667): n is a, c, g, or t
  misc_feature (669)..(670): n is a, c, g, or t
  Peptide Sequence Number=SeqID_13058
  Probeset Number=SeqID_22145
ggacannnnntccatatgacnnaannnacattacaataaagaatgttacaatattggctcctacatttgaagctccaaatactgatggcatagatcctgactcttgtgaggatatgttgatagaggactgttacataagtgtgggagatgatgcaattgcaataaatagtggctgggatcagtatggaattgcttatggaaagccttccatgaatataatgatccgaaaccttgttgttcgatctatggtcagtgctggcatctcaataggcagcgagatgtctggtggggtatccaatgtcactgtggagaatcttcttgtatgggattcaaggcgtgctgtaaggatcaaaactgcacctggaagaggtggatatgttcgccaaataacttatcggaatctaacatttgagaatgtccgtgttggaattgttatgaagacagattacaatgaacaccctgatgatggatatgaccctactgcacttccaataatcagagacatcagcttcaccactgtccatggccacggagttcgtgtaccggtacgtattcatggtagtgaagagatctctgtcagaaatgtaacttttcgtgatatgtcagttgggttaacctacaagaagaagcatatctttcagtgtgcctttgttganngccgtgtnnnanngaccatctttcctgctccatgtgagaaccttgatcg

SEQ ID NO: 7743 - DNA, 693 bp, Zea mays
  misc_feature (643)..(645): n is a, c, g, or t
  misc_feature (679)..(681): n is a, c, g, or t
  misc_feature (691)..(691): n is a, c, g, or t
  Peptide Sequence Number=SeqID_13059
  Probeset Number=SeqID_22146
ggaggctggtggccttgccaaacgcagaatcggcggcaggaattgtcaccgcaagcacgtcgaagacgggtgatcttctaaattgaattttcaatcccatctcttccttatcttaatttgtaccaaccaaccactgcacagttgtatagtacatagtatcattgattgatcatgtgtgacaacaagggtaatagcgagggtcactcgactttgctccttggcaagtacgagctgggccgcgtgctgggtcatggaactttcgcgaaggtgtatcacgcgaggaacttgcagacggggaaaaacgtggcgatgaaggtggtgggaaaggagaaggtaataaaggtagggatgatggagcagataaagagggagatcgcggtgatgaagatggtgaagcatcccaacatagtggagctccacgaggtaatggccaccaaatccaagatctacatcgccatggagctggttcgcggcggagaactcttcaacaaggtcgccaagggccgactgaaggaagacatcgccagagtctactttcagcagttgatctccgccatcgatttcttccacagccgcggcgtttaccaccgcgacctcaggcccgagaacctgcttctcgacgaacacggcaacctcaaagtcnnngacttcggcctcagcaccttctccgaacacctgnnncaggacggcntg

SEQ ID NO: 7744 - DNA, 709 bp, Zea mays
  misc_feature (643)..(645): n is a, c, g, or t
  misc_feature (658)..(658): n is a, c, g, or t
  Peptide Sequence Number=SeqID_13060
  Probeset Number=SeqID_22147
ggggaactctaattcttggtaaacttctggagtctccaccctcactctgtacggtccaaacaccaaaccctaatcctaatcctaaccctaaccaaacatcctcttcccggcagccacatcgacacaaacctaggacttcaaccaactcagaatccttcatatttttcccattgtaactatatataatattttttatgccgataaaagatgccgcctaagcagaaatcaaaagctgatgtagcaaagaagcagaaggttgtagaagacaaaaccttcggtctcaagaacaaaaacaaaagcaaacaggtccagaaatatgtccaaaacctccaacaatccgtgcaacccagacccgatgcttccaaagtcgatgccaagaaaaggaaggaggaggagaaggccaaggacaaggagctaaatgatttgttcaaaattgctgttagtcagcctaaagtgccagttggtgttgatcccaagtccatattatgtgagttttttaaagtggggcagtgtgccaagggcttcaaatgcaagttctcacatgatttgaatgttcagaggaaaggggagaagattgatatatacagtgataagcgtgaccaggaaacaatggaggattgggatcaagagaccttggagaagnnngtggagtcaaagnaaactgagtataatcaaaacaaaccaactgacatagtctgtaagcactttt

SEQ ID NO: 7745 - DNA, 716 bp, Zea mays
  misc_feature (706)..(707): n is a, c, g, or t
  Peptide Sequence Number=SeqID_13061
  Probeset Number=SeqID_22148
gacagttacaagtgacagtgtgtgtcagagcaaagctagagagagagagagagagagagagatggcgtcgtggtgtgctgcaaggaccttccaaattccgggcatgaacgtcgccgttctgcgccgccgggcttcatgggcctccggaataggcggtgtttcggtggccggcaccgccatgtggcgttgctctccggctaagtgcatgagcatttctactgatacaaggatcagggaagctgttcagactgagaaggctccagcggcattggggccatattctcaagcgatcaaaaccaatgaccttctgtttgtgtcgggtgttcttggtcttgttcctgagacagggaagttcatctctgataatgttgaagatcagacagagcagcttctcagaaatatgggggagatcctaaaagctgggggtgccagctactcatcagttgttaagacaacaattctgttggctgacttgaaggacttcaagcaagttaatgagatctatgctaaatactttccttcacctgccccggctcgttcaacatatcaagtagctgccttgccattggatgccaagattgaaattgagtgcatagcagcactgtgagcaccacttctagtggtatacatggctagtgaacccactgagaaggactctaattctcagattctttctcaaggtaatttgtccattaaaaatgaaacnnattaagaga

SEQ ID NO: 7746 - DNA, 714 bp, Zea mays
  misc_feature (636)..(638): n is a, c, g, or t
  misc_feature (713)..(713): n is a, c, g, or t
  Peptide Sequence Number=SeqID_13062
  Probeset Number=SeqID_22149
gaccctttaaacctaacttctctctctctctctctctccccccccactagaatccaccttctctttctctcgttcatcgatcatgtcgaacttcaagagcaagtaccatgatgagctcattgctaatgctgcatacattggcacccctggcaagggtattcttgctgctgatgagtcaacaggaacaattggtaagcgtctagccagcatcaaagtagagaatgttgaatccaacaggcgtgcccttcgtgagctccttttcaccgctcctggagctctccaatatctcagtggagttatcctttttgaggaaaccctttaccagagcacagctgcaggcaagccttttgttgatgttttgaaggaagctggtgtgcttcctggtatcaaggttgacaagggcactgttgaacttgctggaactaatggagaaaccaccactcagggtctagatggccttgctcagcgttgccagaagtactatgaagctggtgcacgctttgccaaatggcgtgctgtgcttaaaattggtcccaacgagccatctcagttggctatcaatgagaatgcctatggtttggctagatatgctgtcatatgccaggagaatggtttggttcctattgttgaacctgnnntccttgttgatggacctcatgatattcacaagtgtgctgatgtgactgagcgtgtccttgctgcatgctacaagnc

SEQ ID NO: 7747 - DNA, 667 bp, Zea mays
  misc_feature (440)..(441): n is a, c, g, or t
  misc_feature (464)..(464): n is a, c, g, or t
  misc_feature (551)..(552): n is a, c, g, or t
  misc_feature (577)..(577): n is a, c, g, or t
  misc_feature (604)..(611): n is a, c, g, or t
  misc_feature (622)..(625): n is a, c, g, or t
  misc_feature (627)..(628): n is a, c, g, or t
  misc_feature (630)..(630): n is a, c, g, or t
  misc_feature (663)..(664): n is a, c, g, or t
  Peptide Sequence Number=SeqID_13063
  Probeset Number=SeqID_22150
gaattgacttttgaactacttcccttccatacaagaaactataacctctcccaattagaaatacccacaactacatatatcaaaatggcgtctgtaaggaaagaggtactcagcaaggtgcacaagatgataccgcctatgcttgagagcttccataaaggtcagctcggtcgtgttggtgtcattggtggcagtgaggattacacaggtgcaccatacttctctggtatggcttcagcaaggcttggttgtgatatgtcccacgtgatctgtgaacccggcgctgccgcagtcatcaagacatactctcccaacctgatggttcacccatacatgcgttcctccaagcacttagacgacaaagacacccaagactctgtcagcgaaatggtcatcagcatgctttcccgtctacacgtccttgttattggccctggtcnnggtcgcgatgaagccatgcaagngacttgcgctcgcgtgatcaaggaagccaggaagcttaatttgccctttgtgctcgacgctgatgggttgttcattgcccagactannccagagcttgtggagggatacaagnagtgcattctcacacctaacgttgttnnnnnnnntcgattggcgnnnncnnanggcgtccacatcagtggcggagaccctacacannttt

SEQ ID NO: 7748 - DNA, 655 bp, Zea mays
  misc_feature (484)..(485): n is a, c, g, or t
  misc_feature (575)..(578): n is a, c, g, or t
  misc_feature (589)..(592): n is a, c, g, or t
  misc_feature (602)..(603): n is a, c, g, or t
  misc_feature (624)..(627): n is a, c, g, or t
  misc_feature (635)..(641): n is a, c, g, or t
  misc_feature (646)..(647): n is a, c, g, or t
  Peptide Sequence Number=SeqID_13064
  Probeset Number=SeqID_22151
ggtgactgggtctttcacttgaaagtaggaaagatggttggtgaaggaggaaagccaaaggcagtgattgtggggggtagcatagctgggatgtcatgtgctcacactcttaccttagctggttgggaagtccttgtgcttgagaaaaccacctcacctccaactgggagtcccactggtgcaggtctcggactcaaccctctctctctaagaatcattcagtcatggcttccacaaccacaactcctacacaacaccactgtgccactaactattgaccagaaccaagcaactaatagtgagaagaatgttagctgtacattgacaagagatgagagtttcaacttcaaagcagcacattgggctgatcttcatggccttctgtacgatgcactgccaccatatgtatttttatggggtcacctttctctctctttccatgttgcagatgacaagggttctgtcatgataaaggctaaagttnnaaaaactggtgaggtcattgagatagtaggagatttgcttgttgcagcagatggttgtctctcttcatccgccagaaatatatacctgannnnaaactcatatnnnnctggctattnngcttggagaggggttcttgannnntcagaaannnnnnnttatnnacaatcac

SEQ ID NO: 7749 - DNA, 687 bp, Zea mays
  Peptide Sequence Number=SeqID_13065
  Probeset Number=SeqID_22152
ccggccgatgtgctagaagcaactgaaaacagaactaccgatctcctctccctctccctctccgatccattctccaacgtagcgaaccagacatggctgaccggctaatatgtcgtggcaggcgtacgtggacgagcacctggatgtgcgagatcgagggtcaccacctcgtggagggggtcatgcgtcccgcatcacgagtgccgcctgggcgcacagcaccgcgttccccgagttcaagaccgacgacatggccaacatcatgaaggacttcgacaagccagggcacctcgcgcctacaggcctgttcctcggacctaccaatcacatgtgcatccaatgcgagcctggcgtcttcatccccggtcataaaggatcacgaggcatcacctggaataacacaagacaagcactcgtgggtggcatctacgacgaggctatgacgcctgggcactgcaacatggtggtggaaatgctgggcgactacctgcttgaacagggcatgtaactactacactaccatctggaatggatgtcgacaactatggtttctacgatcgacctcctgtaatagtaacaacagatgttagggcttcctcccggcgtatttgctttggctcttctcctccacgccataagatatctagcaattggggactcgccttaattagttcgctttgcttttga

SEQ ID NO: 7750 - DNA, 748 bp, Zea mays
  Peptide Sequence Number=SeqID_13066
  Probeset Number=SeqID_22153
gctgatcgccgggttaagcgtggcggaacagcaactggtgcacatctgtcgcgtattacagcgcgcgccgcgcgtggtggtactggatgaaccgaccgccgcgctggcgcgccacgaggtgcaggcgctgtttcgcgttattgaacgtatgcgtcagcaggggatcgcactgatctacgtttctcactatctcgatgaaatccaggcgctgtgccagcgggttacggtgctgcgcgatggtaaagacgtcgcgcattttaccggcgacgccctttctccgcaggcgctgattaatgccatgatcggtgagacgcagcaggcgattgcaccgcgcggtctgccacctgacggcgagccggtgctgaccgtagacgccctgagcgcgccgggtcgctttcacaatgtttgtttcagcgcacgacgtggcgagatcgttggcattaccggcctgctgggctccggagggaaggcgttaatcagcgcactgtttggtctggaacgtggcgtgagcgggacgctgcgcgtaggtgagacgcacggcgtaccggcttcgccacatgccgcggtgaaacgtggcatcgcgctggtgccggaagatcgccgggccaacggcatcgcgctcgatgtgagcctgcgcgacaacataaccctgacaaccgggcaacgcctgctgcgctggggcggcgtatttcgcaaccgccgagaccgtgctagtgggggacaacatccgccagatggtgatccgcac

SEQ ID NO: 7751 - DNA, 340 bp, Zea mays
  misc_feature (99)..(100): n is a, c, g, or t
  misc_feature (199)..(200): n is a, c, g, or t
  misc_feature (202)..(202): n is a, c, g, or t
  misc_feature (294)..(296): n is a, c, g, or t
  misc_feature (307)..(307): n is a, c, g, or t
  misc_feature (309)..(310): n is a, c, g, or t
  misc_feature (314)..(315): n is a, c, g, or t
  Peptide Sequence Number=SeqID_13067
  Probeset Number=SeqID_22154
atgtcaccctcgccgacaaggctcgggtttgcacccagcgatcatggaaacttccttatggggttggtctactggtacgtggattaaatgaatcaaganntcacctttattacaactgtccaagtggaaactattttgaatatcaggcttttgcaattgggtctcgctcacaatcagcaaagacatatttggaacgcanntntgggaacttcatgggctcctcacgggaagatctgatcaaagatgcacttattgcaactagggagtccttgcaaggtgaaaagctcaggagtnnngtatgcactgntnntgcnntaggagttggtgagccattccacat

SEQ ID NO: 7752 - DNA, 993 bp, Zea mays
  Peptide Sequence Number=SeqID_13068
  Probeset Number=SeqID_22155
atggagatacactggaagaacaagtggatgctgctaccttataacaataccaaggttttgttgcagggcaatcttccggagcaccctccgcatacagtagtccaactccttccactcacagctgcttgttttgctgttgatttttcacaatttcctgaagacctgcaagcagttctatcagaattcagtgatctgtttcaacaacccgaagggctaccccccagtcgagcctgcgaccatgccattccacttattccgggagccagaccagtgtctatccggccataccgttaccctcctacactgaaaactgagattgaaacacaagtgcaagccatgctgtcttctggcatcattcagcacagtacaagcgagttcaactcacctgtcttaatggtcaagaagaaagataattcctggcgattctgtgttgattttcgtcacctcaacgcaatgacggtcaagaggcaatttccaatcccagttatcgaggatatctttcaagaattagcaggcgccagttggttcacaaaactggatttatggtccgggttccaccagatcatgcttcaaccgggggaagaacacaagacagcattctctactcacgagggccatttcgaattcagagtgcttgcctttggactcacgggtgccccagcgacattccagggcgctatgaacgccacactcaagccccttctccgtcggtgcgttctcgtcttcttcgacgatatcctggtctacagcacggattaccaatcacatctgctccacttgcatcaagtcctgtccttgctagcagctgaacactggaaaatcaaattcagcaaatgctcctttgctcaacggcagacaacgtacctgggacatttaatcagctctaacggtattgccaccgacccaaccaagatttctaccatcgtatcatggccagttcccagctcagtcaaggaacttcgcagtttcctcggtctcgcagggtactactga

SEQ ID NO: 7753 - DNA, 397 bp, Zea mays
  Peptide Sequence Number=SeqID_13069
  Probeset Number=SeqID_22156
tgcaggtcggcgcgctcgcggtgacggtacagaaccacggcggcgacggcggtgcgccggtgctgttcaacgacgagccgctcggcgcgggccgccgctcgatgacgccgcaggacgtcgtgacggtcggctcgatcaagctcggcatcgcgcggcatgcgcaggcgagcgtcgcggtgcccgacgaagccgatgcgccggacgccgcgcgcgaggccgcgtggctcggctggctcaccggcggcctgcgccggctcggcagccggcggctcgtgatcgcgctggtcgcgctgtggatcggcgtgctgctcggcgcgctcgggtacggcttcgtcgcgtggtcgggacggctgccgtggcagcacgaatcggtgctcgcgcgcacgcaccggctgca

SEQ ID NO: 7754 - DNA, 805 bp, Zea mays
  misc_feature (24)..(24): n is a, c, g, or t
  Peptide Sequence Number=SeqID_13070
  Probeset Number=SeqID_22157
accctgttgaatgagtcggtactncagggctaaaatcaattatcaatttggtgttccagaccagagtcaggggaagctgaaattccaatccttacaggaattatgctggttgaatgcaagcgtcggctttaattacaatcctatggttacctgttctggtgactgggaagcaaagctctctcagtcgccgttgatgtctcatatgatacgcagtctagcgatttcgcctaagtacatcgatgtcctgagcttcatcagtccagatattatgacttgccttcatctgaatacacacggcgattctgtggttgcgtcctactaccgcgtggtaaagaatcattcaggcgatcatgatggagatgagttgtctcacagcaggtcgagaaatgagagcgcgataatcttggggtcagagctctcgctggatccactcacgagtatcaagtcacgtttcaccatctaggtcatgggcagtgtccttgtccagcatgaatggcgtagcaagtcgttcgtctccatctgtggtgacgttgacaccaaggggagagagacgagcacgaaaattgcaatatgtgtggtgctctatctctgaagtcctgaggtttgtggggtctagggattattttggattcagtaggtcaggaataatcacgttgaggagcagtctatgcagccgaatttcgatatcgaggaatatatcgttttctgtgtatgcatgatccattccataggaaaatattaggtctaatggaggttaagatacaattcaaagcgccctgttaataattatggagagggagtccaa

SEQ ID NO: 7755 - DNA, 583 bp, Zea mays
  Peptide Sequence Number=SeqID_13071
  Probeset Number=SeqID_22158
gtgatattgtaagacacacgtgtgtctgctgcttaaaaatattacctaggtatattaggagtgtacatatgtttgtacttttattaacaatatgttataatttttttcaggcctgcttttttaaaggctgcagaaaacttcactcttttggttaagaacaacatctggtatcccaaatttaacttcagcaagtaagtggcgaccagccgtgtgagttcaccaatgtcttggagaaacttctggctcttctttgaggttttcctcgctcctattttctgcttcctcctgactttaggaggaatatccttcccaacatcaccaccgcctacctcaaaacgtgcatttatgatgcgaaaacagatcccttctgccccatattccgacttggaaaaattgtggaaagcgcagggcacagcttccaggacatagccattgagggaggcatcatgggcatccagatcaagtggaactgcaacctggacagggccgcctccttctgcctgcccaggtattccttccgccgcctagacacccgtgacttggcccacaacgtatccccaggctacaatttcaggtttgccaa

SEQ ID NO: 7756 - DNA, 824 bp, Zea mays
  misc_feature (3)..(3): n is a, c, g, or t
  misc_feature (6)..(10): n is a, c, g, or t
  misc_feature (552)..(552): n is a, c, g, or t
  misc_feature (581)..(581): n is a, c, g, or t
  misc_feature (584)..(584): n is a, c, g, or t
  misc_feature (586)..(586): n is a, c, g, or t
  misc_feature (589)..(589): n is a, c, g, or t
  misc_feature (598)..(598): n is a, c, g, or t
  misc_feature (610)..(610): n is a, c, g, or t
  misc_feature (618)..(618): n is a, c, g, or t
  misc_feature (662)..(662): n is a, c, g, or t
  misc_feature (683)..(683): n is a, c, g, or t
  misc_feature (687)..(687): n is a, c, g, or t
  misc_feature (693)..(693): n is a, c, g, or t
  misc_feature (697)..(697): n is a, c, g, or t
  misc_feature (703)..(705): n is a, c, g, or t
  misc_feature (708)..(708): n is a, c, g, or t
  misc_feature (710)..(711): n is a, c, g, or t
  misc_feature (719)..(720): n is a, c, g, or t
  misc_feature (723)..(723): n is a, c, g, or t
  misc_feature (741)..(741): n is a, c, g, or t
  misc_feature (744)..(744): n is a, c, g, or t
  misc_feature (746)..(747): n is a, c, g, or t
  misc_feature (752)..(752): n is a, c, g, or t
  misc_feature (754)..(754): n is a, c, g, or t
  misc_feature (757)..(757): n is a, c, g, or t
  misc_feature (759)..(759): n is a, c, g, or t
  misc_feature (761)..(766): n is a, c, g, or t
  misc_feature (768)..(768): n is a, c, g, or t
  misc_feature (774)..(774): n is a, c, g, or t
  misc_feature (776)..(776): n is a, c, g, or t
  misc_feature (782)..(784): n is a, c, g, or t
  misc_feature (789)..(789): n is a, c, g, or t
  misc_feature (792)..(792): n is a, c, g, or t
  misc_feature (796)..(796): n is a, c, g, or t
  misc_feature (800)..(818): n is a, c, g, or t
  misc_feature (821)..(824): n is a, c, g, or t
  Peptide Sequence Number=SeqID_13072
  Probeset Number=SeqID_22159
gtnttnnnnnctggactcccgcggtggcggccgctctagaactagtggatcccccgggctgcaggggctgccgggcagttttcagcgatgcagaaagtcgtattgcaggcagccacagaccatcatctggaaatttgcggcggtggcacgcacccgtttcagaaatggcagcgtcaggaggtatgcgataacgaacgctatcaacgcacgctggaaaactttggttatctcattcagcaggcgaccgtttttggtcagcatgtccatgttggctgcgccagtggcgatgacgccatttatttgctgcacggcttgtcacgatttgtgccgcactttatcgccctttccgccgcgtcgccatatatgcagggaacggatacgcgttttgcctcctcacgaccgaatattttttccgcctttcctgataatggccgatgccgtggggtcaataactggcacaatttgaaccctgtttcgctgctgagtacaccacgatgatcgacacatttaagatctgcactgggatattcgcccagtcctattttgcacggngaaggtcgggtgatggatacccgtaaccntancnccnataatttgngggataattagntacccccntggtctgacggaccccgttaactaggaaaaatactgtgtaaatnacgttcagcctgctttgggtnaggnttcccncccnctgaannnccntnngaaacttnnttngaaaaccctccccaaaanggntnnccaangnccntncnnnnnngntaaaananacattnnnggggnttngggnaaannnnnnnnnnnnnnnnnnnaannnn

SEQ ID NO: 7757 - DNA, 492 bp, Zea mays
  Peptide Sequence Number=SeqID_13073
  Probeset Number=SeqID_22160
tacctgcggctggcgctgccggcgcgcgcccgctccagctcgctgccggccatgaagctggtggacacgcgccgcctgccgatgaagcacggcatgtcgccgcagttgctggaggcgctcggcgaacggctggcgcgcaaggagcaatcgctgatcttcctgaaccggcgcggtttcgcgccggtgctgcactgccagtcctgcggctgggtcagcaattgcccgcgctgcaccgccttcacggtgctgcaccgcacggccggccgcggccatcgcctgcaatgccaccactgcggctaccaggcgccggtgccgcacgcctgccctgaatgcggcgaccaggacctggcgccgatggggcgcggcacgcagcgggtcgaggaacacctggccgagctgtttcccgaggcgcgcatcctgcgcatcgacgccgacagcacccgcaagaagggcagcgccgaggcgctgttcgcgtccgttcacgcgggcgag

SEQ ID NO: 7758 - DNA, 708 bp, Zea mays
  Peptide Sequence Number=SeqID_13074
  Probeset Number=SeqID_22161
tcgggcggtcagcttacgctgaacggctgccgctatctctctgctcagcatcagccgcgctactgcaatctgaccctcaagcgcgtcagcctggcgcacggcgtcagcggctttcgcggcagcgccagcgacgtaacgctggaagttgaagcgcaggcgcgcgcgcactatctgtcgcacttcgatgaactgaccggactggccaaccgcgtgcagatgcgcgaattcctcacggggcagctgagcctgccgctgccggcgcagccgctactggcgatgattatgatcgacctggataaattcaaaccggtcaatgatctctacggtcatgcggcgggcgatcaggtgctgcatgcggtatctgatcgtatccggcgcacgctgaacggcaacggcctggtggcgcggctcggcggcgatgagtttgtggtgattctgccggaggcgggcagccgcgagcaggtcgacgcgctgtgtcagcagctcatcgcccagctcaatctgccgttcccggtgtacgacaacgacatccacatcggcggcagtctcggcatcgcgctggccccgcaggatgccgacaacgccagcgatctgctgcgcttcgccgacatcgcgctgtataaagcgaaaaacaacggcaacaaccagtggatatttttcgaccgtgacatggaagagaaaattgtgcagcggcgcgaaatggagcat

SEQ ID NO: 7759 - DNA, 1115 bp, Zea mays
  Peptide Sequence Number=SeqID_13075
  Probeset Number=SeqID_22162
ctctatatcgacctgcagaagctgtacagcaccctggaggggctccagcagagatcgtaccgcagcattgctatgatgatgctcaagttctcctacagggacgtgaagaaagagtaccagtcctgcttgctgtacctagctatcttccccccggggcacaggatccggcggtcgaccttgatcgcgcggtgggttgtggaacggacggtgaccacggaagactggcgctggtccagtgccgagagcatcggtgagcaatgcttcgacgcgctcgtcatcagggggcttgtccatcccactgagatcagcgcgacggggagggtcaagagctgcatggtgggcgatgtcacctacgacttcattaccaagatggccaagaagcagcgcattctggagccacgcctgtcgcaccacctggcctgccacttctccgttttcagcgacctccatctcagtgtgtctgacaatatcagcaatttcctgaacaggctgtctgaatcatctcagtggcctcggctcaaggtgcttgatctggaaggctgcaggggcttcagggaaaaccggcactacctaccgaatatctgcaacaagatagtgctgctcaagtatctcagcctgaggagaacagatgttgacaagctcccccatgagatcaacaaccttcgcgagctggaggtgctggatatccagcagacggaggtgcctgcgtcatgcacaatggatctcctgctcctgaagctgaagcgtctgcttgctggaaacagaaatccaagtccacgcacccacggccatgtcctggttcctgggaagatcgacaaaatgtcagacatggaggtgctatccaatgtcagggtgaagagtgacaaagacttggaaggcatcggaaggctatggcagctgagaaagctcggggtggttatcaatgtcaaggacaaggacacactgcttaaggctgtcactaacctgcatgagtgcctccggtctctatcgattactcttgacgccaccaccagccacaaggggactttcagtaccatcagaggtcgaagagagctggaaggctcttccacgggccgcgatgagaagaagatcatgaaagagcatcccaaggttct

SEQ ID NO: 7760 - DNA, 787 bp, Zea mays
  misc_feature (586)..(586): n is a, c, g, or t
  Peptide Sequence Number=SeqID_13076
  Probeset Number=SeqID_22163
gtgcggcgctcaggcggcggctgggagtcaaacgaaactcgactctctattatatcctctgcgcgtgtatctcgtcatactgagtcaaaagctggagcttccaatgatcgggagacaacgacctgaaggtgctcggcgtgtggacgagcccgttcgtgatccgagtccgcatcgtgttcaaactgaatggcctggcgaacgagtacgtgtaggatgacctcagtaacaagagcgcgctcctcctggggtccaacccggcgcacaagagagtgtcggtgctcctccacgccgggtgcgccatatacgagtcccaagtcatcctgcagtacatcgacgaggtgtgggcggtgacgaggccgaacgtgctgccggacgacccctacgagcgcgcgtaggcgcggttctggggcgcgtacatctacgacgaggtgcagtctgagtggctgtatgatgctgttcaggtgctccaacgatgaggacaaggcggcggcggtggcgtacgcccgcgaggcgctctacgcgctgcagggcgcgttccgtgactgctccaacgggaggccgttcttcggcggcgacgacatcatgngtcgtggacgcctgtctcggcgcgtacctcggctgcttcggagacgtcgggaggatcatcgggagcaggctcatcgacaccgcccggacgccgctgctggacgcgtgggaggaccggttccgcgccgccgactgggccaaggagtgtcgtgcccgacgacctcgacgagatgctcgcgttcctgcagaccctgagcgctat

SEQ ID NO: 7761 - DNA, 555 bp, Zea mays
  Peptide Sequence Number=SeqID_13077
  Probeset Number=SeqID_22164
ctgcagccggaatggatggccccctcgagcgaggctgacccgactccaccgctggggtatgtgctcagtttcatccccatccatgagcgggggttcggagtgccagcgagccgcttcatgcgggcgctcctgcaccactatggagtggagctgcataacctcaaccccaactctatcgtgcaagcggccatcttcatggcggtttgcgagggttttttggggattgaccctcactgggacctgtggacccatttcttttccacggagttcttcgccgcgacgacggaggcaaagaaggtccgtatggcggtgcgagccggtggatgcacccttcagttgaggtcggggcacgtgcagcagtacatgcctgccacccttgcatcttcgaacaaggggtggcagagtcggtggttctacctccgcaacgacgacgagcggttgccggcgttcacgcaccgcgtcgtcctcggagcggacgagcgatggaggtggggcctgcctcgggagctccagactcacttgaagtcactgttggaggcccgacggaagatttga

SEQ ID NO: 7762 - DNA, 1692 bp, Zea mays
  misc_feature (31)..(31): n is a, c, g, or t
  misc_feature (36)..(36): n is a, c, g, or t
  misc_feature (46)..(46): n is a, c, g, or t
  misc_feature (54)..(65): n is a, c, g, or t
  misc_feature (98)..(98): n is a, c, g, or t
  misc_feature (100)..(114): n is a, c, g, or t
  misc_feature (118)..(123): n is a, c, g, or t
  misc_feature (125)..(125): n is a, c, g, or t
  misc_feature (127)..(127): n is a, c, g, or t
  misc_feature (129)..(129): n is a, c, g, or t
  misc_feature (139)..(142): n is a, c, g, or t
  misc_feature (153)..(153): n is a, c, g, or t
  misc_feature (168)..(169): n is a, c, g, or t
  misc_feature (171)..(182): n is a, c, g, or t
  misc_feature (184)..(187): n is a, c, g, or t
  misc_feature (216)..(216): n is a, c, g, or t
  misc_feature (224)..(224): n is a, c, g, or t
  misc_feature (226)..(226): n is a, c, g, or t
  misc_feature (1190)..(1190): n is a, c, g, or t
  misc_feature (1227)..(1227): n is a, c, g, or t
  misc_feature (1270)..(1270): n is a, c, g, or t
  misc_feature (1307)..(1307): n is a, c, g, or t
  misc_feature (1338)..(1338): n is a, c, g, or t
  misc_feature (1428)..(1428): n is a, c, g, or t
  misc_feature (1454)..(1454): n is a, c, g, or t
  misc_feature (1468)..(1468): n is a, c, g, or t
  misc_feature (1472)..(1472): n is a, c, g, or t
  misc_feature (1503)..(1503): n is a, c, g, or t
  misc_feature (1514)..(1514): n is a, c, g, or t
  misc_feature (1534)..(1534): n is a, c, g, or t
  misc_feature (1632)..(1632): n is a, c, g, or t
  misc_feature (1634)..(1634): n is a, c, g, or t
  misc_feature (1646)..(1646): n is a, c, g, or t
  misc_feature (1692)..(1692): n is a, c, g, or t
  Peptide Sequence Number=SeqID_13078
  Probeset Number=SeqID_22165
aaacaggacacaaacagaagagagggaatanagtancaataaaatnaataaaannnnnnnnnnnncccactcgcccaacgaggaggaggggaaatatntnnnnnnnnnnnnnnntttnnnnnncncncncttttccacnnnncctaacaaacnaggggaggggggggnnannnnnnnnnnnnannnnagtttggccgccgacaaaagagagggggnggaaaggnanacaggagaggacaagaaaaaaagagaagaggacggagagcgaagccaacaggaggaggacatggcgccgccacaacagagaaaagaaagaagggggagagaagcgaacgaaggagagcgaggaagaagaggagcaggggacacaagggacgagacgaagaggatatggggggggagagagaagggaagggaggggagaagaggggagggagagaagacgcggagaagagaagcgcagaagggcgacggagggagggaagaggaggacgggaagggagaagaaggggaagaagagagaagaagagagagagaaggaggcgccggcggagcggagaaggaaaaggggaaaagagaggaggaggagagaggaaggaaagaaccgggggagaagggaggagaagaggggaggaagggggggaaagggcggaggcaggacgcgaggggggaaggggagagagggggaggaaggaagtgagagagggagaagaggagaaggaaggagagaacgaacagggaagaactaaacacgagaggaggaggagagcggagcagagaaaagcagagaaggcgtagacgagtgagcgagagagagaacggacggagggagcagggaagagagagcggacgagaggaagaggaggcgagaggggcgagggaccgagaagagaggagggaaccggaaaacgagagaggaggcgaggcgagggaaaacggaggaggcggtgaagaaggcagcgaaagggcgaggagaagagtgggagggaagagggaagcgagagaaggagcaggaggagggaagacggcagacgagcgggaggacaggggaagggcaatgtaacacaaaggagccgaaagcggggcgaaggggagaagggagaggagatgaggacagaggaggcggcgagaagagaggagcagtagagggagagggagagaggtagagaggtagaggcagatatcaaggncgaacgaggagtgcgcggacagagacgaagcagcganagaagcgacggacagagaggcagacagagaggacgacaagaanacagagagaagagacagacgaccgagagtgggaagangaagagacgacgagaggacgacaaagagagnagagacaacggcaggagaatataggcggagcacgagagtcgatgcgagaggagcagcatgtagaagatgacgtgcagatcgcaaacaggnagagcatagacagcggagcggatggncgagacgagagaangaanagggacgatgggaggaggaaggtgggagaanaaggaatcgangagagagagagcgccgacangacagatacgaagacgagagaggagagagcgggacgagagcagacgtagcgagacgacgagcgtggaggagtgcgacgaacgagatgcagagcagcanangaaaacgcgacnacgcagtgacgagaagcgcagacgagacgactaagcaggcactcgn

SEQ ID NO: 7763 - DNA, 446 bp, Zea mays
  Probeset Number=SeqID_22166
cagttcacccccaggctccgggggtgcacccaactcctgcagttcacccccaggctccaggggtccacccaccagctcccggggtccacccaccagcccctgggatccacccccagcctcctggggtccacccccctcctcctggggtccatcctccggctcctggggtccatccccagccacctggggtgcacccctcaaatcctggggtgcatcccccaacacccatgcccccgatgctgaggcccccactaccctccgaaggccctgggaacattcctccccctccccccaccaactgaaaagccacccctatcctagcaagtctggtttggttttcctgggttttgcccttagagtagagtttttttgtactgggctaggtgtccccattaaagagtctgctgaccctgaaaaaaaaaaaaaaaaaaaaaaaaagggggggg

SEQ ID NO: 7764 - DNA, 597 bp, Zea mays
  misc_feature (358)..(358): n is a, c, g, or t
  Peptide Sequence Number=SeqID_13079
  Probeset Number=SeqID_22167
tcaacccatctgggcagggacacgcagcaacaaattcactagttggttgagggtcctcgcgggtccaaaacaccgacagttggcgcgccaggtaggggcctgctgcgtgttgacgaacaacttcccgttgagttccagatgggtagtctccagcaacctcttcagcccgggacgctgctccgtttcgggagtctcgagttcatgtccctcgacggcagctacgacatggtactccttcccctgcagcgcgacagcgaaaacgacggccatcatctcgctcgcaggcggcgaactcgacgacgtcttccccccgtggcggaagagcagcatccgggtttgccccgcccccctcctcgcnggaggaggagacggagcaaccatggccaggcaagaggcggcacctcgttggctgtcggaccagagcgagtcgacgacgccggcacccctgtcggagacatgtcgggtgttatcctcgcacctgggacaacgacgggtgtcgcttcccagcaatgtgccaacctcaggcggactaatgacgccaacacctttgcgagggacttgtcgggcattagtctcgcacctgagataacggcgcat

SEQ ID NO: 7765 - DNA, 706 bp, Zea mays
  misc_feature (697)..(698): n is a, c, g, or t
  Peptide Sequence Number=SeqID_13080
  Probeset Number=SeqID_22168
attgtggtgtcatctttcgatatggttgctgggtgtggagcagcagaaccatatactacacttgccttgcgaacaatttctcgccactttcgctgtttgcgagatgctatcagcggccaaattcaagtgactcaaaggagccttggggaacaagagggaataccccgtctccgttatgttgatcagcagcttagacaacaaaaggcacttcagcaactcggtgtaatgagacaagcttggaggcctcagaggggtcttcctgaaagctctgtttcaatactccgtgcttggctctttgagcattttcttcatccgtatgtgttacgtcaccctgtacttgttttttccaattatagcaatggtgttataataatttctgtttatgtttattttaataaatttcttattcaactttcatttgataattgataccagttaccccaaggattcagagaaaataatgctagcaagacaaactggcttgacccgaaaccaggtacaacaattgatttttctgaactgtacaacattgttttcgttgagattttgtttctgattaggatccaacgttaagtaactgacaactaagtttcagtcctgtaccatggttgctaatcattattgaggtgttgttcacatcaggtggctaattggttcatcaatgcacgggtgcgtctctggaagccaatggttgagnnaatgtaca

SEQ ID NO: 7766 - DNA, 531 bp, Zea mays
  misc_feature (7)..(9): n is a, c, g, or t
  Peptide Sequence Number=SeqID_13081
  Probeset Number=SeqID_22169
ttgcttnnnatggttatcgaacttccgttcgtacctcaactggggcaacacctttctccttggtctatggaatggaagcggtactgccaattgaagtagagatcccctcattaagagttttgatggagacaaagcgtgaagaagcagaatggatccaaactcgattttttcagttaaaccttattgacgggaaaagactgtctgctttgtgccatggtcagctataccaaagaagattgaagaaagctcacgagaagaaggtgcgccctcgagaatttcaggaaggagaattggttcttaaaaagattttacccatccaaaaggatcatcgtggaaagtggaccccgaattatgagggaccttatgttgtgaagaaagctttctctggaggagctctcatccccacaaagatggatggtgaagatctccgacttccggtgaactatgatgccgtcaagaagtattatgcttagaaaaatggctcgctaggttgaaaagctggaaaggtgacctaggcaaaaattagagctg

SEQ ID NO: 7767 - DNA, 692 bp, Zea mays
  misc_feature (23)..(24): n is a, c, g, or t
  misc_feature (56)..(58): n is a, c, g, or t
  misc_feature (67)..(68): n is a, c, g, or t
  misc_feature (79)..(80): n is a, c, g, or t
  misc_feature (133)..(134): n is a, c, g, or t
  misc_feature (158)..(160): n is a, c, g, or t
  misc_feature (167)..(168): n is a, c, g, or t
  misc_feature (184)..(190): n is a, c, g, or t
  misc_feature (504)..(507): n is a, c, g, or t
  Peptide Sequence Number=SeqID_13082
  Probeset Number=SeqID_22170
cttaagagcatcaactaatcatnnggctctttccgatcatggaattaagaccatcnnncatccaganngctatgtagtnnatcaaaagcattcttatcaggcagctaacaatgtggagcatgaaggattgccnnatatggtgaagcagtattatatcnnnaatggcnnatctgaccatgtgagnnnnnnnaagactgttgaaagttgtttaggggaggatatctcttcaatggaaacaagattgcacattgatcgcccatttgacaattccaaggattgtgattttagtggcagattagaatctgacaatagcatattaggttcatcaaaaggagttgctcatcaaacaaagagtagctgtaactcagagattactttatgtccaagtgctcaggatagtttccatcctgccactgtctattcagaagccaaggaaagtttcaccaatgttggagtcagtgaatgtgttagtattgataaatcagttgaaagtggagatgttannnnttcatgtgaatttaaaaagagcaggaagactagcatctatagagagagtactggaagtgatgttagtgatgagagcagtaccagtagtttgagtagtgctttgtataagcccctcaaggcaaatgatatacaatgggaagcaattctagccatccgagctcttgatgggggatttaaaatgagcc

SEQ ID NO: 7768 - DNA, 427 bp, Zea mays
  Peptide Sequence Number=SeqID_13083
  Probeset Number=SeqID_22171
cgacggcaccgacgggcagcagccgtatctgcgtctcgcggtgcacggccatgcatggctcacgtgccagcgctgcatgaccccgtacgaccagacgttcgacgtcgacatgacgtaccgggtcgttgcgaccgaagacgaagctgaagaatttccgctcgacgacgatgaagccgatgtgatcgtgggctcgcgccagttcgatctcgtcgacttgatcgaagaggagttgctgctttcgttgccgctcgtgcccaagcacgaggtttgcccggcagttcacgaaagcctcgtgtcgggtgcgagcggtccttcggaagacgcggacgacgagtccgccgaagacgaggacgaaggcaaacggccgaatccgttcgcagcgctggaagcgttgaagaaggacggggacggcagcaagaaacactaa

SEQ ID NO: 7769 - DNA, 461 bp, Zea mays
  misc_feature (414)..(414): n is a, c, g, or t
  misc_feature (428)..(428): n is a, c, g, or t
  misc_feature (433)..(433): n is a, c, g, or t
  misc_feature (435)..(435): n is a, c, g, or t
  misc_feature (437)..(437): n is a, c, g, or t
  misc_feature (453)..(453): n is a, c, g, or t
  Peptide Sequence Number=SeqID_13084
  Probeset Number=SeqID_22172
accgcctcaccgcgtgccgttcccgatgaggccactgccaacgctggtgccgagactatctgcaccgaccacatggtcactgccacttggacagctgacagtggctggggaacccctgagctcaagccctacggtccattgagcctcatgcccacggcttcctgcctgcactacgccaccgagtgcttcgagggcctcaaggtcttccgtggcttcgatggaaagcttcgcattttccgcccgagcaagaacaccgcccgtatgcgcatgtccgccagccgtatctctctgcctgtcttcgagccggcagagcttgagaagctcatgattgctctttgcggcgttgatggtccccgttggcttcccaaggaccgcgctggcagcttcctgtacctccgtccgactatgattggnactcagtctcaacntcggngntnaggcgcccaaagaggntatgcttt

SEQ ID NO: 7770 - DNA, 661 bp, Zea mays
  Peptide Sequence Number=SeqID_13085
  Probeset Number=SeqID_22173
gggtacctcgaggccggccggggaagtctcacctacccaactatacatgttgagagttggatctgcccctgtacaccggcgagtgtacgccactgacttcgctgtattgtatagaataaaggctcaaagtagggatgaacgacgagcgacagaaaggggaggcgctgcagatcctgggactattacaagtgctcccccgcctcggcgtcttctacctcgactatagcctctggtccttctactgggagggccggtccaaaagggattcgccgagccttttcaaggacgccaggggcatcatggacaccctcaaggagaaggggatccacatggtgattgtttctcgctcccccaccccggacatagcccaggtgttcctcgacaaggtggagtaccagcccatgtacgtcgaccaagaaatattctacatgtggaatcactagactgagcatttccagaatagatccataggaaaactgagattccctacaaatccatgctgttcttccatgactagaacaggaatattgaagcagtatcagaaatgtgagtgaccagtgatttactacagaacgtcgtgaatcttgacatgattaagctgggtgtcagtaactttgcaactaactgtgctgcctccagcagaaaggatgatgaataacct

SEQ ID NO: 7771 - DNA, 521 bp, Zea mays
  misc_feature (80)..(81): n is a, c, g, or t
  misc_feature (104)..(113): n is a, c, g, or t
  misc_feature (115)..(123): n is a, c, g, or t
  misc_feature (125)..(131): n is a, c, g, or t
  misc_feature (133)..(135): n is a, c, g, or t
  misc_feature (138)..(145): n is a, c, g, or t
  misc_feature (147)..(155): n is a, c, g, or t
  misc_feature (159)..(160): n is a, c, g, or t
  misc_feature (172)..(172): n is a, c, g, or t
  misc_feature (180)..(184): n is a, c, g, or t
  misc_feature (196)..(199): n is a, c, g, or t
  misc_feature (205)..(212): n is a, c, g, or t
  misc_feature (214)..(217): n is a, c, g, or t
  misc_feature (220)..(222): n is a, c, g, or t
  misc_feature (224)..(224): n is a, c, g, or t
  misc_feature (228)..(230): n is a, c, g, or t
  misc_feature (237)..(238): n is a, c, g, or t
  misc_feature (249)..(249): n is a, c, g, or t
  misc_feature (251)..(254): n is a, c, g, or t
  misc_feature (271)..(274): n is a, c, g, or t
  misc_feature (279)..(283): n is a, c, g, or t
  misc_feature (286)..(286): n is a, c, g, or t
  misc_feature (288)..(290): n is a, c, g, or t
  misc_feature (294)..(295): n is a, c, g, or t
  misc_feature (297)..(307): n is a, c, g, or t
  misc_feature (324)..(328): n is a, c, g, or t
  misc_feature (330)..(337): n is a, c, g, or t
  misc_feature (340)..(341): n is a, c, g, or t
  misc_feature (344)..(355): n is a, c, g, or t
  misc_feature (357)..(367): n is a, c, g, or t
  misc_feature (372)..(374): n is a, c, g, or t
  misc_feature (382)..(386): n is a, c, g, or t
  misc_feature (389)..(393): n is a, c, g, or t
  misc_feature (395)..(402): n is a, c, g, or t
  misc_feature (410)..(419): n is a, c, g, or t
  misc_feature (424)..(432): n is a, c, g, or t
  misc_feature (435)..(435): n is a, c, g, or t
  misc_feature (442)..(444): n is a, c, g, or t
  misc_feature (446)..(453): n is a, c, g, or t
  misc_feature (456)..(476): n is a, c, g, or t
  misc_feature (482)..(490): n is a, c, g, or t
  misc_feature (496)..(505): n is a, c, g, or t
  misc_feature (509)..(511): n is a, c, g, or t
  misc_feature (513)..(521): n is a, c, g, or t
  Peptide Sequence Number=SeqID_13086
  Probeset Number=SeqID_22174
tacgtggcggaaaccctgatgccgttgatccttgacctggcccgcgaatacgaagcggccaagatcgatccggccttcanngaagaactggcctacttccagcnnnnnnnnnntnnnnnnnnnannnnnnntnnnctnnnnnnnncnnnnnnnnnagtnntgcggcggcgcnaagatctnnnnnaagcgcgaagannnnaatcannnnnnnncnnnnaannncnacannngcatcgnncagatcctgcngnnnnggcgcatgggtaaaaannnnatcannnnnganannngcgnngnnnnnnnnnnntgtggccaacgcgcgcnnnnntnnnnnnnncgnntcnnnnnnnnnnnncnnnnnnnnnnnatggnnnccgccgannnnnagnnnnngnnnnnnnnacgtatannnnnnnnnnaatannnnnnnnncgnctgcaannnannnnnnnnagnnnnnnnnnnnnnnnnnnnnncgaaannnnnnnnnaacgtnnnnnnnnnngggnnngnnnnnnnnn

SEQ ID NO: 7772 - DNA, 629 bp, Zea mays
  Peptide Sequence Number=SeqID_13087
  Probeset Number=SeqID_22175
atgaataatcaaacgttccagtcgccggtgcgcgaacggggtttcgcgcgtctcggtgactacgcggccatcggcgagggccggtcggtggcgcttatcgcgcccgacggcgcgattgactggtggtgcgcgcccaaccttgactccgccccgttgtttgaccgcctgctcgatcccgagatcggcggttttttccagatcgaacctaacgctccttaccgtaccgaacgcgcctaccgtgctgacagcaacgtgctggaaacccgcttttttaccgatgacggcagcgtgttgctgaccgaatcgctgaacagcacgctggcaggccgtctgccgtggagtgagctggcgcggcgcgtagaaggcgttgaaggcgaagtgacactgcgcctgacgctgcgctttggcaccgttgccgaaacccgctcgccgtggcaggacagcaccgaacagggcgacgtctaccacgttggcgatctgatggcgatgctgcgcaccagcgaggactggcagatcgaacagcgtgacgatgagcaaatctgcgccacgctacgcaccgcagagggcagtcgatcgctggtggcgttgctggtcaccgaacccgaaccgctggcggtgccgccgctgca

SEQ ID NO: 7773 - DNA, 501 bp, Zea mays
  Peptide Sequence Number=SeqID_13088
  Probeset Number=SeqID_22176
caaaaaagcccaagttcttcaatcgggggccccctggatatgaatggaataaatacaccccggctccttttggccctgataaccccccccccaaaattgtccaagggtccaagttcaatatattttaccctgattttgtgggcaaatcgaaagcccccccctccagtataaaaaaaaatggaagcgccggaaaaactttctttataagatttccccctgggcccccatacgaggatattgctttccgtattgtgaacaaggagtgggaatactcccccaaaaaggggttcaagtgtactttttagcgtgggattttccctttttattttaacttcaagcgtttccgttacaggcgctgaaatggctcaaaaaggggaaaactggatcgattgggctggtgcgtcatgatttttctgtatgctgtggcatggatacccgtcgagtatgtattttcagtataattttaaactatgtttaaaggggacgccccttttggttttt

SEQ ID NO: 7774 - DNA, 652 bp, Zea mays
  Peptide Sequence Number=SeqID_13089
  Probeset Number=SeqID_22177
ctggctttggggggaggttgtggccacgacggtgtacatactcaaccgatcgcccactcagagtgttgaaggcagcacaccatatgaggtatggcatggttcgaagcccactgtcagtcatcttcgcacttttggttgcgttgcacacgtcaagcagggcagcaaacgactgacgaagctcgaagatagatgtacaccgatggtgtttgtcggctatgaaagggggagcaaggcatgtcgcttctacgacccaaacacgaggcgtgtgcacgtatcacgtgacgtcttgtttgaagaagaccgttcctggaactgggaagaggagacgggcaccgatattcccttcggtgttgaggttgtgccaggcggaagccccacctggctggacatgggcgcctcgacgaattcgccgagctcgacaacttcttcaccgagctcgtcgtctgattcaccaagttcgtcaagatccacgcagtttggaggtggtgtcacccatcctgggagtttggaggacgcccaagagcagcaaccagcaacagcgcctggggcagtgggtgttgactttgccactcctcccaccgcaagcccggctttggatgctgatcacaacaacatgccaataagatttcgcactttgaagaatattcagaca

SEQ ID NO: 7775 - DNA, 627 bp, Zea mays
  Peptide Sequence Number=SeqID_13090
  Probeset Number=SeqID_22178
ccggccgggccgggttctcacctccgacagtcactccaaacacttgcgccgccactgcctcacaggtaaggccgccatgacctccgcttagggcgtgcgcgcataagcgcatcacgccgcacgcgcgccaccacatgctgggccgactctcctctatcatatccaaggagttgctctatgcgcataaggcggtcgtcctccgctgcgaggagatctgcatgtcttccgcactcgtacgacacaaatgaagtacctccgcttcctccgcaagaggatgaacaccaagctcgtcccacggcatccatccacttccgtgcccccgccaagatcctgtgtggcaccatcctcgtccatgattccgcacaagaccaagacgcatgacgcgtgtctgatgaggatcaacacctacgagggtatgccgacgtcgtacgacaagaccaagcgtatgttcatccctgacgctcttaaggtactgaggctacagactggacacaagtactgcctcctcgatgagctctctaaggaggtcttttggaactaccatgacaccatcatgtaacttgaggataagaggcaggacaaggccaatgttgcctacgatatgaagaatcaattggacaagctgcg

SEQ ID NO: 7776 - DNA, 695 bp, Zea mays
  Peptide Sequence Number=SeqID_13091
  Probeset Number=SeqID_22179
aacatggattcattgccacttcaactggcctcgatcgagcccgaacctagccaccaggcggaggcgagagacagccatggcgcggtgactcgcgctcgtcgccctcctcgtactcggacacgccgacgccgactccgcgggcgatgcgcccttcgacgtggcgcacaacaagatttcgctctcccgccccaagccgatcgttgagcgcgtccccgactccctcgacctctacgaccagtgatccgcaactgtctatgatgagtcgattaatgacgactctatgccaattgaaaagtttgagcttgacgctgtggagaaatcgaagacattggaaaggcttgaacctgtggccgctgcttcacacacatatgacctggagaccaaaacacaaggcaggctccaggggtcaccatgctattattacatatcgagatcccgcaaagacagctcttcatgaggcatactccactcccgtcttccctgtggatattctctgtgggagacctccagagacaatgtttgaatgacctaagagggttgtgatgaaatagggctcacttgagtcggatggctcgtttgatggactgtatatctaccttgacgagtagccgatgaagagcagctcttaggcaattaagaagagactgtgatctacttataggtcgcagttgacggtgtagctggtggtcctgcct

SEQ ID NO: 7777 - DNA, 1037 bp, Zea mays
  misc_feature (714)..(714): n is a, c, g, or t
  misc_feature (767)..(767): n is a, c, g, or t
  Peptide Sequence Number=SeqID_13092
  Probeset Number=SeqID_22180
ttgctyttaaaatggagtaccctgaaaatgtacayttgatgagaggraaatmatgaagttgctgaaataaatgyttttttttgtttcsgccttgaatgcattgagagaatgggtgaaagtgatggaatatgggtttggamaagattmaatcaagtgttaaattatttccaaytgggtgcaatgatagaaaagaaaataatstgcatgcatggaggaataggaaggtaaataaacagagtggagcaaattgagaaatttgagaggcctataamaatggatgttggttcmattgtcctcatggacctgctatggtttgatcttaaagaaaatgatagtgtggagggtttgagacttaatgaacgagggccsggtttagtgawatttgggcctgatcgagtaaaagaattttgtaaacgaaaaaaattgmagttgatcataagagccaatgagtgtgttatggatgggtttgagggtttggctaatggaaaattgatmactttattttcagaaacaaattattgtggtactgcgaaaaaggcaggggccatatttgttgtgggraggggtttagttatggtgcmaaagttaattcmycccacttccacttcctgttaattcacttgagtcctccccggaacgtggggatgcaaaatggatgcaggagcttaaaattcaggggcaacytactcmaamcagagggcggcaaaaagttgncggtgataggaattttcttgtttacatatgatacctgacaccgaaagagccanctccatctgctggatatgtttgtttgtaaycagaamtttttttaccagtttcmacccccatayssycymgcaaagaagaaaaatcaaccaaaaggacatmatggayaaacttgtgataagttccctggtaatcytttgtgatgcaysggtttttaactgtagttgtgtgctaccgtgacttcagktcytaactggggaggtggataatcagdatttgagatgtcaagcaatattgtatgattgcgatacccagtggacaataatmaagtc

SEQ ID NO: 7778 - DNA, 1722 bp, Zea mays
  misc_feature (1009)..(1009): n is a, c, g, or t
  Peptide Sequence Number=SeqID_13093
  Probeset Number=SeqID_22181
atcttgttccctccgttttcccaagcaaatggcaacacagcaacaggcctccaccacgccgcccaacaagccagatgtgttcgagctaaaagaagaggagaaaaagaaatttttggatacctatgccaagagcaaggacacatctagactctcacgcaagcccaacggcttggtgctaagcttcttgtcctacgcaatcctccaagttttgcccattgtagccctggtgatctttgcgaagcacatgctcgtacagcattacggaaagttttggaatgggactcagctggctaacagcgggcttgaacgttacgctctattctcacctgtccctacccctctgggcttcgatatctccatgacgctgctggacttgttggttgttcttgtcttgctggtactacaagctgttgtggtgcgcaacaagaagaacaacatttatctggtggagtttgccactctcaacaacttggactccaagtggtgctgcccccacgaggaatttatgttcaaaaccgaacgcactggttggtttactgctgataccattgaattccaaaagcgtgtgttagccaagtcttgcattggggatgaggcatttttcccagaaggtgtaaaaacgaatcctcctacaattaacatggaaatggcacgaaaagaggccgattttgtgttcgaaaacgtcctcgatgatcttttccgtttgacaaacgtgaagccaaagcaaattgatatgcttattgtgaactgcagtctgttttgcccaacgccctcgctttcgtcaatgattgttcgcaaatacaaaatgcgggaggatattctaacatacaacttgggcggtatggggtgctctgctggcctcattgccatcgacctggccaaggatctgctgactgctcacaagaacaagctgtgcgttgtcgtctccacagagaatattacacagaattggtacactggaaaccagaagaatatgttgctgagtaacacgctgtttcgaatgggaggntctgcagtcttgctatccaacaagccatcagatgctgttcgtgctaaataccagctgatgcatctcgttagagttcacaagggatgtgatgaggagtcataccaaagtgtagtacaagaggaagatgcacagggcaagattggagtacgcctctcgcgagacctaatggttgtcgccggcaaggccatcacgagcaacatcaaacgcttgggtccacttatccttccgttatccgaacaattgaactacgcatactacaacatgatactgccccgtctgacgggcaagaagggagaatatgtgcccaattttaggaaggccgtcaaccatttctgcatccatgctggtggacgcgctgttctggaagctctcaaggacaaacttggtctttccctttatgacgtggagccatcccgcgccaccctctaccgatatggaaacacttcatcatcttcagtttggtatgaaatggatttcattgagaagagtaggaaggtacgggcaggtgagaaaatctggcagatagcgttcgggagtggcttcaaatgtaatagcgctgtatggaaggcactctgaggaacacaaacgataaaacaacaacaaagattttattttaacccctaaacagcgtctcacaagattcaaaaaggggaggaaataaagtttttaaatgaggaaccttacaaaaaaaaaaaaaaaaaaaaaaaaaaaaa

SEQ ID NO: 7779 - DNA, 771 bp, Zea mays
  Peptide Sequence Number=SeqID_13094
  Probeset Number=SeqID_22182
atggccagagttcgttcaactgctagggtgacccgtgacggagaggaggccgaagccacaaagactgccccgatctctgaagtgatgaaacaatcgggaatggttgtgacagaggtagctgctgacgaaggtgcacctgctgccgaagctgaatatgctgacattgaagaagatgttgttgatgaagaagaggaagattataatactctcatgccagccaaacccagtcacttggactttggaaaatttatcgtttctgaggctgatatgcctatgatggtgaagctgggctactttggggaaaccgaaaagaaacttattcgttttgctggagaagaaaccaccccagcgccgaaggatgatgaagtagttgttttcaagagtttttttagagcaggatttcgatttcctctgaatgagatgttaggagaagtcttgaaaaaatttgaaatttatcttcatcagctgactcctaacgccattattaggcttagtgtctttatctgggccctccgaagtcaagggatgagcccagatgccgaagcgttctgcctagtgcacgagttgcactaccagacgaaggccagggcaaccggtcttcatgaaaattttggttgctacaattttgcgtatcgcaaggatacaaaggctccagttctcagttaccgcacaaaatggccaaccggctggaaaggtgaatggttttatattaaggctgatgagaagaagagggggaaactgatgacgatggtcatgtgtgaaagcatctag

SEQ ID NO: 7780 - DNA, 413 bp, Zea mays
  Peptide Sequence Number=SeqID_13095
  Probeset Number=SeqID_22183
tatgggtaccctggtagtccggttccgtgtacattgtataggctcggtaaaggttgatccgaacaagctcatgcagatcacctcgggggatcgctacatcaagtatcatgtgcaggagttagagagggccttcagggagaggctccctgcctgcacactgtcaggcaagaggcacattgactgcactaccactatgctggacgtacatggtgcggggctcaagaatggctcaaagaccgtaagggagcttgcccaacgtatgcagagaatagacagtgactactaccctgagacgctacattagatgtatgttgcgaatgcacgcagtgtttttaagctgatctgcaacactgcaaagggatttctagacccataaacttgttgcaagattcatgttcttgggcgccgactac

SEQ ID NO: 7781 - DNA, 799 bp, Zea mays
  misc_feature (3)..(3): n is a, c, g, or t
  misc_feature (6)..(6): n is a, c, g, or t
  misc_feature (11)..(11): n is a, c, g, or t
  misc_feature (14)..(14): n is a, c, g, or t
  misc_feature (16)..(16): n is a, c, g, or t
  misc_feature (47)..(47): n is a, c, g, or t
  misc_feature (536)..(536): n is a, c, g, or t
  misc_feature (562)..(562): n is a, c, g, or t
  misc_feature (584)..(584): n is a, c, g, or t
  misc_feature (645)..(646): n is a, c, g, or t
  misc_feature (652)..(652): n is a, c, g, or t
  misc_feature (657)..(658): n is a, c, g, or t
  misc_feature (676)..(677): n is a, c, g, or t
  misc_feature (709)..(709): n is a, c, g, or t
  misc_feature (718)..(718): n is a, c, g, or t
  misc_feature (729)..(729): n is a, c, g, or t
  misc_feature (748)..(748): n is a, c, g, or t
  misc_feature (758)..(758): n is a, c, g, or t
  misc_feature (778)..(779): n is a, c, g, or t
  misc_feature (783)..(783): n is a, c, g, or t
  misc_feature (786)..(787): n is a, c, g, or t
  misc_feature (792)..(793): n is a, c, g, or t
  Peptide Sequence Number=SeqID_13096
  Probeset Number=SeqID_22184
atnatngtttnaancnttggactccccgcggtggcggcgcgctctanactagtggatcccccgggctgcagggacccaaggacgggtaaagagtttggattaggcagagacaggcgaatcgcaatcactgaagctatacaggccaacattgagttattttcaggacacaaacacaagcctctgacagcgagaatcaacagtgataattccgttacgttacattcatggcttgatcgctacgaaaaaatcctggccagcagaggaatcaagcagaagacactcataaattacatgagcaaaattaaagcaataaggaggggtctgcctgatgctccacttgaagacatcaccacaaaagaaattgcggcaatgctcaatggatacatagacgagggcaaggcggcgtcagccaagttaatcagatcaacactgagcgatgcattccgagaggcaatagctgaaggccatataacaacaaaccatgtcgctgccactcgcgcagcaaaatcagaggtaaggagatcaagacttaccgntgcgaatcctgaaaattatcaagcanagaattatcccatgttggctanacttgcatggactggctgttgtaccggcacgagttgggattatgccaaatgaatggcccgnnccaatngcctnnatgagtcgattacaattnntggccgcgtttacacgtctgatgggaaacctnggtacccanttaatgcttgnccatccctttccactgggntacaaagccnccatgcctcccattggcccnnatgnaannaattnncttttt

SEQ ID NO: 7782 - DNA, 500 bp, Zea mays
  misc_feature (51)..(51): n is a, c, g, or t
  Peptide Sequence Number=SeqID_13097
  Probeset Number=SeqID_22185
cgccaccagcgggctgcggcccccgtcgcttgctagcctgcaccgcgccgngagtcacgccgttcatgcaccgactgctcctggagcacgggacgacgagcatgtcctgcttccaccccatccacaaggtgaccatcgtctacccgacctgccaaggacggctgtcacaagccgaacttgagagctcaggtcccgtcgctgaccaagatgctggactacggcgtgcccaaccacgaggacgacatgagcgtcaagcacctgaagatcctcaaccatgcgttccatcttgagaagctcaagcgcatgctgtcgaggttgtctacgtgctgcgagcagctggtgaccaggtggccggcggactcccttggctccgaccgctcatgcgagctggacgtctggccggagctgcagatcctgacgggagacatcatttctcgcaccgtgttcagcagcatctacagcgaagggagaaggatcttccatctacaggtcgagcaagc

SEQ ID NO: 7783 - DNA, 1618 bp, Zea mays
  misc_feature (14)..(14): n is a, c, g, or t
  misc_feature (17)..(17): n is a, c, g, or t
  misc_feature (31)..(32): n is a, c, g, or t
  misc_feature (87)..(88): n is a, c, g, or t
  misc_feature (104)..(104): n is a, c, g, or t
  misc_feature (109)..(110): n is a, c, g, or t
  misc_feature (119)..(119): n is a, c, g, or t
  misc_feature (121)..(123): n is a, c, g, or t
  misc_feature (125)..(128): n is a, c, g, or t
  misc_feature (130)..(133): n is a, c, g, or t
  misc_feature (938)..(938): n is a, c, g, or t
  misc_feature (954)..(954): n is a, c, g, or t
  misc_feature (1037)..(1037): n is a, c, g, or t
  misc_feature (1171)..(1171): n is a, c, g, or t
  misc_feature (1229)..(1229): n is a, c, g, or t
  misc_feature (1277)..(1277): n is a, c, g, or t
  misc_feature (1395)..(1395): n is a, c, g, or t
  misc_feature (1527)..(1528): n is a, c, g, or t
  Peptide Sequence Number=SeqID_13098
  Probeset Number=SeqID_22186
ggagaggagaagcncgngggaaggggggagnncgggcagaaacaaaaaaaaaaaacgtctggtggaggaaaaagaaaaaacaaaagnnaggggggtttgacacngcagnnggaaggagngnnnannnnannnnagttttcaccaaaaaaaaaaagagggaggggaggaggaggcggaagggggaggaaggagaagaggagaagaggggaagagggagagggagggaggaaaaagaggaggagagaagagggaagaaaaaaaggaggaggagaaggggggaagaaagagaaacaagggggggggggaggagaggaaggggagaagggagggggagagaagcgaggggagaggacagaagaggggaggaagagggagagagaggaggggaggaggaggggggagaggagggggggagaaagagagggggaggaagaaaggagagagggaagaaacaagggagagagagaaaggagggaaaatggagagaagaggaagaaagaggagaggagaggaggatgaagaggagaagggagggagggagggaggaagaaaggaagagggaggaggaggggaggagaaaggagcacgacgggaaagaaagtggagaggagggaaaagataagaagggagagaggggggagagtaagggagcgaagaataagaggggaaggatagagagaggaaagatgaaagagagagaagagaaagaggaggagacgggagtgaggagagaagagaggaaggaggaaggaagaggaagaggggggagggaggagcagggagggagggagggaagagggagggagaggggtgagggagaggaggcagaggagaggagcgagagagggaggaagatagagaagggagagagagaaggaagaagaagaggaggaggaagaaagtagagagatgaggaaaggggaggaggaaaagggggngaggaggaggagaaantggaaggggaggaggagtgggcgataaaggagcagagaagagagagaggaagatatgaaggagggaggaggaagaagacgcgnggaggaggaagagagagaggaaggtgagaaggagtgaaggagagagagaagagactggaagaggaggcgaagagaggtatagaaagagaggagataaagtggaggagtagagagtgaggagagggagagggagntggagaggagagaatgatagggtgagaggtgagagaagagaggggacgaggggaaggnacagaaaaggagggggtagcggagagagaacggagtgaggagaggaangagagaggagaagagagagagggagaagaagagggagcggaagtagagaagatggagtgaagagagagtgagaagatacagagaagcgagaagatctgagtcgaagtactatataacnctatggggaaatgacgatgtggagataggggaaaggaatgagagagctgagacaagagagtgagaaaaaaaggtagagagatgtgagatgagtggtaggataaaggaaaagaaataagagtgtgcgtagggnnaaaagagacgaagagagtagggatgaacagaaggaagagagaggcgtgggggatgatgtagagtagtgaatgaagagaaatggggaggga

SEQ ID NO: 7784 - DNA, 521 bp, Zea mays
  Probeset Number=SeqID_22187
atgagccacaaaccaccaaccttctccaactccacggatccactgcaagctgatgactggctaaagtctatagagaagatgctcaacatagctcagtgctcggaccgagagaaagtactctacgcatcaggtcgtcttgctggtcctgctgcagattggtgggatgcgtactgcgctgctcatgctgctgccgatacgattacctgggcagaattctccacacaattcaggaattaccatattcctgctggactcatgaagattaagagaaaggagtttttatccctcaagcaaggaagtatgtccgtgagtgaatatagggacaaattcacccagttatctcgatatgctcccagagatgttgaggatgatgagcaaaagcaggagcttttcctggacggtttaattggacccttgcaatatcaactgattatcatggcccagctcagtgacaagggagtgcagattatcaagaagaatctccatcagaaggttgagaagatgaagagggagatagccca

SEQ ID NO: 7785 - DNA, 789 bp, Zea mays
  misc_feature (4)..(5): n is a, c, g, or t
  misc_feature (7)..(8): n is a, c, g, or t
  misc_feature (17)..(28): n is a, c, g, or t
  misc_feature (30)..(41): n is a, c, g, or t
  misc_feature (43)..(50): n is a, c, g, or t
  misc_feature (52)..(66): n is a, c, g, or t
  misc_feature (68)..(68): n is a, c, g, or t
  misc_feature (70)..(74): n is a, c, g, or t
  misc_feature (76)..(76): n is a, c, g, or t
  misc_feature (78)..(91): n is a, c, g, or t
  misc_feature (94)..(103): n is a, c, g, or t
  misc_feature (105)..(107): n is a, c, g, or t
  misc_feature (109)..(109): n is a, c, g, or t
  misc_feature (112)..(112): n is a, c, g, or t
  misc_feature (115)..(115): n is a, c, g, or t
  misc_feature (117)..(118): n is a, c, g, or t
  misc_feature (120)..(125): n is a, c, g, or t
  misc_feature (128)..(129): n is a, c, g, or t
  misc_feature (141)..(144): n is a, c, g, or t
  misc_feature (147)..(147): n is a, c, g, or t
  misc_feature (151)..(151): n is a, c, g, or t
  misc_feature (155)..(156): n is a, c, g, or t
  misc_feature (159)..(159): n is a, c, g, or t
  misc_feature (163)..(163): n is a, c, g, or t
  misc_feature (166)..(166): n is a, c, g, or t
  misc_feature (173)..(174): n is a, c, g, or t
  misc_feature (176)..(176): n is a, c, g, or t
  misc_feature (179)..(179): n is a, c, g, or t
  misc_feature (183)..(183): n is a, c, g, or t
  misc_feature (187)..(187): n is a, c, g, or t
  misc_feature (191)..(191): n is a, c, g, or t
  misc_feature (204)..(204): n is a, c, g, or t
  misc_feature (208)..(208): n is a, c, g, or t
  misc_feature (226)..(226): n is a, c, g, or t
  misc_feature (228)..(228): n is a, c, g, or t
  misc_feature (230)..(230): n is a, c, g, or t
  misc_feature (783)..(783): n is a, c, g, or t
  misc_feature (786)..(788): n is a, c, g, or t
  Peptide Sequence Number=SeqID_13099
  Probeset Number=SeqID_22188
aagnngnnagggggggnnnnnnnnnnnnannnnnnnnnnnnannnnnnnngnnnnnnnnnnnnnnnanannnnngngnnnnnnnnnnnnnnacnnnnnnnnnnannntntgnaangnnannnnnnaannaacggggccttnnnnaanaatnccgnnaangttnaanaccgatnntnacncatngatngcanggctgcaaggcancaantccggtcgtgaaaggtgntncnatccccaatcactattattcgagctcgcgcgctggcaccagctcgcgatgatgcgggcaacggcgatctgcgcgaattgcagcagtggcgcgcaccgcactcgatccggcgccgctgcacgatttcatcaccatcgtcgaccacgatctcggcttcgcgctgtaccgcgccgtctccgacaccaaggtcgcgctgtcgagccgcgaccgcgtcgagttccgcttcgcccgcgaaggcatcgatatcggcgccaccgtgacgcgcgacgaattcgaatcctggatcgccgacgacatcgaacggctgggcgcgacggtggacgaggcgctcgcgaaatccggcatcaccgcgcgcgacgtcgagaaggtgttcctgaccggcggcacctcgttcgtgccggcggtgcagcggctgttcgcggaacgcttcggcgaggcgcgattgacctcggcggaccagttcgaatcgatcgcttatggtctcgccttcctgcagcccgggggatccactagttctagagcggccgccaccgcggtggagtccagtttgtaanatnnna

SEQ ID NO: 7786 - DNA, 562 bp, Zea mays
  Peptide Sequence Number=SeqID_13100
  Probeset Number=SeqID_22189
atgagtgaaaaccacaatccgccatccgccgatgagcaaaaagacaacaacacgtcagattccagtcaggataacgagcaatcaccccgtaaacgccccggcaaaaagccgctgatcattctggcgattgtggtggtgattatgctgctggtgggattctggttctggtttagcacgcgcaacattgaaaccaccgacgatgcgttcaccgaaggcgatgccgtgaccatcgcgcccaaagcgtcgggctacgtggtgcagctgctggtaaaagataaccagcgggtgaagaagggcgatctgctggtgctgatcgatccgcgtgacaacgccgcacagcgcgatcaggccaaagcacagctcggtctggcgcaggcgcagctgcatcaggcgcaggcgcagctggcgctggcgcgggtgcaatatccggcgcagcgcgatcaggcgctggccgaccaggagcgggcgcaggccaatttactcaatgcgcaggaagattacagtagtcagcgcggtgttgacccgcgcgcaacctcgcagcgcaatattgggaccgccttgc

SEQ ID NO: 7787 - DNA, 716 bp, Zea mays
  Peptide Sequence Number=SeqID_13101
  Probeset Number=SeqID_22190
cggagcacacaacacaatgacatgcagctcctcttctcgcagatccctgttcccctgcggccgaggcccctgtgctctcgtccatgctctatacaaggccgtgctcggtcatgtcgtatgttatctacaccttgtgctcgcaatggatgacgcgctgcacagaccctgtgacgcggctcccgtggtgcggctgtcgtgggaaatggtcgacatataaccggcgggggcgtggtacatgcttggcaggtgcctgcacacatactcccaaggcaggtgagacacgcaaaagcgaactcactcacggccatcacatgacggagatgcgctgcaactactacagcctaacatactggcgacgatagggcggcataaagaagagagctgataatataggtgagcttctcatgggtgaccagattgacagctctccctaccgggtacatgagaatgaaaacgagtctgacttctctctgcaccacagaagggctcaatgagaatgacgccaagcttcttaagcagtgcacccgagatctttaccaggtcaacatgatgctagacaatctgcctgtcatgcgtttcactaagcagaacgatgtcacggtacagaggactggttttactgcaggttactgtccacccggtgcctgggatgattatatcatcaaccacttgaaggtcaaggactaggtccatgagtatgagggtagaaatgtgga

SEQ ID NO: 7788 - DNA, 751 bp, Zea mays
  Peptide Sequence Number=SeqID_13102
  Probeset Number=SeqID_22191
gggatttaggtgacactatagaaggccttgcgagggttcatttccttcggaacaacagagtcggtgcgtatgatgaaatgaccaagctgatagaggaggccaggaacaacgcgtcggcatacgagaagagatctgagtactgcgagcgggagctgacgaaaacggacttgcagatggtcaccaaactcgaccctctgcgagtctacccctacagataccgtgctgctgtgctgatggacaaccacaaggagaaagaggccgtcgcggagctgaccagggcgatcgccttcaaggcgggcctggacctgcttcacctgcgcgcgggcttccacgagcacatcggggacatctcgagcgccctccgggactgtcgcgcgggcctcctggtgggccccaaccaccaggagatgctgggggctgcaccaccgggggaacaggccggaaccatgagcggagcgccggcctggtgtcccttccgggcgtgatgggaagcccctcttagcccaccccccggcataccagggggtggttttggcccctctccgccttggccttgtagggtttggtggaaaggcactttaggggcctccctgggtcccttcccttggtgaccaaacacccacatttcccttggggtgccttggttgaaagggtgggtggcctaaaagcctttccccttggaaaatattggggccgcctggggattacccctcctaattgttccccccccgggggcccggctggcccggtt

SEQ ID NO: 7789 - DNA, 446 bp, Zea mays
  Peptide Sequence Number=SeqID_13103
  Probeset Number=SeqID_22192
acaatttctagcttggacacccctgatgctgctacaacggttgaactaaccaactgaggcgagccatatgccaatgatgatgcaagcactgatgcctgacgatgacaataatgccgatgcctaatatgatgccattgatgatagtgccaactatgatggcagtaataacaatagctaggatgaagccaccgatgatgatgccaaacatgattacagcagtgatgatgccgagcatgatgcctgagacgatgacgactagtatgatgccaccgataatgatgccgattctgacaccaccgatgatgatgccgagcatgccgtcataaatgataatgccaaacatgatgacagtgccacaatgttactctgattccatctcgcacattatacaacaacaacaattaccattaatgttcagccccacaaccgtggcgatctcacccatg

SEQ ID NO: 7790 - DNA, 671 bp, Zea mays
  misc_feature (8)..(8): n is a, c, g, or t
  Probeset Number=SeqID_22193
ggccgggnaaaaaaattacaaaaaaaaaaaaaaaaaaaaaaaaaaaaaaaaaaaaaaaaaaaaaaaaaaaaaaaaaaaaactcttttccgccctccacccctcgggagttctcaaccccgccgccgccaatgggggccgcgccaccaccgccgccgaagtttgccaagaacttcgctgctgggccgcccccgccgccccaagttggggctgggggccgaacgccaaccccgccctcgtctgaatccgggggaaacgggggcaaaaaaaaaaaaaccatttgggtcggggacctccagaactggatggatgaaaactacctacataactgcttcgggcccagcggggagggggtaacaaaaaaagtaatccgcaaaaggcaaacaggacagtcaaaggggaatggatttgttgagttcttttctcatgcatcagaaaaaaaagctcttcaaaattttactggtcatgggatgccaaacactgaccggccattaaaattgaactgggaatcgaatagaatgggtgaaaagcgatctgaaggggcttctgatcactcaatatttgttggcaatctagctgctgatgtcactgatgaaatgctgctggagcttttctccagaaagaaccgctcggagaaaggagctaaagttattattgaggaaaaaacaggccg

SEQ ID NO: 7791 - DNA, 831 bp, Zea mays
  Peptide Sequence Number=SeqID_13104
  Probeset Number=SeqID_22194
atgacgacgaagcagctgaggcgggtgcgcacgctgggccgcggcgcgtcgggcgccgtggtgtggctggcctccgacgaggcctcgggcgagctggtggcggtgaagtcggcgcgcgcagcgggtgccgcggcgcagctgcggcgcgagggccgcgtcctgcggggcctctcgtcgccgcacatcgtgccgtgcgtcggcgcccgcgcggcggcgggcggcgagtaccagctcctcctggagttcgcgcccggcgggtcgctcgccgacgcggccgccaggggagggggccggctggcggagcgcgacatccgcgcctacgcgggggacgtggcgcgcgcgctggcgtacctgcacgggcggtcgctggtgcacggggacgtcaaggcccggaacgtggtggtcggcggcgacgaccgcgccaggctgaccgacttcgggtgcgcgcgccccgccgccgccgggtcggcgcgcccgttcgggggcaccccggcgttcatggcccccgaggtggcgcgcggggagggccagggccccgccgccgacgtctgggcgctcgggtgcaccgtcgtcgagctggccacgggccgcgcgccgtggggcgacgccgacggcctcctcgccgcggtccaccggatcgggtacacggacgacgtgccggaggcgcccgcgtggatgtcggcggacgccagggacttcctggcgcgctgcttcgagaggcgcgccgccgcccgccccacggccgcgcagctcctggcgcacccgttcgtcgccgacctagacgagaggccgaagcggcaggaggaggggctcccgtcccccaagagcacg

SEQ ID NO: 7792 - DNA, 673 bp, Zea mays
  misc_feature (465)..(465): n is a, c, g, or t
  misc_feature (467)..(468): n is a, c, g, or t
  misc_feature (495)..(495): n is a, c, g, or t
  misc_feature (567)..(570): n is a, c, g, or t
  misc_feature (579)..(579): n is a, c, g, or t
  misc_feature (596)..(597): n is a, c, g, or t
  misc_feature (599)..(600): n is a, c, g, or t
  misc_feature (609)..(611): n is a, c, g, or t
  misc_feature (614)..(614): n is a, c, g, or t
  misc_feature (634)..(635): n is a, c, g, or t
  misc_feature (643)..(645): n is a, c, g, or t
  Peptide Sequence Number=SeqID_13105
  Probeset Number=SeqID_22195
gatgatgcttgtgaaaaaccatgtctgacgaggaacaccactttgagtccaaagctgatgcgggtgcatctaagacatatccgcagcaagctggaaccattcgcaaaaatggttacattgtaatcaataacaggccctgcaaggtagtggaggtttcaacttcaaaaactggcaagcatggacatgcgggagtgtcactttgttggtattgacatcttcacaggcaaaaagcttgaagatattgttccatcttcccataactgtgatgtccctcatgtcaatcgcactgactaccaggtcattgatatctcacaggatggatttctgagtcttctgactgattctggtggtactaaggatgaccttaggctttcaaccgatgaaaatctgcttacgcagatcaaggatggatttgctgagggtaaagatctggctgtgtctgttatgtctgccatgggtgaggancnnatttgtgctcttaaggacattggcccnatgtaatggagccatgtaaactgaatgctggaaagcaaaagttggaattgagatgatatagtatttcattannnncctttattntctctttagcgtggggnngnntactaaatnnnccnaagtttgcaccattcttacnngatgtggnnnaaactattggatgactttatttaggagt

SEQ ID NO: 7793 - DNA, 677 bp, Zea mays
  misc_feature (387)..(388): n is a, c, g, or t
  misc_feature (417)..(418): n is a, c, g, or t
  misc_feature (473)..(474): n is a, c, g, or t
  misc_feature (582)..(583): n is a, c, g, or t
  misc_feature (620)..(620): n is a, c, g, or t
  misc_feature (624)..(626): n is a, c, g, or t
  misc_feature (644)..(645): n is a, c, g, or t
  misc_feature (647)..(648): n is a, c, g, or t
  misc_feature (668)..(669): n is a, c, g, or t
  Peptide Sequence Number=SeqID_13106
  Probeset Number=SeqID_22196
gggggatctgaactgctaaaattcatatgggccttctcgatcacctctgggatgacaccgacgccggccctaggccggagaatggcctaggcaagctccgaaagcatcacacctttgcatcccgatctagcttcggcaaggaatcagacgctgggagcgtgagatcctacggtgaggacttgccggaggaagggatgagagtgacacgtagtatcatgatcgtgaaaccaccaggataccagagtcagagtggatcggctccggcttcccccgccggttctactcctccggtgtctccgttatccggagccagagagcccttccgttttcggagaaggtcgacatcagatgcgtacgagaagacaggccagaacaaaccaagcactnntccttgtttcgatgtctgagaaatgagcnngatcacttcctcctctatggacgtgactgaaaatgtgcctttgctggatccattnntgtctagctgttgtgcgtgtaaatgaatgtgttaatgagttgaccagttgaggtcgtgtgctacttcgtgcgagttagctgtgtgatttattatctcagccttggttnnagtatatttaagctccctaatggctcatcaggtgtanatannnacgtgtaacggtgtagtnnanncgtatgcctcctgatgtatnngtatacaa

SEQ ID NO: 7794 - DNA, 532 bp, Zea mays
  misc_feature (72)..(74): n is a, c, g, or t
  misc_feature (196)..(199): n is a, c, g, or t
  misc_feature (254)..(254): n is a, c, g, or t
  misc_feature (256)..(258): n is a, c, g, or t
  misc_feature (407)..(408): n is a, c, g, or t
  misc_feature (427)..(429): n is a, c, g, or t
  misc_feature (439)..(440): n is a, c, g, or t
  misc_feature (445)..(446): n is a, c, g, or t
  Peptide Sequence Number=SeqID_13107
  Probeset Number=SeqID_22197
ggagccatcattcactcccactcggcatttcatagttcccctttaccaacactgcaaaaccagcaaatggcnnngcttaatctcatacttggctgggtactctgcttaaccctgtggctcaatttatgtcctactatcggcccagcttattcgacaccactatgcaaaaacctgccccaatgtggaacacatatgnnnnagaagcatgataaaaagaaatttcctcaaacatttgtcacagttcctgctactcngnnnctcttcttccatgattgctttgtgcagggttgggatgcttctgttttagtagcatccacgtcaaacaacagagcatacaaagatcaccctgataatctttcattggccggagatggatttgacacggtgatcaaagcaaaagcatccgnngatgctgtcccactatgtnnnaataaagtcnnatgcnntgatattcttgccatggcaaccagggatgttattttactggctggtggaccttactatgaagttgaattgggaagatgtgatgggc

SEQ ID NO: 7795 - DNA, 781 bp, Zea mays
  misc_feature (2)..(21): n is a, c, g, or t
  misc_feature (34)..(35): n is a, c, g, or t
  misc_feature (39)..(39): n is a, c, g, or t
  misc_feature (605)..(608): n is a, c, g, or t
  misc_feature (641)..(643): n is a, c, g, or t
  misc_feature (645)..(649): n is a, c, g, or t
  misc_feature (658)..(659): n is a, c, g, or t
  misc_feature (681)..(683): n is a, c, g, or t
  misc_feature (688)..(688): n is a, c, g, or t
  misc_feature (690)..(690): n is a, c, g, or t
  misc_feature (692)..(693): n is a, c, g, or t
  misc_feature (708)..(744): n is a, c, g, or t
  misc_feature (749)..(752): n is a, c, g, or t
  misc_feature (757)..(768): n is a, c, g, or t
  misc_feature (774)..(779): n is a, c, g, or t
  Peptide Sequence Number=SeqID_13108
  Probeset Number=SeqID_22198
tnnnnnnnnnnnnnnnnnnnnagttgcttctgtnncttntacttgctgtttctttgccgtctggactctggagccgttgatgttccttccccggacaagtagtatgatgggttagcatagcacacaagtcgtcttcttcttcctcctcctgcggtggtggtctgctctgctctgctctgtgtgtgagcgcattgttggcctgggggagtgagaagctgcatattttgttcgtgctttgaacctctgcttctgtcaagatgaagttcatgaagcttggatcgaacccggacacctttcaggacgatgggagcgaagtcagaattgtggaaactgaattggtgagtgatatcactgttcgtctagggaacacaaagttttaccttcacaagtttccacttctatccaagtgtgctcgctttcagaagttgatcccaactactggtgatgaaaatatcgatatccacatccatgacattcctggtggcccaaaggcttttgagatatgtgccaagttctgctatggcatggttgtcacactcaatgcgtataatgtcgttgctgcccgctgcgctgcggagtacttggagatgaatgaaactgtcgannnnggtaatctgatctacaagattgatgtcttcctnnncnnnnncatattcannagttggaaagattccattattnnncttgngncnncaaaagctcatttannnnnnnnnnnnnnnnnnnnnnnnnnnnnnnnnnnnnttgannnnattgnnnnnnnnnnnntgttgnnnnnncc

SEQ ID NO: 7796 - DNA, 608 bp, Zea mays
  Peptide Sequence Number=SeqID_13109
  Probeset Number=SeqID_22199
cgacgaaacctgggcaggccccgggacccctttcctccccgccgaagccttcgaccgcgccatggcttgcttttgggcagccttcgttggcgccaagtttttcaaggagtggaaccggctgttttggttgcccacaacggaaaaggcggcggaggcgcttggggtttttgtccccgtggtggagaccctggagccggccttcagggagtgctccaaagggaaacccttttttggcggggaccccgtcgggcttgtggacatcgcgctcgggagctttgtggtgtggatcagggtggtggacaaggcggccggggtaaaacttttggacgaggccaggtttccggcctttacggggtgggcggagcgctttttggcggtggacccccttaaagaggttattccggaccccggaaggctgttggagccctccagggggtttttggctaaacgggccccccccccggggttctgatccctgtaactgtaagcttgtaacaccaagcccagggtttggggacttttccgggcgttaacaggggggtactggagttcaaaaaaggcttttattttgtcccaacgaataaaccatactttatttggcttttttt

SEQ ID NO: 7797 - DNA, 653 bp, Zea mays
  misc_feature (523)..(524): n is a, c, g, or t
  misc_feature (630)..(633): n is a, c, g, or t
  misc_feature (640)..(645): n is a, c, g, or t
  misc_feature (649)..(650): n is a, c, g, or t
  misc_feature (652)..(652): n is a, c, g, or t
  Peptide Sequence Number=SeqID_13110
  Probeset Number=SeqID_22200
gagtcaaagcaattcacctcatccacccaccctgcaaatagtgacccatctgatccgatcagaaatggatgctgaaacagtggtacatactggaggttgtcattgcaagagagtaaggtggaaagtggttgctccttcaagtgttgtggcatgggactgcaactgctcaaactgctacatgagagccaatactcactttattgtacctgctgacaattttgagcttttgggagattctgggaagtttcttacaacttacacatttggcacaaacactgcaaagcacacattctgtaaagtctgtggtataacttcattctattatccacgctcaaacccagatggggttgcagtttcattcaggtgtgttgaccctggaacattgacaaacattgaaatcaggcatgctgatgggaagaattgggaacgcacaatgaaagagataggtatctcttcatattcaaaggtgcacaagtaacttccatcataacatcaaggactagaaaacagttgagatcattannagtcctgcatgaagtttatattccctcaacacattttgtgttgctactataaatactctggacaaaatagatttgacatgatgcaataagaaaaataaatgttcannnnaaaaaannnnnnaatnnana

SEQ ID NO: 7798 - DNA, 633 bp, Zea mays
  Peptide Sequence Number=SeqID_13111
  Probeset Number=SeqID_22201
gccggccgggccggcaaatgtgaacgtcaaacagtgtctcttttccagttccagacctgaagaaactccgaccggccggcgggcggtggcggcagccggcaggatctgtgccgcgatgccgaacgtcgaacacggcgcggatggaggaccccggcgccgccctgcgcagcacccccacgacctcccatatcatccaccctgcctacctccactccacgcacattgtcccccagggccgccgcctccccccctgccccgctccgccccccatcccccccgcctccacaccccccccgcctcccgccacctcttacccctcccccccccccccccccccccgcccccccccccccccccccccccctccgccccccccctcctatcctctctctcacccccccccccccccccccctcacccccctcccttcctcccacccacccccctcccccccctccccctccccaccccccccccccccccccccccctcccccccccccccttcccccccccctccccccccccccccccccttccccccccaccccatcccctccccctcccccccccccctccccccccctcccctccccccctccctcctactattctccctttccccccccccccc

SEQ ID NO: 7799 - DNA, 683 bp, Zea mays
  misc_feature (669)..(670): n is a, c, g, or t
  misc_feature (672)..(673): n is a, c, g, or t
  Probeset Number=SeqID_22202
gagaagatggtagaaggttgtgtgaacctgacgttgttgctcagcttcatctcatctttcgcaatcgctcatgcttcttctccatgctctatcactggtgcagagttaccgctggtgagaaatatcagtgagattcctcaggataactatggtaggccaggtctctctcacataactgttgcaggttcaatcttgcacggattcaaagaggttgaagtatgacttcaaacattttcaccaggaacacacaccccgattcacatgcattcctgtgaagaagtttttatcgtcctcaaagggagtggcactctttatctcgcatcagattcacatggaaaataccccggaaagccacaggagcattttatccttccaaatagcgcatttcatattcctgttaatgatgctcatcagctatggaacaccaatgagcatgaggatttacaagttcttgtcataatatctcgtccgccaattaaagtgtttatatatgatgactggtccatgcctcacagtgcagcgaaattgaaatttccctactactgggatgagcgatgttatcaagaaccttcaaaggacgaactgtgacttatagtcacggtttacacatcttttattgctgagattttctatcgctgtaaactattttcttaactagaagttcaaaanngnnaagactgttt

SEQ ID NO: 7800 - DNA, 641 bp, Zea mays
  Peptide Sequence Number=SeqID_13112
  Probeset Number=SeqID_22203
atgaaactgaccaacaacaccctgctcatcaccggcgcaaccagcggcattggccgccgcctggccgaggtttttcacgatcgcggaaaccgcgtcattatcaccggcagacgccaggcgctgctcgatgagatcatcgcccagcgtccggccattactggctttgctctggacgttaatgacaccactgccctcgcccgctgttccgcggcgattcacgcgcagtttccgcatatcaacgtgctaatcgccaacgccggtatctcgcagccggaaacggtgacggcagacgaatggaccagtgatattgctgagcagatcgtgatgaccaacattctcggtgtgattcgcgtcaccgccgcttttttgccgctgctgcgccgtcagccgcaggccacgctgatggcaaccagttccgcgctggccttcctgcctctggccagttttcccacctactgcgccagcaaagcctttctgcattcctggctggtttcgctgcgtcatcagctgcgtgatacctcggttgaggtgctggaaatgctgccgccatatctacagacggcgctgaccggtaatcaacagctcagcgatccccgcgccatgccgctggacgactatatcgcgcagattctgcaggtcga

SEQ ID NO: 7801 - DNA, 509 bp, Zea mays
  misc_feature (4)..(4): n is a, c, g, or t
  misc_feature (55)..(55): n is a, c, g, or t
  misc_feature (58)..(59): n is a, c, g, or t
  misc_feature (61)..(61): n is a, c, g, or t
  misc_feature (69)..(69): n is a, c, g, or t
  misc_feature (78)..(80): n is a, c, g, or t
  misc_feature (94)..(94): n is a, c, g, or t
  misc_feature (127)..(127): n is a, c, g, or t
  misc_feature (146)..(146): n is a, c, g, or t
  misc_feature (166)..(166): n is a, c, g, or t
  misc_feature (169)..(169): n is a, c, g, or t
  misc_feature (207)..(207): n is a, c, g, or t
  misc_feature (218)..(218): n is a, c, g, or t
  misc_feature (220)..(221): n is a, c, g, or t
  misc_feature (226)..(226): n is a, c, g, or t
  misc_feature (229)..(229): n is a, c, g, or t
  misc_feature (237)..(237): n is a, c, g, or t
  misc_feature (243)..(243): n is a, c, g, or t
  misc_feature (245)..(245): n is a, c, g, or t
  misc_feature (256)..(256): n is a, c, g, or t
  misc_feature (285)..(285): n is a, c, g, or t
  misc_feature (304)..(304): n is a, c, g, or t
  misc_feature (322)..(322): n is a, c, g, or t
  misc_feature (332)..(332): n is a, c, g, or t
  misc_feature (343)..(344): n is a, c, g, or t
  misc_feature (352)..(352): n is a, c, g, or t
  misc_feature (355)..(355): n is a, c, g, or t
  misc_feature (378)..(378): n is a, c, g, or t
  misc_feature (388)..(389): n is a, c, g, or t
  misc_feature (441)..(441): n is a, c, g, or t
  misc_feature (444)..(444): n is a, c, g, or t
  misc_feature (448)..(448): n is a, c, g, or t
  misc_feature (485)..(485): n is a, c, g, or t
  misc_feature (509)..(509): n is a, c, g, or t
  Peptide Sequence Number=SeqID_13113
  Probeset Number=SeqID_22204
atcnaccatattattgagaccaaccagcaacatacaatgtggaatacggaatcanctnnanagcaacantggcggccnnnatattttccatccntatgctccttgctctttctgcatgtgttggttncgcgaccatttttcctcantactcagaagctcctatagntgnccttcttcccccataccttccatcaatgaccgcttcantatgtgaaaancnngcccntcnaccctacnggttcncncaagcaatcgnaagaagcaacttacctttatcacccctgntctttcaacaatcgacagngcctatctttggtgcagncattggtacnaaccatcaggnnacaacagntgnagcaactcgtgctaccagtgatnagccgagtanntctggcaaacctttctccctactctcagcaacaacaatttcttccattcaancanctgnctacactgaaccctgctgcttatttgcagcaacaacnactactaccattcagccagctagn

SEQ ID NO: 7802 - DNA, 379 bp, Zea mays
  Peptide Sequence Number=SeqID_13114
  Probeset Number=SeqID_22205
tgcaggtcgctgggctcaaagccacgtaccgccagcagcaggccgatcttcaggcggccaaggattctgtcgagttcgacgcccgcaattatgcgcggcagaatgcactagttgcctcctccgcgacatcgcgcattgcctatgaccgggccgagacggacctgaaggttgcccagcagcatgtcgcctcgatccagcagcagatcgccagcaccgtggccgcactgaacggtgatccgaatatcgagattgatcgccatccattggtccgcgcggcgcaggcgcagctcgaccgcgcccggctcaacctctcctacgcaacggtagtggcgcctgaggatggcatcgtcacggaggtcgataatctgcaggcatgcaa

SEQ ID NO: 7803 - DNA, 643 bp, Zea mays
  Peptide Sequence Number=SeqID_13115
  Probeset Number=SeqID_22206
tgcagtcgctcgacgacctggcctgccgggtcaagcgcatcgccaccggctgggaggtggagctgcgcatcgcggtaagcgcggtgctgccctggcggccgctgtacgacctggtcgaggaattccaggcgctgggcagcgcgacgaccctgcgcttttcgaccgaggtgctgagcggcaactgggatgcgttgacctcgaaccgcgccgacctcgtgatcggcgcgggagcggccggcgagccgaccggcccctaccgctcacagacgatgggacaggcgcaattcggcttctgcgtggcggcgcatcacccgctcgcatcgctgccgcagccgctgagccgcgccgacatcacgcgctactgcgcggtggtggtggccgatacctcgcgcaacctgccgccgcagtcgcgcggcatcctggcggagcagccgacgctggtgatgcccacgatgcaggccaagatcgaggcccagattcgcgggttgggctgcggctacctgccgttgacgctggccgcgccctacctggcgcagggcgtgctggtggtctgcgataccgatgaggggatgtcgctgaccgagcatgtggcgtatgcgtggcgggcggaggcgcccggcgaggcgttgaagtggtggctgca

SEQ ID NO: 7804 - DNA, 706 bp, Zea mays
  misc_feature (661)..(663): n is a, c, g, or t
  misc_feature (666)..(667): n is a, c, g, or t
  misc_feature (669)..(669): n is a, c, g, or t
  misc_feature (695)..(698): n is a, c, g, or t
  Peptide Sequence Number=SeqID_13116
  Probeset Number=SeqID_22207
ggacacacatctatcatatcttttcatttctccatatcactaatctcaaaatcccaatggcacacaccgaatcgggatctaccaacggcgatgtaactcctccgccgcgtaaggtggcattgatcaccggaattaccggccaagacggttcctacctaacggaattcctccttaacaaagggtacgaggttcacggtctgatccgtcgttcctcaaacttcaacacccaacgaatcgatcacatctacgtggacccacacaacgctcacaaagcacgcatgaagcttcactacgccgatctctccgacgcctcttcactccgccgttggctcgacactgtcctccctgacgaggtttacaacctcgccgcacagtcccatgttgctgtctccttcgagatccctgattacaccgccgacgttgttgccaccggtgccctccgtctcctcgaggctgtcaggtcccacatcgccgcttccggaaggtcccacatccggtattaccaagccgggtcatcggaaatgttcggggcaaccgcgccgccgcaatcggaaacttcccccttccaccctcgttcgccttacgcggcgtcgaaatgcgctgcgcactggtacactgttaattaccgtgaagcctatgggatctttgcctgcaatggggnnntcnncnaccatgaatcaccacgtaggggtgannnnttcgtgac

SEQ ID NO: 7805 - DNA, 431 bp, Zea mays
  Peptide Sequence Number=SeqID_13117
  Probeset Number=SeqID_22208
tgcagtgcgcgcgcttggtggcgccgctcgccgagcgcgtgcaccgagacggcggccggctcgcatggaacacgtttccgcaggtcggcacgctgatgcagcgcagcctcggcgcacatgccgacgtattcagcgcgggcggcgatgtcgacgaactgcccgcgttcgactacgaagtaccgctgatcggcctgccgctgatgctcgggatggagacgtcgacgctcggcgcgtcggtgccgtacctgcatgccgatccggacgcacgcgacgcgtggcgcgcgcggctcgcgggagagaggcggctgaaggtcgggctcgtctggacgggcagcgcagggcaccagcgcaatccgttccgccgcgtgggcctcgaacgctatgccgacgcgtttcgcggcgtcgaccacgtcgcgttctattcggtggaa

SEQ ID NO: 7806 - DNA, 609 bp, Zea mays
  misc_feature (6)..(7): n is a, c, g, or t
  misc_feature (19)..(19): n is a, c, g, or t
  misc_feature (179)..(180): n is a, c, g, or t
  misc_feature (605)..(606): n is a, c, g, or t
  Peptide Sequence Number=SeqID_13118
  Probeset Number=SeqID_22209
tgcganncaatcagcagtntcaagccttgagggcaatggtgcaagcaaaccctcaaattttgcagcccatgcttcaggaactgggaaaacaaaatcctcacctaatgcagcttatccaagagcatcaagctgacttcttacgccttataaatgaacctgaaggagaagagaacctaccnnagtcaggtggcttctgggatgcctcagaccatcacggtcacccctgaagagcatgaggccattcaacggcttgaagatatgggatttgatcgagatcttgtgttggaggtgttctttgcttgcaataaaaacgaggatctggcagccaactatctactggatcaccaaaatgaatttgatgactagttaaaattctattttcatcttctccaactgtggtctttcttgtgtctagcatttttctctgctggttctttcgtgacatttgttagccttctaaactctttggagtgccaatgttaatattttataccttaatagtcttcgagaaccatagcatctgtagattgtttaacactgtttgttagaaaatagaattgtgttggggaaaggaggccatgagttcctttattcttctccagctnnttg

SEQ ID NO: 7807 - DNA, 701 bp, Zea mays
  Peptide Sequence Number=SeqID_13119
  Probeset Number=SeqID_22210
gaccaccacaattctcctttctaccctaggcctacatcatgtcggctagcaggagacgcccgccccgactaacaagaagtttggaaagggtgagcgatcggtgccgcattcctcgcaaaaggcctccaaatactaccctgccgaggacgattcgaagccaaagcaggtccgcaagtccatccgtcccaccaagctccgcccgtctctccagcctggtaccgtcctgatcctcctcgctggccgtttccgtggcaagcgggtcgttctcctcaagcatctctcccagggtgtgctcctcgtcaccggtcccttcaaagtcaatggcgttcctcttcgacgggtcaatgcgcgctacgtgatcgccaccagcactcaggtcgatctcaaaggtgttgatgagaagattgttgagaaggccagtgcggatgattatttcaccaaggacaagccagcaaagggcaagggtgaagatgctttcttcaagcaaggcgagaagcctgagcccaagaagattgagagcagcagggcggaggatcagaaatcggttgacaagggtctcttgagcaacatcaagaaggagcccttcctcagcagttacctcgcatcaactttcagtctgcgcaaaggcgacagaccccacgagatgaagttctaaggggatcgctagagtccgagcgatcgcttgaagacgggagcgacag

SEQ ID NO: 7808 - DNA, 704 bp, Zea mays
  misc_feature (637)..(639): n is a, c, g, or t
  misc_feature (641)..(642): n is a, c, g, or t
  misc_feature (644)..(645): n is a, c, g, or t
  misc_feature (679)..(680): n is a, c, g, or t
  misc_feature (687)..(692): n is a, c, g, or t
  Peptide Sequence Number=SeqID_13120
  Probeset Number=SeqID_22211
ggaggttttgcgagtgagtgagtgagtgagagtggttgttgaatagatgatggtggtgacccaacaagcgaagtgtgaagtgggaagagtaatgatgagtgagagtgagagtgaaaggaaagaagcatcggattccatatctcatctcacagatcccaattccaaaatggcttcagtttctcccagcttgtggctggctccaaacccaagcaaaagatggggcgaaatcttcttccttctctatacccctttctggcttaccctttctctcggcattgttgttcctttcaagctttacgagaacttcacagaattggagtatttgcttcttggcttggtttcagctctcccttctttcttcattcctatgctcctcgttggaaaggctgatagaggcatgtcttggaaggaccgttattgggtcaaggccaatctctggataataatcttcagttatgttgggaattatttctggactcattactttttcacagttctaggtgcatcttatacctttccatcatggaaaatgaacaatgtaccacacacaacattcctactcactcatgtttgcttcctcttttatcatgttgcatcgaacatgacactgaggcgattacgacattttactgctgannngnnannaacaattcgatgggctactgaagctgcatggatnnttgctcnnnnnntatttctagcat

SEQ ID NO: 7809 - DNA, 694 bp, Zea mays
  Peptide Sequence Number=SeqID_13121
  Probeset Number=SeqID_22212
gagtttattcaacgacacatatagcttctcccgcaacaacaagaatttgacagtgaacaagaaaggcatctcctggaagagtgatagggagcacaaatttggaaaagatgttttccctaaaaacttccagaatagctctattataggtggtaaacatctaaatgaatccataccattgagtgagcaggaggatcttattgtctggatgcgaactgcagccttgccaaccttcaggaagttgtacggaaagataggggtggatctgaatgaaggtgagaacataactgtaacacttcaaaataactacaacacttacagttttaatggcaagaaaaagctcgtactgtcaactactagctggcttggtgggaagaacgacttccttggcattgcttatctcaccgttggaggattgtgcttctttttggctttggcttttaccattgtatattttgtcaagccaaggcaactgggagatccctcgtatttgtcatggaataggaatccaggaggccactgagcaaagaaactaattatgcttatttggtatttccaatattacagggcttgggtatgctacagtggctggtgtagtttttgtacatctttgttaagtaattactagtaacacttgtgaatttaggtcttcgtctccccccaagcataagaaaaccaaatcacattttctaatttt

SEQ ID NO: 7810 - DNA, 772 bp, Zea mays
  misc_feature (136)..(136): n is a, c, g, or t
  Peptide Sequence Number=SeqID_13122
  Probeset Number=SeqID_22213
cgaggccggccgggccgggattatctgtcataatgccaggcgaacccagatcctatatgtctccaacggcaaaatcaacaaaaagatctccaactggggcgccaccatcacctccctcctcgtccccgacgccctngggagtgtcgctagacgtagcggctccggatacgaggaccttggatccatacatgaaatgaatgacaccttattttggatgcttagtcggacgcgttgcgaataggatctatgatgggaaattcacaataaaagcacttgagtattcattatctgcctacaaagcacctaacaggcttcctgcagctacgaagagatctgataacgtcagagtgggcatcgccgcgtgagaagaaagatacgcaatgaccttccataactgttcactatcacagtatcggagggtaaacaacgctatccaggctgatgtaacgcttagagcgacatactctcttcctggagctactaatcgaaggtttgacatggaaggtacaccatagaactaagcagctccgataagactgtggcaagactcctactggaacctcgcaggtcacgcctgcggcgacatcttaaaacactcgctgcatatctgcggcaaggacatcactccgggcgatgagaacacaattgccaccggcgagataatgcccgacgatggcacccctttcgacttcacgacggatcgcaggattggcgagagcatcgacagtgttcctggaggatatgatcataactacctgctgaactgtggcga

SEQ ID NO: 7811 - DNA, 835 bp, Zea mays
  misc_feature (1)..(6): n is a, c, g, or t
  misc_feature (9)..(9): n is a, c, g, or t
  misc_feature (719)..(731): n is a, c, g, or t
  misc_feature (748)..(749): n is a, c, g, or t
  misc_feature (765)..(765): n is a, c, g, or t
  misc_feature (776)..(781): n is a, c, g, or t
  misc_feature (784)..(785): n is a, c, g, or t
  misc_feature (802)..(804): n is a, c, g, or t
  misc_feature (808)..(820): n is a, c, g, or t
  misc_feature (822)..(822): n is a, c, g, or t
  misc_feature (835)..(835): n is a, c, g, or t
  Peptide Sequence Number=SeqID_13123
  Probeset Number=SeqID_22214
nnnnnnttnaaacccttgcggctgctcccgttcttgtttcccctccgtcggctgctgaccggattcgcctcacaggctcgggatccgggcgttccgcgcgatgggcggcggcggcggcggcggcgcggaggaggaggagctgacggcgcaggagacagcgctctacgaccgccagatccgcgtctggggcgtcgatgcccagaagaggctaagtaaggcgcatgtgcttgtgtgcggcgtgaacggtactactattgagttctgcaagaatattgttctagcaggagttggcagtttatccttgatggacgatcacatagtcacagaggatgatctcaattcaaacttcctaattcctcatgatgagagtgtgtatggtggtaaatcacgggcagaggtttgctgcgagtccttaaaagatttcaatccaatggtccgagttgctgttgcaaaaggtgacccatcacttattgatggaacattcattgacaggttcgacattattgtactcagccgcgcatctcttaaaacaaagttgtttattaatgacaactgccggaaaagaagcaagcatattgccttctactctgtagactgcaaggattcttgtggtgaaatatttgttgatctgcagaaccatagctatcttcagaagaagcctggaggagaacctgaacagcaggagttgaaatatcctagtctgcaggaagctatttctnnnnnnnnnnnnnatctgtccaaaaaaacnnctaaattgtactacgncatgagagtcnnnnnnagnnatgaatcatctgaaggnnncgannnnnnnnnnnnntnactttctgatctn

SEQ ID NO: 7812 - DNA, 500 bp, Zea mays
  misc_feature (24)..(25): n is a, c, g, or t
  misc_feature (162)..(167): n is a, c, g, or t
  misc_feature (169)..(169): n is a, c, g, or t
  misc_feature (180)..(181): n is a, c, g, or t
  misc_feature (450)..(450): n is a, c, g, or t
  misc_feature (482)..(488): n is a, c, g, or t
  Peptide Sequence Number=SeqID_13124
  Probeset Number=SeqID_22215
ggtgtcttcaggactcgggttgtnngtgaagcagagttgatatagagaaaggggagaggcatggcatcatccttgtcgagcatccttttcaagggaatcgcagctcgttctcttacctcacctctaactcgttcctcttattatggaatgagaaacttcacnnnnnngncaaatgatccnnacacacatgatgatttcaagccggctaataaacttgagagttctggcatttctttgtcagatgttattgagcaggatgtcaaggataatcctgttatgatttacatgaaaggtgtgcctgattttccgcagtgtggatttagttctcttgcagttagagttctaaaacattatgatgtcccattaagcgctagaaacatcttggaggatcctgaactgaaaaatgctgcaaaagcctttagtatctggtcaacattttcacaagttttnattacgggagaatttgttggtggatcacatannnnnnntaatatgcacca

SEQ ID NO: 7813 - DNA, 726 bp, Zea mays
  Peptide Sequence Number=SeqID_13125
  Probeset Number=SeqID_22216
ccggccggagagacggtcgccatctcccctgttcggttttaggagacctgtgccgcccctccggccacgcgagctcgccgaaatggtcgcccacaggttccatcagtaccaggtggtggttcgtgcgctgccgaccccgaccgatgagcacccctagatctaccgcatgaagttctgggccactaacgatgttcgcgccaagtccaagttctggtacttcctgataaatatgaagaaggtgaagaagagcaatgtccagatgctcgccatcatcgagatcttcaagcgcaacccaaccaccatcaagaactacggtactctggctagcggtaccatagcaccgtacgatgtaccacaacatgtacgatgactacctatacacgaccctggatgttatcgtggagcatatgtacaacgatatggactcgcgccaccgcgtgatgtccccctgcatccagatcatcaatactctaatggctcacttcaagctgtgcaagagggacaacacccaagcagttgcacaactcggcgatcgagttcccactcgtgtaccgcaaggagaatgctgccaccactgaattcacgatcacctttgagtcgtccaggaccaacctgctcatgtgatgtgcctcaccggactggctgtatacacctgagttttgtgtctactgcccagagagatcaaggtttttgcctctgcaatgtttgctgtccctagactgatga

SEQ ID NO: 7814 - DNA, 693 bp, Zea mays
  misc_feature (10)..(11): n is a, c, g, or t
  misc_feature (13)..(13): n is a, c, g, or t
  misc_feature (155)..(158): n is a, c, g, or t
  misc_feature (167)..(170): n is a, c, g, or t
  misc_feature (562)..(566): n is a, c, g, or t
  misc_feature (604)..(604): n is a, c, g, or t
  misc_feature (645)..(649): n is a, c, g, or t
  misc_feature (656)..(659): n is a, c, g, or t
  Peptide Sequence Number=SeqID_13126
  Probeset Number=SeqID_22217
tagcaatttnnanaccataaaacctaatttcgcagttcctgttcttctcaaattttcgtttcaagatgcagatctttgtgaaaactttgaccggaaagactatcacccttgaggtggagagttcagatacaattgacaacgtgaaagctaaaatnnnnacaaggaannnntcccacctgaccagcaaaggctcatatttgctggtaaacaattggaggatggtcgcacccttgctgattacaacattcaaaaggagtccacccttcacctcgtgctccgcctcaggggtggcatgcaaatcttcgtcaagaccttgaccgggaaaaccatcacccttgaagttgaatcctctgataccattgacaatgtcaaggccaagattcaggacaaagagggtatccctccttatcagcagaggttgatttttgctgggaaacaacttgaggatggaagaaccctagctgattataacatccagaaggaatctacccttcacttggtgctcaggttgagaggtggcatgcaaatttttgtcaaaactttgacaggaaagacaataacnnnnnaggtggagagttcggataccattgacaatgtcaaggcnaagattcaggacaaggagggtattcctccagatcagcagannnnnatttttnnnngtaaacaccttgaggatggaagaacccttgctga

SEQ ID NO: 7815 - DNA, 513 bp, Zea mays
  misc_feature (6)..(7): n is a, c, g, or t
  misc_feature (20)..(21): n is a, c, g, or t
  Peptide Sequence Number=SeqID_13127
  Probeset Number=SeqID_22218
gttggnnaaattgcaaaaannacatgcaagccagaatatgcatatggtagtgcaggatctccgccagatattcccccagatgcaacacttgtttttgaagttgagctagttgcctgtaggccacggaaaggctccagtttaggaagtgtttcagaggagagggctttgcttgaagagctgaagaagcagagagagcttgctgctgctgccaaagaggaggagaagaagaagagggaagaagcaaaagcagcagctgcagctcgtgtgcaagccaagttagaagccaagaaaggtcaaggaaagggtaaagggaaagcaaagtagggacttcaaacatctacatgaacctgatgtataagataatcaaatagctatttgtccagcatctgtcttctctataagcccatcctaaactattgtttaaattaagtgccagactgacatcattcagatacatgatatggttatactatgtttggtagcttgctatggaataaacaggtaattgcagtc

SEQ ID NO: 7816 - DNA, 1779 bp, Zea mays
  misc_feature (109)..(109): n is a, c, g, or t
  misc_feature (140)..(140): n is a, c, g, or t
  misc_feature (144)..(144): n is a, c, g, or t
  misc_feature (146)..(146): n is a, c, g, or t
  misc_feature (149)..(149): n is a, c, g, or t
  misc_feature (152)..(155): n is a, c, g, or t
  misc_feature (160)..(160): n is a, c, g, or t
  misc_feature (197)..(197): n is a, c, g, or t
  misc_feature (203)..(203): n is a, c, g, or t
  misc_feature (286)..(286): n is a, c, g, or t
  misc_feature (346)..(346): n is a, c, g, or t
  misc_feature (575)..(575): n is a, c, g, or t
  misc_feature (578)..(578): n is a, c, g, or t
  misc_feature (712)..(712): n is a, c, g, or t
  misc_feature (737)..(737): n is a, c, g, or t
  misc_feature (819)..(819): n is a, c, g, or t
  misc_feature (821)..(821): n is a, c, g, or t
  misc_feature (972)..(972): n is a, c, g, or t
  misc_feature (1030)..(1030): n is a, c, g, or t
  misc_feature (1087)..(1087): n is a, c, g, or t
  misc_feature (1380)..(1380): n is a, c, g, or t
  misc_feature (1568)..(1568): n is a, c, g, or t
  misc_feature (1602)..(1602): n is a, c, g, or t
  misc_feature (1621)..(1621): n is a, c, g, or t
  misc_feature (1684)..(1684): n is a, c, g, or t
  misc_feature (1700)..(1700): n is a, c, g, or t
  Peptide Sequence Number=SeqID_13128
  Probeset Number=SeqID_22219
aaaaaaaaggaagaaggcaaaaagaaacaaaagactacaagagggacacacagggggagagggcgaaaaagagaggacaggagcgacggaacgcggagcgcaaagaaanattaaagaagggtggacaaccaggaaagaangggncnccnccnnnnccccncacggtttcccccaaaacaaacaggaggaccaacgancggacnacgaaggagacgaagcgagacagaggaaggcgggcgacggcgggcggagagcggcccgagccgcgcagaaaaagcaggagcancacgaaggagaggcgcagacaaaagaggaggcgagagcgcgggacaaacagcagaaagangcaaaaggagagaagagagagaggggccgcggaggagcagagacagggaggagacacccaacacagacgacgacggacccgccgcgcacgagcgaacggagcgagggcggcggcgcggggggcagcaagcacagagacagagcggagagaaaaagaagaaagaaacggacacaccaacgcgcacaccgcagacgcgacaaaaagcgccggggcgggggaggacgagagngangcgaggagagacagcggcgacgaaaaggcgagagagacggccggaggaacgacagaagagcggacacacggacagaagggcacgagacgagccgaggaacgaggagcaagagaacacgaggaacggaaacgcanaggaacagagagggacagggaaganagacggaggaaacgagaacgagaacaagggacacggacggaaacagggaggacaacaaggagacgcgagcgcgaagaagagngnacggaaggcggagagggcaaagcggagggaacgaggggagcacaacagaagccggacggagccgacagagaagaaggacggaggaagaacaacgcaccaagcgagcgcgaggcgacacggcacgaaacaacgagagacgaacgagacaaanaggcggcgcgcgcgagcggacgaagaccgaacgcaacgacagagagagaccggagggnaagcgacgaagaacaggaagacacacaaacaaggcgcggagaaagaggaacacaagngcagggagggaacgaaagaagaagagcgaggagaaaaggcgaagaggacaaagggaggacgagaagagagaacgggagcgaaggaaccagcggcaacaagagacgaagacgggaacagacgacgcggcaaggcaggacccggaagagtgcggcggagacgaagagcggagacgagataggaagagcgcgggtggcaacgagagaagagtagggaagacgaccagaagacggagggagaagtggtagtagcgagtgcgcgcggacagcagaggcggctcacaggaagggagcanagagcgaggacgaaagtggagggagagacgagagcaagacgacgcgcagagagagcaacagcgagagacaagcggaagaagagatgacgtacacgacgacagcaccagatgcaacgagacagaagacggaacgagatacgcgaggagagagccgagaagagcgcagacaggaggacacagacgagagnatgcgagcgcgggcagcaaggacgcgagacaccncactcacagccaggaacgncaacgagagaagcgaacagagcacgagaatcacgaacagaaggacgcgaagagcggaactgcnaagtactggagcgagnagcgacgcggagacaagagaaggtggacgccaggtcgcgcgtgggaggcagaaacacgatcagagcacggagcacgagg

SEQ ID NO: 7817 - DNA, 452 bp, Zea mays
  misc_feature (42)..(44): n is a, c, g, or t
  misc_feature (130)..(135): n is a, c, g, or t
  misc_feature (137)..(138): n is a, c, g, or t
  misc_feature (180)..(181): n is a, c, g, or t
  misc_feature (426)..(428): n is a, c, g, or t
  misc_feature (437)..(438): n is a, c, g, or t
  Probeset Number=SeqID_22220
atctccgcatcaagaagatggttactttccggtttcaccagnnncaggttgttggtagagcccttccaactgaagccgatgagcatccgaagatataccggatgaaactctgggccactaatagaagttnnnnnncnntcaaagttttggtatttcttgaggaagctaaaaaaagttttnnttacaatgggcagatgttagcaatcaatgagatatttgagaagcaccccacgacatttaagaactatggcttatggctacgataccagagcagaactggttatcacaatttgtccaaggaatatcgtgataccactcttaatggtgcagttgagcaaatgttcactgagatggcctcacgtcaccgtgtaaggtttccttgctttctgatcatcaaaacagcctccatcccagcgaagctgtgcnnnagagagagnncagagcagttccat

SEQ ID NO: 7818 - DNA, 590 bp, Zea mays
  Peptide Sequence Number=SeqID_13129
  Probeset Number=SeqID_22221
cccacgtcgtcctccgtctttgtgtgctattctagggcctactgttcgccttctgggcctccttaaataggagccacctgccacctgctgactcctggctgcactctgatgagctgcccgcatgaacaagtcgggacatgagatcaggactacctctaccacaacgcatcctgcacttgaacgaaaggatactgtcatccatgtcacacgaggtctgcttgttggacaccctaaggaatgatctggagataggtcctggtgctccaaccatatacaactgcgtgattgagataccaaggggcaacaaggataaatatgaacttgacaagaaaactggactgatcaatgaggaccgagtgctgtattcatcacatgtgtaccctcacaactatggattcattcctcgcacgcatctgagaagacagtgatcctttggatgtactgggtataatgcatgagcctgagatcccagactgattcctacgtgcgaatgccatgaggcttatgccaatgattgatcacggagaggcatatgacaagatcattgcagcgtgcgctgatgatccccactgcaggcattacaatgatat

SEQ ID NO: 7819 - DNA, 703 bp, Zea mays
  misc_feature (26)..(27): n is a, c, g, or t
  misc_feature (166)..(169): n is a, c, g, or t
  misc_feature (615)..(618): n is a, c, g, or t
  misc_feature (686)..(688): n is a, c, g, or t
  Peptide Sequence Number=SeqID_13130
  Probeset Number=SeqID_22222
gggtgcgcaccacgctatatcttcgnntgttcgcgtgtctggtctttcaagtggtgactagcgagtgaccttagcattctctgtttcttctagaattcgcgtcgcgttttagttctctctggttcgcgtcccacgacgtcgttttcaactggttccgagaatctannnnttttctggttctgtgcaagaagatgacgaccatggagagcttgattgggttggtgaaccgaattcagagggcttgtactgtgcttggtgactatggtggtgctgatggtaacgccttctcttctctctgggaagctcttccttctgttgctgttgttggtggccagagttcggggaagtcttcagttttagagagcattgctggtcgtgactttctgcctagaggatcagggattgtgacaaggcgtccattggtgttgcagctgcataagatggaaagtgggtcacaagaatatgccgagtttcttcacctgccaaggagaaagttcactgattttgccttggtccgccaggaaattcaggctgaaactgatagagtaactgggaagacaaaacaaatatctcccattccaattcatcttagcatctattctccaaatgttgtcnnnntaaccttgattgatttaccgggtctgaccaaagtggctgtagagggacaacccgagagtattgttttnnnaattgaaactatggt

SEQ ID NO: 7820 - DNA, 690 bp, Zea mays
  Peptide Sequence Number=SeqID_13131
  Probeset Number=SeqID_22223
gagcaaacaaaatcaaagaagaacaatgggctctcacactccaacaacgcttgagctgataaaggaagaaatcccggtgaaacaagaacctctgcttttgaatggagacatcaaaactggtctcgtcctcgtcgacgttgtcaatggcttctgcactgtcggggctggcaatttcgccccgagagaacccgatgagcaaatttctaagatggtggaagaatcggtgaggctttctagaaagttcgcagagaagaattggccaattttggctttccttgattgccatcaccctgacattcctgaacccccttatcctccacactgtcttattggaacagatgaaggaaagttggttcctgagctcctgtggttggaaaatgaaccaaatgcaacactcaggtgcaaagagtgcattgatggattcgttggttcatatgagaaagatggctctaatgtctttgttgattgggtgaaaaataatcagataaaacaaattttggttggtgggatatgcactgatgtatgcgtgctggattttgtctgttctgttttgtctgcgaggaatcgccgtttccttcctcctctggaaaatgtgattgtgtcttctccagcttgtgcaacttatgatgttccattacatgtagccaaaactaacaaggattgggtatcccatccacagggggtgatgca

SEQ ID NO: 7821 - DNA, 704 bp, Zea mays
  misc_feature (6)..(7): n is a, c, g, or t
  Peptide Sequence Number=SeqID_13132
  Probeset Number=SeqID_22224
gatccnnttcccttctaagctttaaaacttctcataacgacgtcgtatcacactgtaacatgctcttatcttcttttccttcacttctcactacgaccaccactttctccggcaaaaccgtcacctcaccgtcgcgccaagtcagatcccggccagtactcgccttcgtcaccgccaccgagcagaggccttcgtatctgagccataacggcatggcttcctgcacaacgtcgttttaccagattcttggaatcgccgccggcgcgtcagacaaggagattaaggcggcgtaccggcgattggcgaggatgtgtcatcctgacgtggcggcggacgatcggaaggactcgtcggcggacgagttcatgaagatccatgctgcgtactccacactatcggatccagagaaacgtgccagctatgacagaagcttgttccggcgtcagcggccgttgacgatgacggcgtcgagattttccggttacagtggccggaaatgggaaacggaccagtgctggtaacgagttgactcgtccgagtgagttgagtggaaccagttagttaaagatatggatcttaggcgtagttattggatcgcctttgagtttgcttactaaatactaattattattattatattagtaaatggcccgagtgtgtactatatagtattacattttttttgtacatgatatatataccag

SEQ ID NO: 7822 - DNA, 705 bp, Zea mays
  misc_feature (178)..(179): n is a, c, g, or t
  misc_feature (635)..(637): n is a, c, g, or t
  misc_feature (668)..(672): n is a, c, g, or t
  misc_feature (679)..(680): n is a, c, g, or t
  misc_feature (689)..(692): n is a, c, g, or t
  misc_feature (697)..(697): n is a, c, g, or t
  Peptide Sequence Number=SeqID_13133
  Probeset Number=SeqID_22225
gaatgtcttcttgctcgagagtaagggtttaggtcacaaagctcaggctcaagctcaatctcaggaacacacaggttaccttacctctgcaattcaagatggctgatgatgactacgatgatgtcgacatggggtatgaagatgagccagcagagcctgagattgaggaaggtgcagnngaggatgtggaaaacaaaaatgaagacataactggagagcctcttgaaactgaggacaaggaagaggaacaaccagtagagcgtcctcggaagacatcaaaatttatgactaagtatgagcgtgccaggattttgggtacccgtgctcttcagatcagtatgaatgcgcctgtcatggttgagttggaaggggaaactgacccacttgagattgccatgaaagagcttcgagagcggaaaatacccttcaccatccgtcgctacttacctgatggaagctatgaagattggggagttgataaactgattgtggaggactcctggaagaggcaagtgggtggtcaatgatgttctgaactgacaccaagatgtcttgaacatttatctttgttttgtctgacgttgatactgatatatgattctaccataaaattggtttgtagctttgtattaatnnntgggtgcctatgtatatctgttcctttgtgnnnnnacttggnntcatttctnnnnctgcntgttatat

SEQ ID NO: 7823 - DNA, 651 bp, Zea mays
  misc_feature (21)..(22): n is a, c, g, or t
  misc_feature (165)..(170): n is a, c, g, or t
  misc_feature (178)..(181): n is a, c, g, or t
  misc_feature (500)..(501): n is a, c, g, or t
  misc_feature (561)..(562): n is a, c, g, or t
  misc_feature (578)..(579): n is a, c, g, or t
  misc_feature (582)..(582): n is a, c, g, or t
  misc_feature (611)..(611): n is a, c, g, or t
  misc_feature (621)..(622): n is a, c, g, or t
  misc_feature (646)..(646): n is a, c, g, or t
  Peptide Sequence Number=SeqID_13134
  Probeset Number=SeqID_22226
ggcgtttttacattcactttnnctccccttcttctcttttcttgtcctctttctctctctagggcaaaacctcgttcaccatgaacatcttcaggctcgccggtgacatgacccatcttcttagcattctcgttctcctcctcaaaatctacgccaccaaatcannnnnnggatttcnnnnaagactcaagagttgtatgcaattgtgtttctggcacgttatttgaatctgttcacggacttcattttcatttacaacaccataatgaaggtggtgttcattgcgagttcattggccattgtttggtgcatgcgtgttcaccctattgtcaggagaagttatgacaaggaactcgacacatttcgccactatattctcattggggccagctttgttttggcactcatcttgcatgagaagttcaccattcaagagatcttctgggcattttcaatatacttggaggctgttgcaatactgccccagttggttttgttgnnacgtagtggaaatgttgacaatttgactgggcaatatgtattctttctaggtgcatatcnngcattttacattctgnnctngatataccgctatctgactgagcctcgtnttactctatnnatagcctgcctctcaggtgttgtncagac

SEQ ID NO: 7824 - DNA, 601 bp, Zea mays
  misc_feature (450)..(451): n is a, c, g, or t
  misc_feature (478)..(482): n is a, c, g, or t
  misc_feature (520)..(520): n is a, c, g, or t
  misc_feature (568)..(571): n is a, c, g, or t
  misc_feature (579)..(586): n is a, c, g, or t
  misc_feature (588)..(589): n is a, c, g, or t
  misc_feature (596)..(597): n is a, c, g, or t
  Peptide Sequence Number=SeqID_13135
  Probeset Number=SeqID_22227
gactccttcaattcctatactttcactccagaacaataattaaaacaacaatcacattgatcttacgaaagatcggagaggatctgattcaagtgcccacatatacatatagagatatatatatagttacagttatcactatagctatagtgaatcatgccaccttgtagatacgctttcggaagggccgatgaagcgactcacccagattcgatgagaggcactttagctgagttcctctccactctagtctttgtttttgcaggggaaggctccgttcttgctcttgagaagattttgattggtccatcaacaccggcagggcttgtagtggttgcactggcacatgcgtttgctctattcgcagcagtttcagcggccattaatgtgtccggtggtcacgttaatcctgcggttacattcggtgcacttgttggaggaagaatctcnntgatccgagcagtttacttctgggtannnnncatccttggctagtattgctgcatgcttactactcagnctgcctacaaatggaatgagaccgtgggtttccatgttgcgtccggtnnnngataatgnnnnnnnntnnctctagnnatag

SEQ ID NO: 7825 - DNA, 695 bp, Zea mays
  misc_feature (24)..(26): n is a, c, g, or t
  misc_feature (163)..(166): n is a, c, g, or t
  misc_feature (683)..(683): n is a, c, g, or t
  misc_feature (693)..(693): n is a, c, g, or t
  Peptide Sequence Number=SeqID_13136
  Probeset Number=SeqID_22228
gggtattatcacaccaattatcannnctttttctcctctttcaatttcattttcactgcattgcctcctctccgtcactcgagatatataattacgtgttcaaagtcgaatatattgagaatggcagcatcagcagcttcaagcctgcaaatggcagcaacannnncctgcatttcagcatctcaccgggttgttaaggcaggtgccaacatcctttctgtcaactctaagaacacagcatgggataaactcaccagtgcttgccatgtttcgtcccttcaaactcttcaaaggaatttcacatcatcgtccggacaattcagtaaattcaccacaaaagcaatggccgaatccagtgaaactaaacctttgtctgggttaccgattgatttgagaggtgaacgggcatttattgctggcatagctgatgacaatggatacggatgggcgattgcaaaatctctcgcagccgcaggggctgaaattttagtcgggacatgggtgcctgctcttaacattttcgagaccagcctgcgacgtggaaagtttgacgcatcacgtgtgttgcccgatggctcgttgatgaacattacaaaagtatatcctttagatgcagtctttgacaacctcgaggatgtacccgaagatataaaaacaaacaaacgttatgctggatctacaangtggactgtnca

SEQ ID NO: 7826 - DNA, 670 bp, Zea mays
  misc_feature (495)..(496): n is a, c, g, or t
  misc_feature (540)..(542): n is a, c, g, or t
  misc_feature (544)..(544): n is a, c, g, or t
  misc_feature (546)..(546): n is a, c, g, or t
  misc_feature (579)..(580): n is a, c, g, or t
  misc_feature (592)..(593): n is a, c, g, or t
  misc_feature (618)..(618): n is a, c, g, or t
  misc_feature (620)..(621): n is a, c, g, or t
  misc_feature (625)..(628): n is a, c, g, or t
  misc_feature (632)..(634): n is a, c, g, or t
  misc_feature (639)..(639): n is a, c, g, or t
  misc_feature (653)..(653): n is a, c, g, or t
  misc_feature (657)..(658): n is a, c, g, or t
  Peptide Sequence Number=SeqID_13137
  Probeset Number=SeqID_22229
ttctttcttttgttgttttgattattcatgcttctgcaaattctgaaagtgatgcgctacttgctttcaaaagcaaagtttctgatcctagcggtgcaatgcaatcgtgggatggaagtctcgttgatccatgcactttgcttcatgtgatttttgatagcaacaaacatgtcattcgtgtggacttgcccaaacaaaaactcgccggatcattagcacctgagcttagccagctgaagtctctgcagtacttggagcttcacggaaacgcgttaaccggaacaatccccgcggaattgggtgatttgccgaatcttatttcaatggatttatttgacaataatttagtaggaggaataccaacatcttttggaaaattgaagtcactcaagttccttcggttgaacaacaataaactcacgggatcagttccaagagaagtgaccgctctaaacctcccagttttagatgtctcgaaccaaaggaaaccttagnntttgaaaagactctacggcttggagttgaacggactggtgcctnnnancntcggacgttaaagagctcaagaattaatagacnncgaccttaattnnttgttggtaaaggaaaaaattgtantnngggnnnnaagnnntgaantttcaaattttacnatcnntcatgtatgaag

SEQ ID NO: 7827 - DNA, 707 bp, Zea mays
  misc_feature (6)..(7): n is a, c, g, or t
  misc_feature (673)..(675): n is a, c, g, or t
  Peptide Sequence Number=SeqID_13138
  Probeset Number=SeqID_22230
gaattnntttctagaaagtggctatcgtattattgttgtaataataatttaaaaaattcatcgaatactgaaaaagcgaaaccaaggagggggattgaattgacctgacctgaccaccaatgtgaatttgatttagattcgtttacatattccgtttcatcgtgtggaggaagtaaaagagtgtagcaacagaggcagcagatcaaggtgtattgtatctgcgacgtggtggagaaagagagagggaagaacttgtgtttggatttcatttttcttttggcgaagatgacggatgttatattgcatatatacgacgtgacgaatagtgaatccgagaaggcgaataaaactattcttcaaataaacaagatctttaaggacggtataggaataggtggcattttccatagcgctgttcaggtatatggagataatgaatggtcttttgggttctgtgaagaaggaactggagtttttagttgcccttgtggaagtaatcctatgtattcatatcgagagtgcattgtacttgggaagacgactttttctatcttgaaggtaaaccagattttgcgagaatttagtaaagaatggccaggaagttcatatgatttgctatccaaaaactgcaatcacttctgtgatgagttatgtgaaaggcttgaggtgcctnnngttccaggttgggttaatcgttttgccaatga

SEQ ID NO: 7828 - DNA, 706 bp, Zea mays
  misc_feature (7)..(10): n is a, c, g, or t
  misc_feature (164)..(170): n is a, c, g, or t
  misc_feature (577)..(578): n is a, c, g, or t
  misc_feature (682)..(684): n is a, c, g, or t
  Peptide Sequence Number=SeqID_13139
  Probeset Number=SeqID_22231
gaaccannnnataagggaaaaccttacgcagatactcggcggttctgcgtcaagcaatgggggcttacaagtatgtgtcggagctatggaggaagaaacaatccgatgttatgaggttcttgcagagggtgaggtgctgggagtacagacaacagccttcaatnnnnnnncttcaaaggcctacccgtcctgatagggcccgtcgccttggtttcaaggctaagcaggggtatgtcatctatcgtgtccgtgtcaggcgtggtggcagaaagaggccagttccaaagggtattgtgtatggaaagcccaccaaccagggagtgacacaactgaagtttcaacgaagcaagagatcacttgctgaagagcgtgctggtcgtaagttgggaggactcagggttgtgaattcatactggctcaatgaggactcaacgtacaagtactttgaggtaatcctcgtcgaccctgctcataatgctatcagaaatgacccaaggattagctggatcgtcaaccctgttcacaagcaccgtgagcttcgtggactcacttctgaaggaaagaagaacaggggtcnncgaggaaagggacacagaaaccacaagatgcgtccttcccgcagggctacctggaagaggaacaacagcctttctcttcgacgttaccgttgagcttagttttnnnttttgctgttgcatcattcaca

SEQ ID NO: 7829 - DNA, 687 bp, Zea mays
  Peptide Sequence Number=SeqID_13140
  Probeset Number=SeqID_22232
ggaaattggtaggtgaaaggataatcactagagtctagaaccatcatcactctcattctctgtatttaaatcggtttcaccccataagagtctttactttactattcatcttcgcacctaaacagattcgttctacactctactttctatctctctcaagggggtgttctgagatcacattggaaaaaatggtgaaggctgtagccgttcttaacagcagtgaaggtgttactggaaccatcttcttcactcaggaaggcgatgctcccactaccgtaacaggaaacatttctggccttaagcccgggcatcacggcttccatgttcatgcccttggggacacaaccaatggttgcatgtcaactggcccacacttcaatcccgctgggaaagaacatggtgctccagaagatgagcatcgtcatgctggtgatctaggaaatatcactgttggtgatgacggtactgctacctttacaactgttgacaaacagattcctctcactggaccaaattcaatcattggaagggctgttgttgtccacgcagatcctgatgatcttggcaaaggtggacacgagcttagcaaaagcaccggaaatgctggtggaagagttgcttgcggtatcatcgggctgcaaggctaggggacttcgtctcagatgtatctttaacttgttgagggtg

SEQ ID NO: 7830 - DNA, 690 bp, Zea mays
  misc_feature (5)..(5): n is a, c, g, or t
  misc_feature (7)..(8): n is a, c, g, or t
  misc_feature (160)..(165): n is a, c, g, or t
  misc_feature (205)..(211): n is a, c, g, or t
  misc_feature (573)..(573): n is a, c, g, or t
  misc_feature (614)..(616): n is a, c, g, or t
  misc_feature (666)..(668): n is a, c, g, or t
  misc_feature (682)..(685): n is a, c, g, or t
  Peptide Sequence Number=SeqID_13141
  Probeset Number=SeqID_22233
gatantnntccgttcttacaaaccctactctggattcatttcaccactcattcttatttggttcgggactccaatctctgatccttcattgttactggattgaccgccatggatatggtgaagataacgccgtacttggttgcgctgaccgtaatgatcnnnnnnggtgtcacacacgtgagatccgacgcatctgaccatcgtnnnnnnntcggagacgatgttcctctctatgcaaacaaagtaggacccttccacaatccgagtgaaacatatcgttactttgatctcccgttttgttcttcagctcccatcaaggaaaagaaggaagctcttggtgaagtgttgaatggagatcgattagtaagtgccccctacaaattagactttttgaatgacaaagactctgaaattgcttgcaagaagagattaactgtagaagatgttactaagttccgagaatcagtttctaaagactactattttgaaatgtactatgatgatttgccaatatggggcttcttgggaaaagttgataaggaaggcaaaaccgattcatccgaatacaagtantacctttttactcatctacagtttgaaatcttctacaatannnaccgtgtcattgagattagtgtacgatctgatccacatacccttgtggannngactgaggataaannnntggaa

SEQ ID NO: 7831 - DNA, 834 bp, Zea mays
  misc_feature (269)..(269): n is a, c, g, or t
  misc_feature (283)..(283): n is a, c, g, or t
  Peptide Sequence Number=SeqID_13142
  Probeset Number=SeqID_22234
gcccttcgcacttccgcagaacgagcactcgtggaccaaatatttggcacaagttacctttgcctgtttcttgcgtttagatccctcaaggtttctccgccgcgcgcccctwcccttcgccggagcttgccaaawgaattgtcaaaccccgatggggctcgccgccgtagcagttaggccgttctgcagccgcctcawctcgtccgcctccrccgccgcggcgtcaaaaacggcggcgggcaccgcgacctcgctctwccccagawtrnhccacccgcaccanyycccgtacggbcggcgcctccycttcctcgtctcytcbgcgtcgcagtcgcaggccggcccgggcactcctcccacccctstaccagthcccgtcccctccgacccccgcgctgccgtttccggcaacctccctttcttcgaccgcdtcctctttccggactcgttcccgctttawaccccbccctccaaggaggaggaggacgcggcaccctygcagayygatgaagcggtggcgccggccgtccccytyagggaggagacggagacagaaarggaggcgttgaggctgcygcmgagggcggtcgtyagcwactgcdgcgagccccttgggacggtggcggcggaggacccccagttcacggagatgctcaactacsaccaggtcttcatcagggacttcgtkccccccgcgctcsccttcctcatgcgccgcgagaccyaaawcgtccgcaacttcctcctccacacyctccagcttcagarctgggagaaaactgttgawtgttacagcccttggcaaggatttatgccagcyagcttcaagattag

SEQ ID NO: 7832 - DNA, 528 bp, Zea mays
  Peptide Sequence Number=SeqID_13143
  Probeset Number=SeqID_22235
gggcatgcatgatcaagcctgcgtacgcggacgtacacccgaacggacgactcgagcgatgcagcatttcgagcagggtggacagttcgaagatccgaccaacacagagaaccacaactgggttaatgagaaagtgaacttgtgctgcggccaatctgacttcagcgatagaagaaagaacataaaggataacgagatactcagccaaactttggtggagctcatcgactatattgcctcgagcagtgagaaattttctcacgcaagcatgcaagacatcacacaaatggcttctgcaaacctgatcacgacactgagtactcctcctagagacaacaaagtggatggcttagatgtgcatgacgacgagcctgtcatggaccctgcatggccacacttgcagattggctatgagttggtcttgagattcatgcactctcaacagacagacgccaagttgggtaaacggaacatcgatcattcggttgctctgaggctactagacctcttagattcaaaagaccctac

SEQ ID NO: 7833 - DNA, 712 bp, Zea mays
  Peptide Sequence Number=SeqID_13144
  Probeset Number=SeqID_22236
ctcgaggccggccggggcccgggagtcaccaccgacagagaaaacgaggagatgctgcgtgatggaagcacgatcagctcgatctctccgacatcccacaccaccgcgcggctagctgacatgctacggcgcttgcctgtcgcaggaggcgtaagcaggcagcggaagcctggatgcttgcgctaccactctcttaccttctatcaccagccctttcggttacgacatcacacacaggtggcccttggtgccgaatctgttcagaacgcgaaatgccgatgatcatgctccaccatgtctaaatccgtcgtccccgcggtggtgatgaagaggaacgccgcgctgctggccgagatgcgtggaaggatatgactaggaaatacgcaagctagaggataaaattgctgatgcagacgagaacttggatgagagcgaagtccgtgaatcacatcttggcaaatctgtgtactttataagggacggcgagaaggaaaacgtcctggaacagattaaagtcactgaaggaaaaactgtaactgttgaacaaaagatggatcttgtgttcccactttgcagattggatttttctacatggaatgttgatctgatatcaaaatccatcgataaggcaaagaacttgtttgaggaaggaggcgattgtgagacgaacaacaggttgcaagtatatgaaggcttgtactgcatggcaacc

SEQ ID NO: 7834 - DNA, 299 bp, Zea mays
  Peptide Sequence Number=SeqID_13145
  Probeset Number=SeqID_22237
ggcatgggccctatccagacggtcgcgtgtccgtcatgcgcatggacaagctgggctccttcgagctgtcagcggggtcgcatgttgatctcatcctgctttacgattataacgacaccgcccaggaatccactggcgccaaaccgctagatgtggtgcgttatttcacacgcgtcacccagcgtctgatcaccgccgtgtccgccccaccgtcggaaggcgtgctatacgaggtcgacatgtggctgcgcccttccggcaataaaggcgcggtggcgacccgcatatccgctttctag

SEQ ID NO: 7835 - DNA, 525 bp, Zea mays
  Peptide Sequence Number=SeqID_13146
  Probeset Number=SeqID_22238
tgctcaccaactggatgtccatctgcctctaactttcgtgagggactcagtaggggaacctctgtacatgcttttccgtggaattaagcatcaagtggacaaggggccggtggacagcgtgactggaaaagccaaatataccctgaatgacaaccgcttgctccgagaggatgtggagtaccgtcccctgaccttgaacgtgatgttggccatgggccctggagcaggagaagcccagggtgtgcctgtgaaggttctggactgtgacactatctctcaggccaaggagaagatgctggaccagctttataaaggagtacctcttgcccagaggccagaccctcgcaccctagatgttgaatggagatctggggtggccgggcatctcattctttcagatgaggacgtgacttctgaggtccagggtctgtggaggcgcttgaacaccctgcagcattacaaggtcccagacggagcaactgtggccctcgtcccctgcctcaccaagcatgctctccgggaaag

SEQ ID NO: 7836 - DNA, 560 bp, Zea mays
  misc_feature (146)..(146): n is a, c, g, or t
  Peptide Sequence Number=SeqID_13147
  Probeset Number=SeqID_22239
acccccggggtgtttaggaggcacccagaatttgcaaaggttgacgcctccataacagggcaatctgatgcgggccactacattccaacgcttgcaagcagagtccaccaagagaaacaatttatcttttttttttctaaaaccangaaggcataggcgggcggggacgggctcactgatccagaaacccatccaaagcctacacagactatgcactggaaaggaatccaatcacaacatccggctacgaaaggatcaatcggtgcattccaccacgtgaatgggcaatgaacaagtcaggacctgacaggaaagcatcatgcatggcagcttatatggtctgcaacaacattctgaactccatcatgaatctggtcgggacaaagaactactatgacgtgaggaacgaatgcgaggcgaagcttagctatgacttctcaaacctggagaggttctctcctgacaaaccggccaaggaggcgcctggagtcagcgacatagatgtcgtctcttgcagcactacggctcatgaaacgaagctcacggactggatgacgaat

SEQ ID NO: 7837 - DNA, 554 bp, Zea mays
  Peptide Sequence Number=SeqID_13148
  Probeset Number=SeqID_22240
cgctcatttggattgaggtgcttgtgatcggctacatcgagttccagcgcaaccccgagctcgacccggagaaaaggctgtaccccggcggctcctacttttacccgctcgccttggcggccgaccccaaaaaaaaggagcggctgcaactggcggagatcaagcacgcgcgcctccccatggtcgccttcctcgggtttcccgtgcaggcccccccccccggcaaggggcccctcaacaattgggcccccccccttagggaccccctccatacccccatttttgacacgtttggaggatccttttaagcccccccttgatccgccccgtccatcgatcgaaacgtggtcttgaattaactatgatagatctctatgagcctggagatgggtcaaccccccgggcggtgtttccttttgtgatgaaagggaaaaagggtatgggccaaaattgatcaacccgtcgggcttacgtttcgttaattaggaaagctcccccccggatttggtgatttgtaaaatatgaacccgtgatgaataaaagccttcccctgt

SEQ ID NO: 7838 - DNA, 522 bp, Zea mays
  misc_feature (16)..(20): n is a, c, g, or t
  Peptide Sequence Number=SeqID_13149
  Probeset Number=SeqID_22241
gaagccgaagaagtcnnnnnactccgccccagatccatcggtcgccgcccggctcccatggcaaccctcagcgccgccgctcgccactgccctccttatctccttcgctgccctccttctccgcgcgcttgtctccgtcggaccctactcgggtcagggcgcagcacccaaattcggcgactacgaggctcagcggcactggatggagctcaccctccacctcccctcctccgactggtaccgcaacacctccgacaacgacctcgcttactggggcctcgactacccgcccctctccgcctaccagagccggctccacgcccgcctcatcaacgcctccctccccgacgccgtcgccctccgatcctctcgcgggtttgagtcccacgaatcgaagttgcttatgcggtggacagtactctcgtctgatctcatggtgttcttccccgcggcgctatggttcgtgtgggcgtacatcaaggatggggttggcggtagtggggagaggcgagaggggtggat

SEQ ID NO: 7839 - DNA, 518 bp, Zea mays
  Peptide Sequence Number=SeqID_13150
  Probeset Number=SeqID_22242
tgcagaactggttgccgcgctcgaatcatattcatcccacctcgaaactaccttcctacaaatcgaattacctccgacaaccccgggtgcagttattccccccagcttcgacctttctcctgcatacgtgaccgcgctggattcggagttctcgcgcgtgtatgaggaataccaccgccgtattacacttgtgcaatcaatttcagaggagattatcaagctctgggcggagcttggaacccctcaggtgcagaccgattcaaacatcgttcggcactatcgggaatcgccagaacagcttggacttcacgagaccgatttaaccaacttgattgcgagacgcgataagttggtcgaagagaaaaagggacgcgagcgcaagatcaaggagctccgcacgaatgtcgaaagcctatgggagagatttggagtggaagaggccgatcgcaaggcattcctctctgccaaccgaggctgcggactgcgcacgatcaacgaattcgaagaagaactggctc

SEQ ID NO: 7840 - DNA, 978 bp, Zea mays
  Peptide Sequence Number=SeqID_13151
  Probeset Number=SeqID_22243
cccctggaggagaacggctacagcattgtgattcatggtggcgcgctaaaggtgtgggacaaagtcgggacctctatggcgaaggtggagcgggcgtcgaacaggctctatatcctgaagcttgacgatgagatggtgcgagggatgccggatattgagcatgtcgacgaggtgtgcgacggctgtatggcggggaaacagcaccgcatctccttcccgggtgaagccaagtaccgagcgacgaagaagctcgagctggtgcacggcaacttgtgtggtcctgtgacgccgtccaggaacaagttcttcctcctgctcgtcgatgacctgagccgctatatgtggctcactctgctgaagacaaaggaccaggccatggaggcgttcgtgacgttccaagcttgggcagaggtggaggcggaaaccaagaacggtgttgtcgagaggagaaaccagaccgtgatggggatggccaggagcatgctcaaggcgatgggcgtccctggcacgttttggggggaggcggtctccaccgccgtctacctgctgaacaggacaatgacgaagggaaatggcggtaagacgccatatgagttgtggcatgggaggacgccagcggtccatcacctgcgcaccttcggttgtgtggctcatgtcaagagcacaggccccaggatcaagaagctggacgaccgaagcaagccgatgatttttgtcgggtatgaacctggcacgaaggcataccgggtgtacgacccgacttctcgccgtgtacacctgagtcgggacattgtttttgacgaggaggcgcactggagctggtctgacaatgaacaaaaggaggatgatggcgagttcacgatcagctacgctggcgtcacctatttctccaatggatgctacgactccatctcctccggcgactgcggctccatcgtctttggcaacagcgtctccatcctctacggcggtttcgac

SEQ ID NO: 7841 - DNA, 673 bp, Zea mays
  misc_feature (10)..(10): n is a, c, g, or t
  misc_feature (354)..(354): n is a, c, g, or t
  misc_feature (512)..(512): n is a, c, g, or t
  Peptide Sequence Number=SeqID_13152
  Probeset Number=SeqID_22244
gcgtgccgcntgctcgtctggctccwgggcggacccggctgctcctcgctcattggaaatttcgctgagctcggcccattcctcctcctcaactctcgctccagtkgsctctcccgcaaccgcaacckctggaaccgccgcttcggcgtcatcttcatcgacaacccgctcggctcgggcttcagckcgccctcttcactcgccgacatccccagggacgagcccaccatcgccgcgcacctcctcgcggcgctgcagtygttcatggcgctcgacgcggctttccgcgckctccctctgttcctcgcaggagatawctacgcaggcaagtacatyyycgctgccgctaggacnatcykcgacgcgaactacaagctcyccgckggcyatatggttaacttkcagggcatcgtcatckgcaacggcatgactyaccccgttgcgcaggttaccvttcacaccgaccarggtwactttcgccgggctcatcaacgccaagcagaaggccaccntcgagggcattcagaacaagacggtgagcyttgtgagggccggcaacttggcsgaacagggaaggagccgaacgcatcataagcttcytccggaaaccacctggttgcgacggctttyaactacgcccccaaacaagtatccacgcgcccctgccaacttc

SEQ ID NO: 7842 - DNA, 633 bp, Zea mays
  Peptide Sequence Number=SeqID_13153
  Probeset Number=SeqID_22245
atggccacgctaatcgctaaacatttcttccagctggaaggagaaagcgccctcaccagcctgatcctcacctatgcggcctttgcggtggcgttcttttttcgcccgttaggggcggtgctgtttggccgcctgggcgatcgctatggccgtaaaccggtgctgatcgcggtgctggtattgatgacgctggccaccgttgccatcggtctggtcccggtttatgccagcattggcgtggctgcgccgctgctgattacactgctacgcattttgcagggactgtttgcgggcggagaatacggcggtgcggtctcgctgatgaccgaatcggcgccgcccggcaagcgcggattttatggcgcgtggcagtcgctgacggtggcgctcggactgctggcgggcgcgggcgtggtggcagtactgccgctgctgttgggagacgccgccatgaacgcctggggctggcgcattcccttcctgctggcgctgccgctcggcgcagtggcgctgtggctgcgcagcggactcgacgaatcaccgcagttcagccagacaccggcggcaccacaacagcaggcatcgctgggtgtcacgctgcgcgctatcgggctgggcattgggcggttaatg

SEQ ID NO: 7843 - DNA, 521 bp, Zea mays
  Peptide Sequence Number=SeqID_13154
  Probeset Number=SeqID_22246
atgaagttaagaggagcaggtttcatgccaaatcattctgaagtgacctctgcggtggcctctgaagccaacgcccattacagcccgcgtctgtgtaacgacgacctggcgccgacccgcaaccagagctggtcgtggtacaacattttttcgttctggatgtcggacgtgcacagcatgggcggctatgtggtggcggccagcttcttcaccctcggtctggccagctggcaggtgctgctgtgtctgctggtgggaatttgcatcgtgcagctgtgcgctaacctggtggcaaagccgagccagatggccggtgtgccttatgcggtgatttcgcgtcaggcatttggcgtgttcggggccaacatcccggcggtgattcgcgggctgatcgccttcgcctggtacggcattcagacctatctggcggcgaatgcgctgatgctggtgctgctgaagttctacccgtcgttaagcagcatgacgcagagcagctggctcggcctgtcgcagcttggctg

SEQ ID NO: 7844 - DNA, 493 bp, Zea mays
  Peptide Sequence Number=SeqID_13155
  Probeset Number=SeqID_22247
atggaggaggagatggcagtgaaggtcttcgacctcgagatgccaggcgcggagaggagcttcttggccgagtgcgaagcgctgaggagcatccagcatcgcaaccttctccccatcagaaccgcgtgctcggcggtcgacaacaggggcggcatgttcaaggccttgctctacgagttcatgcctaacgggagcctcgacacgtggttgcaccctagagcggcgccggcggcgggcgagaaagctccgaagcgtctagggttctctcagagagtgaacatcatcgtcaacgtagccgatgtgctggactatttgcaccacgagtgcgggaggccgactgttcactgcgacctgaagcccagcaacatcctcctggacgacgacctgaacgcccttctgggagatttcggcatcgcgaggttttacgctgactccaagtcagcaccgtcgccggcggtagacccaactagttccgtcggtgtgagagggacta

SEQ ID NO: 7845 - DNA, 552 bp, Zea mays
  Peptide Sequence Number=SeqID_13156
  Probeset Number=SeqID_22248
atgttgaaggctaaactggctgctgctcagaaccgcatgaagatccaagctgataaacatcgattggatagagaatttcaagtgggggatagagtgttattgaagctgcagccttatgtccagaattcagtggtcagtcggtctcatcctaagattgctttcaagttctttggtccctttacagttcttcagcgtgtgggatcagttgcttataaactggaacttccggccacagcactgatacatccggtcttccatgtgtctcagctcaagccattcattcccaaatacactcctgttttctctgatatttcacagctggtggacttgtctgcagtagaggtcaagccggtgcagtttgtagatcggcgcttggtgaagaagggtaacaagccagtggttcaggtccaagtggtgtggtcaggtctgccatctgatgccactacttgggaagactttgatgtgctcaagactcgttttccagaagtacttgattgggggcaatcaactcttgaaggtggggaagatgtcagcacggtggtgcgtgcgtga

SEQ ID NO: 7846 - DNA, 757 bp, Zea mays
  Peptide Sequence Number=SeqID_13157
  Probeset Number=SeqID_22249
ctcggtacccctgctgttacagggggagaaagaagaagagaaggaagaggttaaaacaatcagcggtataattaacttagcccggttgctagacgatgacgacgatgatgtgctttttgagatcgaaagcctcctgtcaggagacattgaaatccctataccaagcgatcgcttcaacgttaatggatggtcacggtacaacacttacatggctaacaaggcctctgagatagagggactgcgcagcctggtgaaggagatggaagagagagaggcgaagcttgagggcgagctgctggagtactatggaatgaaggaaatggagattgatgtcgctgagctgcaaaagctgctcaagatcaagacagtggagatcgacatgctcaataacaccataaactcactgcaggaggagcggaagaagctgcaagatgacgtggaacgtggagcagttaccaagaaagagctcgaagtggctaggaccaaaatcaaggagctgcagcggcagatacaggtggaagcgggccagacaaaagatcagctaatgctgctgaaacagcaggtcattggattgaaggccaaggaggaagaggcggtaaaaaaggaagccgaggttgagcggaagctgaagaagctcaagcagttggaagtggaggtacttgagctaaggaggaagaacaaggagttgttgtatgagaagagagatctcattgtgaagttggatgcagctgaagggaaaataactgaggtatcctag

SEQ ID NO: 7847 - DNA, 657 bp, Zea mays
  Peptide Sequence Number=SeqID_13158
  Probeset Number=SeqID_22250
ccggccgggccgggcttgtcatttcgccttcgcccccatataggctatagccactaccacatttgcttcgctgtctcgatccacactcctcgacttgctccggcgagttctactccggaccgggccctctgatcggtaccgagcgatgacccatgacggtcctctttgacgagtgcggcagatccttcatcatccctgcggaagcagaagaataagacgcgccttaggggtcttgatgcgcataagggcgacatcgcctcgtccaaggccgacgggcggatcctccgcacgtctattggacccaagggtatggacaagatgctccagtcccccgacggcgacgtcatcatcacaaatgatggagcgaccatcctggagcaaatggatgttgacaaccagatagcaaagctgatggtggagctgtcccgtagtcaagactatgaaatcggggatgggaccaccgcatgggtaatcatgtcaagaactcttctcaagctgccgataaactctggagcgtggtattcctccattagggtgcctgaaggctatgagatgacgtcttatgtatcttttgaacacgtataaaatatatgcaacaagtctgagtcatcgtagacaacattgaaccacttggctagacctgaatgacgactatat

SEQ ID NO: 7848 - DNA, 718 bp, Zea mays
  Peptide Sequence Number=SeqID_13159
  Probeset Number=SeqID_22251
ccgtccggatgtaatgtccttattttggagctcgcgcctcccgccgtccgcctgcgtggccgaacgcaacttgctcactgccatttatttcccgactcctcactcccgcctcttctactcgcgaaattccaaaacccctagtcattctccaccccatccagacgcgccggcctcccctccctcatgcagctaatggaggaggataccgatgccggcatcgccgccatcggcaatgagaagcgccgacgagtcttcttctccgacaccgatgctggtgctgaggcaaatgatggaatgacagtgcctctagtatgcaatttaggcgaggtgagttctgcaaactgaactgctattagggcatttgacctacatcatttttttggagaagatggtgaaaatatatggctacaaaaatcttaagataagtgtgtggataagtgcgaaatctttccatggatatgctgatgcttcatttgacgaaacatctgatggagggaaaggaataacagatctaaagtttgatattcagaacatttttggagaaaacttggtagaaaaagaggaattcctgcatacatttctcgaaggaatgtgaatatataacaactgcactgacgaatgacagtgtcattaagcatgatgggtcatatgaatcagatcctgcagttgacattgttcgagtcgaacatcaaggtgtggctgcatttctttattctcg

SEQ ID NO: 7849 - DNA, 997 bp, Zea mays
  Peptide Sequence Number=SeqID_13160
  Probeset Number=SeqID_22252
atgcttcatgctctggaagtgcgccgcatcattgagtccgaatcctgcgtgctggccgcgcagcgcgccagcgccgacgacctgctggaaatcgaacggcggctggaagagatggagcgtgtgcacctggctatcggttccgccgggccggaggattgggctttccacaccagcatctaccgcgccgccggcaatccgctgctgttgcagatgcttaacggcgtctacgacacgctgcatgcctttttcgaatccccgccggagcaggcgctgttttcagactcgtttcccctgcaccgtgaactgtttaacgccatccgcgcccgcgacagccaggccgcgcgcgccctttgccaccagattcttgatatcaccgaacgcgacatgaaggacacactgctgacccacgaccagcgccacgaacagggcgccgtaacgccaccgatttatcagtcctcgctgtttaccttcagcgattacgacagcatgatcgcccgctttcgcggtgagagcgaccagccgctctattcccgcgttgataatccgacggtcaaagcgctacaggataaagttgctgcgctggaaggcggtgacgcttgcctcgcctttgccagcggcatggccgccatcagcaacgcgattttgagtgtggttcagccaggcgcgaaagtgcgtttcggtatcacgacgcagtttgttgatggcgacgatgaagcggcgatggccgccgcgctgcccggcgccagcctgctctatctggaaagtccctccagctgggtgatgagtgaacagaacctgcggcagctggccacgctggcgcgcgatgcaggcgtcgtcacgttgattgataacagctgggcttcgcccatattccagcagccgctgctgtgtggtatcgacatcgtggtgcactccgcctcgaagtacatcagcggccacagcgatgtggtggccggcctggttattgccagcccccagcacatcaacaacattgccc

SEQ ID NO: 7850 - DNA, 846 bp, Zea mays
  Peptide Sequence Number=SeqID_13161
  Probeset Number=SeqID_22253
atgaaggtgatgctgcaggcaagaaatctctgggacgcagtgagcaccggagcggggagtttcgtcgacgaccggaacgcgctggaggttatctccaaggctgtcccgccggagctcatgggagctgtggcgtccaaagcgacggcgagggacacctgggacatgctgagggtacggaatatcggcgtcgaccgtgtgaggaaggccaaggcaagcacgttgaagcgagatttcgacgcactgaagttcaacgacggcgaatccgtagacgacttcagcgcgcgcatcggccggatcacaggtgagctggctgttctcggtaacgagtacaccgaggaggaggtcgtccgcaagttcctgcaggctctcccgtctcgtttcgaccagattgcagcgtcaattgagacgttgctcaatctgagcgaaatttcagtcgacgagcttgtcgggcgtctgaaggcggccgaggagagattggtgcaagaactctcccggatcacctctcgcctcaagatcgcgggaaatggcggatctagttcaaccggaggttcctcggcgctaggcaacgatcaagcacacggtcgtggccgcgggcgcggcaggaatggaggtcatcgtggcggagcaagatccggtcgtggtgggcgttcaatcgccaacgacgagtgccgctactgcggtaatgcgggccactgggctcgcgaatgcaagaagaagaagcgcgatgagcaggcacacgctacacaggctgatgaaggcgatgaggccttgctggtggcggacgcctgcatcgacgtcgcacccgttgaagatgacgtcgtgatccagtctagcgacgtcaaatga

SEQ ID NO: 7851 - DNA, 782 bp, Zea mays
  Peptide Sequence Number=SeqID_13162
  Probeset Number=SeqID_22254
tgcagggggaggtggtgcagctgaaggcgcaggagcagacgctggtgctgaaagacgggcagcaggtgaagtttgaccagctgctgatcgcgactggcggcgtgccgcagccgcttgatatcccgggcaaggatctggatggcgtgcacctgctgcgttcactgcgccaggccgacacgctgatttcgcaggtggatgaggcgcagcagctggtgattatcggcaacagttttatcggtatggaagtggccggtgcgctgcgtaaccgcgacatagatgtcacggtggtggcgcgtcatccgctgccgtttgccagccagttcggcgaagagattggccaccatttttatgagctgcaccgcagcaacggcgtgaaatttgtcgagggtgaaccggaagcactgaccggtgaaggtgcagtgagtggcgtgcggctcaaaggtggcaaaaccgtgccagccagccaggtgctgtttgccaccggcattgtgccggccacccattttattcacgacctgcctttacagaaggatggcagcctgctggccgacagtcagctgcgggtcagtgaaaacatctgggtcgcgggggatattgccagctatctcacgccgcgtggcgtgcagcgcattgagcactatcgcgtggcgcatcagcaggggcgcattgccgcgctgaatatgctgggcaaacgcatcatgtacgatcgcgtgccgttcttctggactgcgcattacggcacccgctatgagtatctggggcatgcagaggagtgggatgat

SEQ ID NO: 7852 - DNA, 1172 bp, Zea mays
  Peptide Sequence Number=SeqID_13163
  Probeset Number=SeqID_22255
ctgaataatctatctctgccccactatgattagtatcatacaaagatagatctttctatggaacaccagatttcgaatgtcgatattgcaaggcagtcttctggtatcgtgaaagagctcgtggtaaacatattgatgcatctatactatacaacaattgttgcaagggtggtaaaatagcaataccaccatataaaccacatcctgaaccattggctacactggctagatttgatggggattcaatatctaagaagttcatgcgcaacataagacaatacaattgtctatttgctttcacttcaatgggagctaacattgataacagtgtcaatgatggtcgtgggccacctctgtttaaaatctgtggacaagttcatcatagaatcggctctctactaccacctgatggctcacctcccaaattcctgcaattatatatatatgacactgcagatgagatcacaaatagattgcaatgcttagatacaaacagagaatacaatggagatttaaatcccaacattgtacaaagcctaacaaggatgcttgatatccacaatccatttgtgaagaaattcagaatggctagagatcacttggctggcaatgagcctggagatttcatcattagaattgtgggtgcaaaagaaggtgatcctgtgcaatacaatttaccaacaactaacgaactcgcgatgttggtagtaggagatttctccttggacactttcaaacgcgacatagtaatagaaacacatggtagagacctcaaacgtatatcttctctacatccagttttcatgcctttgcaatatcccttgctgtttccatacggtgaaagaggatttcaagtaggtgttctatataatggtatcaactctatagatgcaaataaacgacaatacatgacaatgcaagaatatttctgctaccagttccattacagaaagaatcagcgaaatccttatttatgttatggtctgctatccagtcaagcaaaggtagacgcacgcgcatgcattgaagaaaacagattaaactacattgctcataatcaagaaaaaatatgaattgaaactatacaaggtatttcagatgctgagtcgcggttttgtcaatggtgaggaaataggaaagattattgttttattcttcattcactattacaa

SEQ ID NO: 7853 - DNA, 887 bp, Zea mays
  misc_feature (310)..(310): n is a, c, g, or t
  misc_feature (375)..(375): n is a, c, g, or t
  misc_feature (402)..(402): n is a, c, g, or t
  misc_feature (439)..(439): n is a, c, g, or t
  misc_feature (456)..(456): n is a, c, g, or t
  misc_feature (484)..(484): n is a, c, g, or t
  misc_feature (602)..(602): n is a, c, g, or t
  misc_feature (669)..(669): n is a, c, g, or t
  misc_feature (683)..(683): n is a, c, g, or t
  misc_feature (703)..(703): n is a, c, g, or t
  misc_feature (705)..(705): n is a, c, g, or t
  misc_feature (721)..(721): n is a, c, g, or t
  misc_feature (737)..(737): n is a, c, g, or t
  misc_feature (749)..(749): n is a, c, g, or t
  misc_feature (830)..(831): n is a, c, g, or t
  Peptide Sequence Number=SeqID_13164
  Probeset Number=SeqID_22256
cctgtgcgccgctcgagcggcccggcgcgatgcttatttcggctgcggggtcaagcttcacctgatttggtctcagagcagattgacttgattctacaggaactttcatatattgatccagacaagcaagctaccttcggtgagatctttcacggaaaatgtcttacaccactgataattgcatgtgctttgcgctcccttcggccaccctctgccccccctaccatcccatcctccgccgctacgccctctccccactgcgcgccgcctcctccccctcttctcccaccccctgagtccaccctctctngccgccctccaccgatacgtgctgccgcgccgcccccgcccccccccccgcctcctccccgaccncctcttgcgtgcgcgcccccccccgtncccgccccccccgcccccccccccccccccccccccncccccccccccccccgnacccccccccccccccccccccctcccnccgccccccccccccccgccccccccccgccccccgccccccgcccccccccccccccccccccccccccccccccctccccccccccccccccccccccgccccccccccccccccnccgccccccccacccccctccccctcccccccctccccccccccccccccgccccccgccccgccgntccccccgcccccnccccccccccccccccccgntncccccccccgcccggncccccccccccccccntcccacccccgncccccccccccccgcgcccccccccccccccccgccccccccttcccccccgcccccgccgccctgatccccccccccccnncccctccccccccccccccccccccgtcccgcccgcgccccccccccccccccccc

SEQ ID NO: 7854 - DNA, 679 bp, Zea mays
  Peptide Sequence Number=SeqID_13165
  Probeset Number=SeqID_22257
ggccgggaaagttaactaatctgacttgagcccacggggatttgcaaaagaaggggaagagaacgcgccgccgtcagcaccgcgtgagcgatgaacggatcctcaaggcgggcggcttatttgatggtgaccgcggtgtcgctcctcttcctggtgcggggcttgcgcgtgcgagccgccgcggcggcctcgtcgttggttttgccggacaagaggacacgtgtgatctgccagggcatgacggggaagaatggcaagttccatgccgaggaggacatcgagtacggaaaaaaaaatgggtggtggagtgactcacaagaaaggcggaactgaacatgttaggggtccatagtggttagactctgtagaagaagctaaggatgaaactaaagccaatgtgtctgtatatatatggaccataaccatttgctgccgtcgctataatggaggtgatggaggatgagatcgagcttgttgtgtgcattacggaaggaattacccagcatgacatggagaaagtgaaggctgcactacatagacaatctaagactcgattgattgggccaaattgccctggtatcattaagtctggggagtgtaagattggaatcatgccaggttacatccacaagcctgggcgtattgggattgtatctcgttttggaccatgacatatgaa

SEQ ID NO: 7855 - DNA, 426 bp, Zea mays
  Peptide Sequence Number=SeqID_13166
  Probeset Number=SeqID_22258
acccatgcgcatgatggtaaaggaagcgaggtatgtggacgacgcattgaacagaccgcttcctctacacaaaccgcagcccgttgctctcaaagcaaccagtagcatggaggcgctacccagcaaggtagcacaagtggaggctaccaggctcaatgaggatgaaatggcgcttatcatcaagcgcttcaagactgccttgaagggacacaaggagtttcccaacaaaaataaatcaaggggaaagcactcctgcttcaagtgcgggaggaaagaaagaaagaagaactacaggaaggcgaagggcgaggcgcacattggaaaggaatgggactccgattgttcttcatccgactccgatgatgaaggactagctgccttggccttcgacaagtcttctctcttccccaactgtaacaccccggg

SEQ ID NO: 7856 - DNA, 578 bp, Zea mays
  misc_feature (538)..(538): n is a, c, g, or t
  misc_feature (545)..(545): n is a, c, g, or t
  Peptide Sequence Number=SeqID_13167
  Probeset Number=SeqID_22259
tttattggcctctgcggcgccgacgagcacccagctctgtagaaagggctggtggtgaggacatccagcctcttgtgtgcgacaatggacactggaatggtcaaggctggttctgctggcgatgatgcaccaagggcggcttatcctagcattgtaggccatcatctcagagtgtcagatggaagtttcttgttaaaaggacgcacatgttggcgatgaggcacagtccaagagaggtagtctcacgctcaagcacccgattgagacacggtattgagagcacctgggatgacctggagaaaatctggcatcatactttctacaacgagcttcgtgttgccccaaaggagcaccctgcgtcgctcaccgaggctcctttgaaccccaatgccatcagggagaatatgacccaaattatgttggagactttcaatgctcctgccatgtatgtcgcactccaagcggcgctatcactctctgctagcgggcgtactaccgctatcgtactcgactccggtcatggtgggagccacactgngcccatntacgaaagacatgcccttcctcatgccattgtt

SEQ ID NO: 7857 - DNA, 645 bp, Zea mays
  Peptide Sequence Number=SeqID_13168
  Probeset Number=SeqID_22260
agaagcgaccagctgggcgatgcgcgccatattattggctaccggccgcttgtggtcagtgatgaaaagctcgggcgggaagtggatttaaccgcgcgcaaagattaccagtggggtccgaaaaacagcacccagcagggaccggcgaatctggctggcatcaaatttatcgtcacaccggaagatagcgtgcgcatcggcgcgctgctggccggtcaggccgattttattcgccaggtgcaggcgtatgacgaaaaacaggcacagcagcaggcgttcccggtttacgcagcgccgacgcgtggcgtcaacgacagcatcagcttccgcccggataacccgctggtcagcgatctgcgcgtacgtcaggcgctgttgcacgcgaccaacgcgcagcaggtggtgcaaaccctgttttcacctaactatccgcaggccacctcggtgatcgccgcctcggccgccgggtatgtgaacctcgcggacaaactgaaatacgatcccgcccgcgccaggcaactgcttgacgaggctggctggcagcccggcagcgacggcatccgcgccaaagcggggcaaaagctggccctgaccgtgtatgaatcgctgccgcagccacagaacaaagaagtgctgcaagtcgac

SEQ ID NO: 7858 - DNA, 516 bp, Zea mays
  Peptide Sequence Number=SeqID_13169
  Probeset Number=SeqID_22261
tcggaggccgaggggcccaaaaagaaggtggagtccaaaaactcgctggagaaatacgcctccaacatgcgcaacccgatcaaggacgaaaagatcgcgtcgaagctggctccccccgccaaaaaaaagatcgagggcgccatcgacgcggccatcagctgggtggaccccaaccagctccccgaggcgggcgagtttgatgccaaaatgaaggagctggagagccttttcaaccctatcattgccaaaatgttccagggcgcgggtgcccccatgggaggctccggcggcatggacgaggaccctccggctggaaacggtggccctggccccaaaatcgaggaggtggcctaaccggtttgtgtcaggtttcgtgtgtctgctccagtggctggctggccccgtccctgctcgatttatcgtcgtcgtcccggggtatccccgttaaaaccctttgttggtgaacaatattatcgtggcccgcgttttaagtaatacggtattctggttcgggtt

SEQ ID NO: 7859 - DNA, 583 bp, Zea mays
  Peptide Sequence Number=SeqID_13170
  Probeset Number=SeqID_22262
gcctccacgcaacaaaccacacaccccacctaccctggccggaccgggaggcatggacagcatggacctcgcgcttctgaagaaggccctgctgggcctgttcgccgcgcctgtggtggccatagtaacggcaagctgagcggcaagcgctaccgcctgccaccgggggccccgggcgcccgcgcgatgggaaactggctgtaggtggtgggcgacatggaccaccgctacctgctggacatggtgaagcagatcggggacatctttctgctgggcatgggcgtgcgcaacctggagggggtgtagaccccgaagctggtcaagggggtgctccacatgcacggcctggagttaggctcccgcacccgcaacgtcttgttcgacatgttcacggacaaggggcaagacatggacgatcacggtgtacggcgaccactggcgcaagatgctacagcatcatgaccgtcccgctgtcttcaccgacaaggaggtggcccagaaccgtgccgcgtgggaggaggaggcccgcctcgtggtcgaggacttgaggaaggacccccaggccgacgtcgggcggattctg

SEQ ID NO: 7860 - DNA, 604 bp, Zea mays
  Peptide Sequence Number=SeqID_13171
  Probeset Number=SeqID_22263
aacagatcggaattttcgagaaagcgcgagagagagagagacgaaacgatgtcgtatcttctaccgcatcttcactccggctgggctgtagatcaggcgattctagcagaggaagagcgtcttgtcgtcatacgtttcggccatgattgggatgagacttgtatgcagatggatgaggtgcttgcatctgttgctgagacgataaagaactttgcggtgatatatctggtggacatcaccgaggttccagacttcaacaccatgtacgagctctacgatccttcgacggtgatgttcttctttaggaacaagcacattatgatcgatcttgggactggtaacaacaacaagatcaattgggctatgaaggacaagcaggagttcatcgatatcattgagaccgtcttccgtggtgcaaggaaaggccgtgggctggtgattgctcctaaagattactccaccaaataccgctactaaccggacttggcaaaaacattaagatcaaaaaaactatgtctactgattctagtcagttgaaaaatatcctgtgaacttgtggcttatatgctttggtgatttgtgatttctggtttgtttgctcttt

SEQ ID NO: 7861 - DNA, 743 bp, Zea mays
  misc_feature (388)..(388): n is a, c, g, or t
  misc_feature (454)..(455): n is a, c, g, or t
  misc_feature (459)..(459): n is a, c, g, or t
  misc_feature (465)..(465): n is a, c, g, or t
  misc_feature (482)..(482): n is a, c, g, or t
  misc_feature (503)..(503): n is a, c, g, or t
  misc_feature (549)..(549): n is a, c, g, or t
  misc_feature (560)..(560): n is a, c, g, or t
  misc_feature (563)..(564): n is a, c, g, or t
  misc_feature (573)..(573): n is a, c, g, or t
  misc_feature (576)..(576): n is a, c, g, or t
  misc_feature (582)..(582): n is a, c, g, or t
  misc_feature (595)..(595): n is a, c, g, or t
  misc_feature (597)..(597): n is a, c, g, or t
  misc_feature (600)..(600): n is a, c, g, or t
  misc_feature (602)..(602): n is a, c, g, or t
  misc_feature (618)..(618): n is a, c, g, or t
  misc_feature (622)..(622): n is a, c, g, or t
  misc_feature (626)..(626): n is a, c, g, or t
  misc_feature (635)..(635): n is a, c, g, or t
  misc_feature (639)..(639): n is a, c, g, or t
  misc_feature (653)..(653): n is a, c, g, or t
  misc_feature (659)..(660): n is a, c, g, or t
  misc_feature (674)..(674): n is a, c, g, or t
  misc_feature (677)..(679): n is a, c, g, or t
  misc_feature (685)..(685): n is a, c, g, or t
  misc_feature (689)..(689): n is a, c, g, or t
  misc_feature (691)..(691): n is a, c, g, or t
  misc_feature (694)..(694): n is a, c, g, or t
  misc_feature (696)..(697): n is a, c, g, or t
  misc_feature (701)..(702): n is a, c, g, or t
  misc_feature (710)..(711): n is a, c, g, or t
  misc_feature (713)..(714): n is a, c, g, or t
  misc_feature (716)..(716): n is a, c, g, or t
  misc_feature (728)..(729): n is a, c, g, or t
  misc_feature (740)..(742): n is a, c, g, or t
  Peptide Sequence Number=SeqID_13172
  Probeset Number=SeqID_22264
ggattcaacacgctgatggcggcggcgaaaaaggattatgaagcgacgctgaggaagccgaaacagtccagcgtgaaggtgtctgcgggcgatcgtcaggaagacagtgctcatgctgccctgctgacgcttcaggcagaactccggacgctggagaagcatgccggagcaaatgagaaaatcagccagcagcgccgggatttgtggaaggcggagagtcagttcgcggtactggaggaggcggcgcaacgtcgccagctgtctgcacaggagaaatccctgctggcgcataaagatgagacgctggagtacaaacgccagctggctgcacttggcgacaaggttacgtatcaggagcgcctgaacgcgctggcgcagcaggcggatnaattcgcacagcagcaacgggcaaaacggccgcattgtgcgaaaagccgggggctgctgccggcannatancggganccccggacagccctgangacagatgggataatccctgngctgatacgtatgtcaacaaaaaagactggcggtgaaacacttccngacttgtgganccnnatccgttgntgntggaanacccccgcatttncngtnantgccccccaacctttntttncaanttgggaacnacgntggaaatggccatncctctnnttataaaatttttnagnnngggggngggntntancnngggnngggtcctnngnntncggtaaattttnngtgggtggggnnnt

SEQ ID NO: 7862 - DNA, 449 bp, Zea mays
  misc_feature (15)..(15): n is a, c, g, or t
  misc_feature (68)..(69): n is a, c, g, or t
  misc_feature (143)..(143): n is a, c, g, or t
  Peptide Sequence Number=SeqID_13173
  Probeset Number=SeqID_22265
ggcataaaccccacnaagaaaggaggaaggggggagcatgcaaggcaaaacaccgagggaaacgaccnngcagaaggacaggggcagaagagccgaaccacggaagcacggccagagcgccgcacaaactacgctagaagccnggctgatatgagcatggcagggtattagcttggataaggagatcggcatccaagcaaccttaatgtagatcgctatagtggaaaaatattacacatcgacttcggagattgcttagaggcttcaatgaatcgagaaaagttccctgaaaaagaaccaatccgatagacccgaatgctagagaaagctatggaagttagcggcattgaggggacattccgaacaacttgtgaaaatgagatgcaaggtcttcgcacaaacagagacagcggtatggccatgaaggaggcatctgaacatgaccccga

SEQ ID NO: 7863 - DNA, 489 bp, Zea mays
  Peptide Sequence Number=SeqID_13174
  Probeset Number=SeqID_22266
tgcatgcctgcagctgttcaacgacgagaagaagggcaactgcgcgagctgccacgtgagccagcgcacgctcgaaggcggcccgccgcagttcagcgacttcggcctgatcgcgatcgcggtgccgcgcaaccgcgcgctgccggtcaatcgcgacccgcgctttcacgatctcggcgcgtgcggccccgagcgcaccgacctgaagggccgcgacgaattctgcggactgttccgcacgccgtcgctgcgcaacgtcgcactgcgcaagacgttcttccacaacggcgtctatcactcgctcgaggacgtgatgcgtttctacgcggagcgcgacatccatccggaaaagttctatccggtcgtgcacggcaaggtgcagctgtacgacgatctgccgaagcgctactggccgaacatcaaccgcgagccgccgttcgaccgcaagcgcggcgatgcgccggcgctgaacgccgcggagataaggac

SEQ ID NO: 7864 - DNA, 685 bp, Zea mays
  misc_feature (4)..(5): n is a, c, g, or t
  misc_feature (161)..(163): n is a, c, g, or t
  Peptide Sequence Number=SeqID_13175
  Probeset Number=SeqID_22267
gganntgacaaacatgttttgcagtttgggtgttaagccattgcagttgcagttacaattgcagccaaaaacaacatcatgcttccactcccaggtttcaggagtaacaacaacctcgtcactgtctctgccacctcgtactcctcttgtgttaacccacnnncccatcttccacttccaacccagacaactcaaacgatcttccaccaccattcgttgctcctctgcgttgactcctcaattgaagtccaccttggataaggttgttacttcaaacaaagtagttttgtttatgaagggaaccaaggattttccaatgtgtggattctcaaacacggtggtgcaaatattgaagtctctgaatgtgccttttgaaacaataaatgtacttgataatgatatattgcgccaaggattgaaggagtatactaattggcctacctttcctcaactctacatagaaggagagttttttggtggctgtgatatcactgttgaggcatataagagcggggaattgcaagaactgttggagaaggcaatgtgctcttgaagcctcatttgacaagagcagatggaaggaatgagttagggaagagaacttcccaaggtagtaatcataccatgccttgtggatgatggaccaaatatattgtcagatacatttgagtccacaacctattac

SEQ ID NO: 7865 - DNA, 703 bp, Zea mays
  misc_feature (25)..(26): n is a, c, g, or t
  misc_feature (168)..(171): n is a, c, g, or t
  misc_feature (571)..(572): n is a, c, g, or t
  misc_feature (601)..(602): n is a, c, g, or t
  misc_feature (604)..(604): n is a, c, g, or t
  misc_feature (625)..(626): n is a, c, g, or t
  misc_feature (628)..(629): n is a, c, g, or t
  misc_feature (651)..(652): n is a, c, g, or t
  misc_feature (657)..(658): n is a, c, g, or t
  misc_feature (677)..(678): n is a, c, g, or t
  misc_feature (691)..(692): n is a, c, g, or t
  misc_feature (694)..(694): n is a, c, g, or t
  misc_feature (696)..(696): n is a, c, g, or t
  Peptide Sequence Number=SeqID_13176
  Probeset Number=SeqID_22268
gggggtgcgttctttctctcttacnngtactcttctgctccaccccctcatcataaataaataacaccctttctctttatctctctctgttctgttcattttttctctgtttcagatccaaattcggtagccgctctttttcaaagaacagtctctccatcagaatgnnnngggaataccaataacaccaccactgtccctagcatcgttgtttatgtcactgttcctaacaaagaagcaggtaagaaattggctgaaagcattgtcaaagagaagcttgcagcttgtgtaaacagggtacctggtatcgaatcagtataccagtggcagggagagatccaaactgattctgaggaacttctaataatcaagactaggcaatcacttttggaagcactgactgagcatgtcaaagcaaatcatgaatacgatgtgccagaggtgatctccttgcccatcactgggggcaatcttaagtatttagaatggataaaggagagcacaagggagtgactgtcaagtttatagtctgagtatgtgagttcaagagttcttccgcctttgtgtgttnnataaagctggcatgtcatctatgtaactnngnaatgaggtctatatattactnntnngaggatgaggatcagccttgtnntactnntgatggctgtcttgggttnnatatgattttctnngncnaaaaaaa

SEQ ID NO: 7866 - DNA, 291 bp, Zea mays
  Peptide Sequence Number=SeqID_13177
  Probeset Number=SeqID_22269
gggcctgcccctcagccccgttcgggaggtggccttactgcggcgtctggaggcttttgagcatgccactgttgtcaggcttatggacgtttgtgcaacaacccgaactgaccgggagaccaaagtgaccctggtgtttgagcatgtggaccaacatctcaggactgtggtgaggaacaaggcacccccaccaggcttgccagtggagaccataaaagatctgatgcgccaatttctaagaggcctggatttccttcatgccaactgcatcgttcaccgagacctgaagcc

SEQ ID NO: 7867 - DNA, 1022 bp, Zea mays
  Peptide Sequence Number=SeqID_13178
  Probeset Number=SeqID_22270
tgcagagcaaaaaaggctggtcggatttaaaagttggcgactgcggcgatgactgccagtggcgtttttacacccgacccggcgagctgggcagcgagatcggcaatattcaggtgctgcacaacgtcggctacatgaagagcctgatggtgaaacgcgtactctccgccatcattccgctcatcctgatgatgccgctgtcgctgctggtgatctggctggtggtacgggccattacgcgcgatctgcgcgtagcctcgcgccagattgcggcgcaggaaaccctgcatccgcacagcgtgtcgccggacggtctgccggacgaagtgctgccgctggtcgatgcttataactcgctactggataaactacgcgcggcctggtcgtcacagcgccagttccttgaggatgccgcgcatgaactgcgcacgccggtcaccgccgtcacgttacagctggagaacctgcgtcagcacatcctgccgggcgaagccagccgccagtttgatcagctggaagcgggcgtcacgcgcacgcgccatctggtgacgcagttgctgaatatctcacgccaggaggatcagtccgtggtcgccagcgtcgagaccattgagcttgatgacctgctgaaggagagcattgagcaactgatggtggtggcggacaagcgcggcattgatatcggcttcaacggcaccgcgcactatcgtctgcacgccagccgatccgatctgcgcagcctgttcgataacctgatcggcaacgccatgctgcacacgccggagggcagcctggtggatgtgctgctgcatcgcgtcggtcatcatacggtagtggatattgtcgataacggccccggcatgccggagtcgtttatcgagcgcgccttcgatcgctttacccgctcgccggatgtccaggcgcagggcagcggcttgggattgtcgatcgtgcgcagcgtggcgcaaaagcatcagatgcaggtggctctgtcgaattgcctgaacccgcagggtgaagtg

SEQ ID NO: 7868 - DNA, 697 bp, Zea mays
  misc_feature (6)..(9): n is a, c, g, or t
  misc_feature (21)..(23): n is a, c, g, or t
  misc_feature (26)..(27): n is a, c, g, or t
  misc_feature (166)..(170): n is a, c, g, or t
  misc_feature (180)..(184): n is a, c, g, or t
  Peptide Sequence Number=SeqID_13179
  Probeset Number=SeqID_22271
ggcgtnnnncatacgcgagcnnnagnngcatcagtatcagaaattcctccattttagagacccgcttgggtttcttccttctgctaacctaaccaaatggctgatcctgagttggaagcaatcagacagagaaggatgcaagagctcatggctcagcatggcgtgnnnnnatcaacagannnnngaacagcagaaggctcaggaggatgcaaagatggaggcagaggaacgacgacaaatgatgctgagtcagatactgtctgctgaagcacgagaaagacttgcttgaattgcgttggtgaaacctgagaaagcaagaggtgtttaagatgttattttgagagctgctcaaatgggtcagataactgaaaaggtttctgaagaaagactcataacacttctggagcagataaacaaccagacaacaaggcaaaccaaagttactatacagcggcgtcgaagtgttcttgaggatgatgattaacttccacagtctcttcaaatgaaagggtcttcttgagtattgatttaatgctcaattgtgtattttatcgacaaaatattctggaagtgggttgtgaaatatatgtttcattttgaaattttaattgtcttgccagtcctcctaatcaaactatatactcgaaagctttgtattaatattctggcatatatttctttgtgaaacattttctat

SEQ ID NO: 7869 - DNA, 546 bp, Zea mays
  misc_feature (216)..(216): n is a, c, g, or t
  misc_feature (370)..(370): n is a, c, g, or t
  misc_feature (478)..(478): n is a, c, g, or t
  Peptide Sequence Number=SeqID_13180
  Probeset Number=SeqID_22272
tctacctagccgtaacctctttccccatcctgccatccggggtgggcagggggggcgctcaaagctcgagcgtctccccatcggaaccctaatcctctctttccctactcgcgggagccaactccaccggggggggaagcgggagggaagcacctcgggcccgggaagatggggctcccacatctgggcgggagcgtggggcgcgccctggcgcanatgagcaacgccacggggaccgatgagaaggggctcaacgagggcctcaacgagagctcgcgcgcgctcctacaggccgaggtgcaggtcaagatggggcgcgacatgcaagctaacatcaagcgcatcgtgaaccgggaggcgcttgccgcangcaccaacaagcgcgggatcatgcggcaggctgtcttcacggaactctgcaccatgtgagatcctgggaagccttctttcactcccaaaaagggcaagccaagcgtantcatgggcggtgggctgcaaggggctgggaaaactactacttgggcaaaatatgcgtattatcatgca

SEQ ID NO: 7870 - DNA, 614 bp, Zea mays
  Peptide Sequence Number=SeqID_13181
  Probeset Number=SeqID_22273
tgggtacctcgaggccggccgggccgggatctctcccccagacttccgtccgagtctgagctcatctccgcgcgctgtcgccgacgtcgtcgtcgctcgactcccaccgtgcacccgtggcgcatgagacctacaagggttcttctcacgcactgtactgcgttccgcacgtcatagagatctgccaagggtaagaagccaggcatgggtgccaatccagtttggaagaccattgcgcttggtgtcaagactcccactcaagccattgatgggacctacattgacaagaaatgtgcattcactgcaaccgtttctatcgaaggcagaattatatgctgcaacatgccacagtgctagaatgaacagaaccatcattgttcacacgaactacctccactttgtaaatatataccagaggtatgaagagaggcactccaacattccagctcacatctccccatgcttccgtgtgaaggaaggcgaccatgtcttcattggccattgcaggcccctatcagcaactgtgaggtacaatggcgctaaagtcattccagctggatctgctgctgctggcaagaatgctttcaccgtagactgagtataaaactatgttc

SEQ ID NO: 7871 - DNA, 606 bp, Zea mays
  misc_feature (164)..(164): n is a, c, g, or t
  misc_feature (466)..(471): n is a, c, g, or t
  misc_feature (511)..(512): n is a, c, g, or t
  misc_feature (561)..(561): n is a, c, g, or t
  misc_feature (563)..(565): n is a, c, g, or t
  misc_feature (572)..(572): n is a, c, g, or t
  misc_feature (579)..(582): n is a, c, g, or t
  Peptide Sequence Number=SeqID_13182
  Probeset Number=SeqID_22274
ggatcgtacagaagggagaagtgtaaaccatggcttctatggcaagcttggctgttgttcaaccagctactatcaagggccttgctggaagttccattactggaactaagctctctttcaagccctctcgccagagtttcagacccaagaatttcaggagtggngttgtggtagcaaagtacggtgacaagagtgtgtactttgatttggaggatctgggaaacactacaggccagtgggacttgtatggctcagatgcaccttcaccctacaaccctcttcagagcaagttcttcgagacatttgctgctccattcacaaagaggggattgttactcaagtttttgattctgggaggtggttccaccctggcatacttgagtgccacagcttcagatgacattctaccaatcaagaagggcccacaacttccaccaaagctcggtccccgtggcaaaatctaatnnnnnntcggaattccatctgtttagctcgcccccctacccctctnnttttgaattgaacatgtatatctctgcttgcctattgtgcaacgagtangnnntcattangaaatannnngaacatcattgccctaaaacaact

SEQ ID NO: 7872 - DNA, 642 bp, Zea mays
  misc_feature (163)..(167): n is a, c, g, or t
  misc_feature (411)..(412): n is a, c, g, or t
  misc_feature (524)..(525): n is a, c, g, or t
  misc_feature (534)..(535): n is a, c, g, or t
  misc_feature (595)..(596): n is a, c, g, or t
  misc_feature (599)..(602): n is a, c, g, or t
  misc_feature (604)..(604): n is a, c, g, or t
  misc_feature (632)..(633): n is a, c, g, or t
  misc_feature (636)..(640): n is a, c, g, or t
  Peptide Sequence Number=SeqID_13183
  Probeset Number=SeqID_22275
gcttattgacacacagtgctagcctgagtcacagctcaagttcataactgaggcctggctacagatagttgaatgcaggcgggtgctgaagtggacatattcatatgggtactatttacctgagcatgaacatgccaaaaaacagttctttgagtacttacannnnnaggcagaatctggtttggagagacttcatcaatgtgctgaaaaagaactacagctattcctcaatgctgatggcccatccggagaattcaatgactttcgcacaaaattagctggattgaccagtgtgaccagaaactactttgagaatttggttagggcattagagaacggtttatctgatgtggatggtaatggcgccgcatccagcaaggcaacgagctctaaaaatgctgcagggagcannaaggggagaggtggaagaggaaagggaaccattcgagcaagcatgttcagcagaatgactgacgataatcattggtcttgtgagcattgtacctatgcaaatgtcagatctnngaccacttnncagatgtgcaatcaacagcgtcgatgaaaatcttggtccttcattggaaacacgtgtctnntgnnnnangccatgcatcaaaagctgaaatggagcnnttnnnnnta

SEQ ID NO: 7873 - DNA, 625 bp, Zea mays
  misc_feature (11)..(13): n is a, c, g, or t
  misc_feature (161)..(161): n is a, c, g, or t
  misc_feature (163)..(170): n is a, c, g, or t
  misc_feature (508)..(511): n is a, c, g, or t
  misc_feature (586)..(588): n is a, c, g, or t
  misc_feature (593)..(594): n is a, c, g, or t
  misc_feature (616)..(619): n is a, c, g, or t
  Peptide Sequence Number=SeqID_13184
  Probeset Number=SeqID_22276
agatcgtaggnnncggaacagtgcccgtaggtcgtgttgagactggtgttttgaagccaggaatgatcgtcaccttctctcccgctgccctctctactgaggttaagtcagttgagatgcaccacactgccatgcctgaggctgtcccaggagacaacgtngnnnnnnnngtaaagaacttgtctatcaaggatatccgtcgtggtatggttgctggtgactctaagaacgaccctcctcaggaagtctaagatttcacttctcaggttatcatcttaaatcaccccggacaaatccacaatggatatgccccagtgctcgattgccacactgctcacattgcttgcaagtttgctgagcttttgtctaaggtcgacagacgtactggacatgaaacagagaaggagcccaagaacgtcaagaacggagatgctgctatggtccgccttgtgccatccaagcctatgtgcgttgagcccttcgctgaataccctcccctcggtcgttnnnntgtccgtgatatgagacagaccgtcgctgtaggagtcatcaagtccgtcacccgcaaggccccaggcaaggttgnnngcaannctgctgccaagggtggaaagannnnaaaaaa

SEQ ID NO: 7874 - DNA, 593 bp, Zea mays
  misc_feature (566)..(571): n is a, c, g, or t
  misc_feature (574)..(576): n is a, c, g, or t
  misc_feature (582)..(586): n is a, c, g, or t
  Peptide Sequence Number=SeqID_13185
  Probeset Number=SeqID_22277
ggttggaaccctaatcagttcagaatggcgcaaggagcattggagcaagtgcaatgcttcggccggaagaagacggcggtggcagtaacacactgcaagagaggccgtggtctcatcaaaatcaacggctgtccaatcgagctcgtcgagcctgagattcttcgtttcaaggccttcgagcccatcctcctcctcggcaggcaccgattcgccggcgtcgatatgcgcatccgtgtcaagggcggtggtcacacctctcagatctacgccatccgtcagagcattgccaaggcactcgtggctttctaccagaagtatgtggatgagcagagcaagaaggagatcaaggatatcctcgtcagttacgatcgtactctccttgttgctgatccaaggcgctgtgagcctaaaaagtttggtggtcgtggtgctcgtgctaggttccagaagtcttaccgttgattcctcttttttctcatgctctaagttttcagtactctctattttgtgccgctcctcttttattcatcaaggttttgaacaatattatataatgagttagtcannnnnnaannnaaaaannnnnaaaaaaa

SEQ ID NO: 7875 - DNA, 611 bp, Zea mays
  misc_feature (6)..(9): n is a, c, g, or t
  misc_feature (20)..(21): n is a, c, g, or t
  misc_feature (164)..(169): n is a, c, g, or t
  misc_feature (179)..(182): n is a, c, g, or t
  misc_feature (605)..(608): n is a, c, g, or t
  Peptide Sequence Number=SeqID_13186
  Probeset Number=SeqID_22278
ctgttnnnnttgatgcaagnnccaacctgttgaaccccaagtgggatgaaggcatgttgtcaactgggtatgagggtgtacgtgagattgagaagaggcttactaacacagttggttggagtgcaacttcaggccaagttgacaactgggtgtatgaagaagcnnnnnnactttcattnnnnatgaagaaatgctgaagaagctcatgaacacaaatccaaactcctttaggaagctggtgcagacattcttggaagccaatggacgtggatattgggagacttcagaacaaaacattgagaagctcaggcagttgtactcagaagtggaggacaaaattgaaggcattgatcgctgaagttacacacccataattgagatgaatatacagagacattaactgctgattcaactgtaccttctgtctctgaagcttctttcccatgatgaattggtagttgttgccaatgccatcctttttaatgtaattttgttctccattgctcttttttccctgttgtaattttattcttcttcagggatcatgctactttgtgcagttgcaaatgccaattcaacttggccaatacagcttccattccgannnnaaa

SEQ ID NO: 7876 - DNA, 1551 bp, Zea mays
  Peptide Sequence Number=SeqID_13187
  Probeset Number=SeqID_22279
atggacggggtggccatcttctccgcggaggctgggcgcagagctcaacgaccgcgtcaagctccgacaatcgcgcagccgcacggacccccctgccctcattaccaggcgcaggatttggaaattcactatcacccgggcaaggcaaagttggttgcagatgccttgagtcgaaaggagcatgttcattcagctattgttgcccagctacccgatgagattgttgaggatttcaggagacttaacctggggatagttgctcacactaaaggagttactattgatgtggaacctaccttggagcaagaaatctgcaaaggacctactggcgatgctaggatacaagagatcaatgatctgattactgaaggtcgaggtccagaattcacgaaagatgagcaaggcaccgtatggttcaaggacaggctatgtgttcctgatattgaaagccttcgtgagactattttaaaggaggcccatgactcggattattctattcatcctaggagtactaagatgtatcaggatttgaagcaaaggtattggtggcatggattgaagagagatgtggctgcacatgtggctatgtgcgatgtgtgccaaagagttaaggctgaacaccagaggctagctggactactgcacccactaaagatacccgagtggaagtggaaagagaatgatatgttaagagcttgtgctcttaaacatggtggaagttgggataagagtttgccttatgctgagttctcctataataatagctaccaggccagtttgaagatgtcaccgtttgaggctttatatggcagaaagtgcaggactccattgtattgggatcaaactggtgaaaggcagttgtttggacctgagattatacaggaagcagaggaacaagttcagcaaataagagagaatttgagaactgcacagtcaaggcagaaaagttatgctgacacccggagaagactgcttgagtttaaagagggtgattatgtctatttgaaggtgtcaccactccggggtatgagaagattcaaagtcaaaggaaagttgtcccctcgcttcattggacttttcttgatcttaaagcgagtgggagaggttgcataccaattggagttaccggatcatcttgcggatgttcatgatgtctttcacgtatctcagctgaagaaatgtctcagggtacctgaagagcagttatcaatggaagaccttagcgttcaagatgacctgacttatgctgagtatcccatcaagattttggatactttgactcgagttacgaggaataaggttataaagatgtgggcccatggcctcagcctcactcccgccgcgtgccagcctcgttcttgcgcgctggagtcgctgggtgtgggccgcatggacggggtggccatcttctccgcggaggctgggcgcagagctcaacgaccgcgtcaagctccgacaatcgcgcagccgcacggacccccctgccctcattaccaggcgcagaacgcgaaagctgggagctccggtgaactcgccgccgcggtagagtga

SEQ ID NO: 7877 - DNA, 434 bp, Zea mays
  Peptide Sequence Number=SeqID_13188
  Probeset Number=SeqID_22280
tcagcgcatgcagggttgatgttcggcgggggttggtatcatggcggcccccatcgaagtcaccggtgaatccccatgaaatatctgcacagcatggtgcgcgtgcgcgatctcgacgcctcgttgcgtttctattgcgagggcctgggcctgcgcgaagtgcgccgcaaggaggtgcccgaaggcaagttcacgctgatcttccttgccgcggatgaaagccccgaagcggaagtcgaactgacctggaactggggttcgaccgaggattacggcagcgcacgcaacttcggccacctggcgtttcgggtggaggacatctacgccacctgcgcgcgcctgcaatcgatgggctacaccattcaccgtccgccgcgtgacggccacatggctttcgtgcgctcgcccgatctggtctcggtcgagttgctgca

SEQ ID NO: 7878 - DNA, 375 bp, Zea mays
  Peptide Sequence Number=SeqID_13189
  Probeset Number=SeqID_22281
ccgcgcaatgcatacaccgacgccgatacgtgggaacgcgtgtgcacgctcggcggcacgctgtcggttatggaactgctcgaggtcgagccggaggtcgtgttccgccggctcttctggcaggaaaacgtgcagcacttcgatccggccggtacgctctttctgtgctcgtgctcgcgcgagaaggtcggcgcgatgctgcgcatgctcggccgcgaagaggtcgacagcgtgatcgtcgagcgcggtcatgtcgagatccactgcgagttctgcaatcagcgctacgagttcgatcccgtcgacgtcgcgcaactgttcgccgcgccggaactcacgaccggcatcacgcccgcgaccgaccagcgtcactga

SEQ ID NO: 7879 - DNA, 570 bp, Zea mays
  Peptide Sequence Number=SeqID_13190
  Probeset Number=SeqID_22282
atgactttgcaaggtgatcaagctgcgtcaccttcggccacgaagctagtgttcacaatcagaggcagttcaagctccgaactagccaataagaagcaaaagaaggaagcacagagaagagtgcaacatgttggagtacaaggacccttcatcaagtccaaatggtctcatgtgtcgattatattttctcaagaagaccttcagcttaaggattaccctcacaatgatgccatggtcatatcaagtgttatcaaagtgttcttggttcacaatgtcctcgtagacattagtagtgcagcagacattatctttgcaaaagccttcaggcaaatataccatctgatcatggtcctattgatgtgcatggaagctaagaggcttctagaagggtcgaagggaattggacagattccatggcctagttgttctgtcgctggtactgatttcctatctgttggttgttctggcggtactactgctgctgctaagggaactacctctgatactgctggtgctagcgctgatgctggtgtccttgagaaacagagacagctactgcttcgggcctga

SEQ ID NO: 7880 - DNA, 837 bp, Zea mays
  misc_feature (3)..(16): n is a, c, g, or t
  misc_feature (18)..(18): n is a, c, g, or t
  misc_feature (22)..(33): n is a, c, g, or t
  misc_feature (35)..(35): n is a, c, g, or t
  misc_feature (37)..(37): n is a, c, g, or t
  misc_feature (39)..(39): n is a, c, g, or t
  misc_feature (42)..(42): n is a, c, g, or t
  misc_feature (45)..(46): n is a, c, g, or t
  misc_feature (51)..(51): n is a, c, g, or t
  misc_feature (57)..(57): n is a, c, g, or t
  misc_feature (61)..(62): n is a, c, g, or t
  misc_feature (66)..(68): n is a, c, g, or t
  misc_feature (88)..(88): n is a, c, g, or t
  misc_feature (92)..(92): n is a, c, g, or t
  misc_feature (94)..(94): n is a, c, g, or t
  misc_feature (111)..(112): n is a, c, g, or t
  misc_feature (114)..(115): n is a, c, g, or t
  misc_feature (118)..(118): n is a, c, g, or t
  misc_feature (128)..(128): n is a, c, g, or t
  misc_feature (130)..(130): n is a, c, g, or t
  misc_feature (135)..(135): n is a, c, g, or t
  misc_feature (140)..(140): n is a, c, g, or t
  misc_feature (149)..(149): n is a, c, g, or t
  misc_feature (155)..(155): n is a, c, g, or t
  misc_feature (161)..(161): n is a, c, g, or t
  misc_feature (186)..(186): n is a, c, g, or t
  misc_feature (221)..(221): n is a, c, g, or t
  misc_feature (229)..(229): n is a, c, g, or t
  Peptide Sequence Number=SeqID_13191
  Probeset Number=SeqID_22283
cgnnnnnnnnnnnnnnancccnnnnnnnnnnnnangnanccngtnnccctntggggnaagnnttannntaaaccacatcggtagtttnggcntntagaacaggtatttccnntnngtnagcaaatcgncnttganagcancgacaatanaatcancacacncggattgtgaagcgaaagtcagttncgtatgagagcgggcacgtgccagctgtttgacanagaatccntgctgggcataagatgagacgctgagtacaaacgccagctgctgcacttgcgacaaggttacgtatcaggagcgcctgaacgcgctggcgcagcagcggataaattcgcacagcagcaacggcaaaacggccgccattgatgcgaaaagccgggggctgactgaccggcaggcagaacgggaagccacggaacagcgcctgaaggaacagtatggcgataatccgctggcgctgaataacgtcatgtcagagcagaaaaagacctgggcggctgaagaccagcttcgcgggaactggatggcaggcctgaagtccggctggagtgagtgggaagagagcgccacggacagtatgtcgcaggtaaaaagtgcagccacgcagacctttgatggtattgcacagaatatggcggcgatgctgaccggcagtgagcagaactggcgcagcttcacccgttccgtgctgtccatgatgacagaaattctgcttaagcaggcaatggtggggattgtcgggagtatcggcagcgccattggcggggctgttggtggcggcgcatccgcgtcaggcggtacagccattcaggggggcccggtccaattgttacc

SEQ ID NO: 7881 - DNA, 1621 bp, Zea mays
  misc_feature (29)..(29): n is a, c, g, or t
  misc_feature (54)..(54): n is a, c, g, or t
  misc_feature (57)..(57): n is a, c, g, or t
  misc_feature (98)..(111): n is a, c, g, or t
  misc_feature (137)..(152): n is a, c, g, or t
  misc_feature (156)..(156): n is a, c, g, or t
  misc_feature (177)..(177): n is a, c, g, or t
  misc_feature (185)..(186): n is a, c, g, or t
  misc_feature (188)..(188): n is a, c, g, or t
  misc_feature (190)..(191): n is a, c, g, or t
  misc_feature (195)..(199): n is a, c, g, or t
  misc_feature (205)..(205): n is a, c, g, or t
  misc_feature (221)..(221): n is a, c, g, or t
  misc_feature (228)..(228): n is a, c, g, or t
  misc_feature (230)..(231): n is a, c, g, or t
  misc_feature (234)..(234): n is a, c, g, or t
  misc_feature (268)..(268): n is a, c, g, or t
  misc_feature (308)..(308): n is a, c, g, or t
  misc_feature (346)..(346): n is a, c, g, or t
  misc_feature (422)..(422): n is a, c, g, or t
  misc_feature (469)..(470): n is a, c, g, or t
  misc_feature (479)..(479): n is a, c, g, or t
  misc_feature (598)..(599): n is a, c, g, or t
  misc_feature (604)..(604): n is a, c, g, or t
  misc_feature (704)..(704): n is a, c, g, or t
  misc_feature (754)..(754): n is a, c, g, or t
  misc_feature (773)..(773): n is a, c, g, or t
  misc_feature (1084)..(1084): n is a, c, g, or t
  misc_feature (1177)..(1177): n is a, c, g, or t
  misc_feature (1191)..(1191): n is a, c, g, or t
  misc_feature (1232)..(1232): n is a, c, g, or t
  misc_feature (1352)..(1352): n is a, c, g, or t
  misc_feature (1424)..(1424): n is a, c, g, or t
  misc_feature (1438)..(1438): n is a, c, g, or t
  misc_feature (1501)..(1501): n is a, c, g, or t
  misc_feature (1537)..(1537): n is a, c, g, or t
  misc_feature (1596)..(1596): n is a, c, g, or t
  Peptide Sequence Number=SeqID_13192
  Probeset Number=SeqID_22284
gtgggggatcgtgcgcggcggagcggggnaaaagagagaagggcgcgggggganggngcccacggcagtcagggggagaggcaagaagcgaaaagagnnnnnnnnnnnnnngttgcagtgaccccgccccacaaaannnnnnnnnnnnnnnngtgncccaacaaaaaaggggggggnggagaagnngngnngggnnnnnaaaggnaggagagagaaagggnagaaganannagngagtgtgaaaggccacgaggagagaaaggagganaaggagaggagagagaagaagagagagagaggggaggagnaaggaaggaaggaggagagagaggaaagagaaaggaangaaaaaggaaaaagagagagaaaagaaagagggagagaggaaagagaaggagagggagagagagaaagaaaaaaanaaaaggagaaaagagaagagaaggagagaaaaaaagaaaaaaagaannaaaaaagangaaggagagaagagggaaggagaggaggggaaagagagaggaagaaaggggagaagaggagaaagaaagagaggaagaggaaaaatgtcatcggaggcagagaaggagagagaacgagnngaganggagagtacaacggagacacgaggaaaaagatatagaagacgaccgcccacccacacagagtagaggacggagagggagagagacgacgagagaagaganggcagaaagctcaaaagagcacacgcgacgaggcgagagcgggaggaganaacacggagagaacaaaangaacacacgagaaaagcggcgagcggagcgcggaggaggatgacgagaggaaaccagacgcgagagacacagcggaggacggaccagggaggcaggaaagagcgacccacgcgaagaaggaacgggatcagaccacgagacgcgagggcgacacacgcaagacagacggagcgacacgggagcagccggggggaagagcgagcgcaactaacgagaggggaagggacggtgagacggagcggaatgaaggagagaggtgagagacgagaaccgcacgcgaggagacacggtgaagcgacacagagagtggncggaagcaacgagagcgcacggagtgatgaggggagaggccgagagaggaaagtagagtacggactcagcacagagacagagaccacagacanagagacgcaccacnagacgaggacacaaaggaccaaaacaggcaggagctgacantagagagagaccagaacgagatagaagacgggaggcgggtgaccgcaacagagcatatcagagggaagggaatggcgccgcgaccgcgagacgcgtagcgacgaggagaggagctgaggnagtaggagcgaggagagggcacagagcgcgagcgagcgacagaggagatgtataagaaggagaggaggacanggagacagaggcanacgcgcccatcagcgaagacaagctcgagaatacagtctcgccagcacacgacagcgcactcntctcacgcgctcggtgagcacagaacacgagtcgtncgtcgagcggcatcacagtacggtcagcggaagtgtagggcgaagacggcgacgagcgncgacgaacagctaagacagaggagg

SEQ ID NO: 7882 - DNA, 423 bp, Zea mays
  Peptide Sequence Number=SeqID_13193
  Probeset Number=SeqID_22285
atgcagattaggctggatgtcccgacactcgcaagtctacttcaggttatgcagtcttcctgggtaacaacctcatctcatggttgttcaagtgccaaaacacggttttccgttccagcgctgaagctgagtatcgtgcagtcgccgagtcatcctggctacgacagctcctcaccgagttacagacaccactgcgtcgcctctgtggtcttatgtgacaacatcaacacaatctacatggcctccaacccggttcagcatcaacgtacggagcacatagagattgacctccacttcgtgcgggaatgtgttgcttgtggtgatattcgcgtccttcatgttccaacgtcatcacagtacctcgataaattcaccaagggtcttccatcctctgtctttacagagttcaggaccagtttgaac

SEQ ID NO: 7883 - DNA, 709 bp, Zea mays
  Peptide Sequence Number=SeqID_13194
  Probeset Number=SeqID_22286
ttcgagctcggacccggggtcctctttttcaatggcaccggacagtgcggtcattatttttgcagccccgcctgcgatgcggaattcagattgtgaatatccctatcgccagcacagtgatcttctttacctgactgggttcaacgagccggaagcgtgtcttgttctgatcaaaagtgatgaaaaccacaaccatagcgtgttgtttaaccgccgttcgtgatctaactgcgtaaatttggcttggtcgccggcttggtcaggatgctgcactggaaaaacttggggtggatcgcgccctgccatttgatgatctcagtaaacagctttacctgctactgaatgggttggacgtatattatcatgcccggggagagtttgaatacgctgacaatatcgtattcagcgccttggatacattgcggaaaaataaccgtcgtaacctcagcgcaccatcaatgatggtagattggcgatcgtggctgcatgaaatgcggctgttcaaatcggtagccgaactggacatcatgcgcgagggaggcgacatcagtgcgaatgctcatacgagagccatgcataattgtcgtccaggcatgtttgaatatcaccttgatgctgaaatccatcatgaatttactcgtcaggtagcacgatatcctgcttataacaccatcgttggtgcaggagcatacgcctgtattctgcatta

SEQ ID NO: 7884 - DNA, 673 bp, Zea mays
  Peptide Sequence Number=SeqID_13195
  Probeset Number=SeqID_22287
gggccgggatcccaaatagcacgcaacgcagcactgaagcagcacttcctgcactcactgtgctagctgctcaaaccgtagtagtaacagtccatcaccaccaatgagtcccaaggttgcgctcttccttgccctgagcctcctgtttgctgccaccgcgcatgactgcgaacccgactgttctggcccagtcgtcccaacgccgccagtcgtgacgactccgtccacgcactatcacgcgagctgaccgatcgacgcgctcaagctcaaggtgtgcgccgacgagctaggcctcgacaagggcggactaccccaaaactagcaatgaatgcccgttgatggagggactggaggacctcgacggcgaattgtgcctctgcaccgtcatctaggtcaacgacctcgacatccacctcaacgtgccccttagactcaacttgcatcctcaacaactgcggcaggatttgcccagaggacttcacttgacccaattaggcttgggatcccttgtgtgatccatatcgcgattctatttacgagcatgtcaccctcttgccatattaccgaataaatttgtcgtttcaaattctttcgctgtaccatcgacgattgtatttgcgcggagatatatttgaaattttaaggatcaataagagatattcctggtttttat

SEQ ID NO: 7885 - DNA, 974 bp, Zea mays
  Peptide Sequence Number=SeqID_13196
  Probeset Number=SeqID_22288
ctgcagccgccgcctgatttccgccttcgccgtcgaccagccaatccgctgccacccgccgactgacagtgccgtcccatggaacaagctcctccgcgaccacatcgccggctcccggccgggcctcgcgctagcgctctaccgcctcatgcgcgcgctctcccccgcgctgcccaactcctacacgctgccgctcgccctccgcgccgcgccttcctggcgcctcgccgccgccgtacacggccacgcgctccacctcggcctccacacccacccggacgtcgccggccaggtcctcgccgcctacgccaggctcggccgcgcggctgaggcgcgctgcgtgttcgacgcattgccgttgaggaggagcaccctctcctggaacacgctcatctccgcctactccgctgggtgtgaccccgacgcggcgtgggtcgcgttcgcgcgcatggtggcggccggggcgcggccggacgccgtgacgtggaccgcgctgctgtcggcgcacgcgaggtgcgggaggcacccggaggctcttcggctgttcggggccatgcaccgcagcgggtgcgagggcaatgcagaggccgtcgctgtggcgctctcggcgtgcccgtacgccggcggccctgcactggggagagggaggtcgatacatgcctacggctttgtgaagggcgtcgtccatggctacctgttcgtcaccaactcactggtgtgcatgtacggcaagcttggagagatggaggaagctgagaaggttttctgggatgccggggcgaagaagaacgccgtgacatggaatgcgctcatcactagctacgccgccgccggtttgtgcggcaaggctctcggtgtgcttgtccagatggaacagtgtggcggcatgatcgcgcccaatgtcgtgagctggagcgctgtcattggcgggttcgcgtcatcaggggacatggagcaagcactgcaggcatgca

SEQ ID NO: 7886 - DNA, 530 bp, Zea mays
  Peptide Sequence Number=SeqID_13197
  Probeset Number=SeqID_22289
atgccttggagaggcgtcgtcggcggcaggagagggacgggctcccgagggagccatcgccggagacgtcctgacgatgacgacgacgacgatgatgacgatgatgaagacgatgacatggctgcccgccttggcctcagcccggatctgaggctgggccaggggttgtcgagccagcccccgagtgggctggcgccgccggtatccggggccgggacatcagggtcccggtctgaagaacagtggcaggctgagggggtacttgaccccttggccgaggtagttgaggtgacctcggggagtcaggccgacccgcctgttccccaagagccgttgcccgtgccgactgcacaggaggctgatcctcgggtcgtcgtggctgcgcctgggcagttcatccctctggtacctcgggcgcccgaggcaaggatggtgccgaagccggcagcggggctaacctcggtggtacccgcagggacagaggctcgaggggcctccccgcaggcacgattggtcgtggcccggagtgg

SEQ ID NO: 7887 - DNA, 811 bp, Zea mays
  misc_feature (635)..(635): n is a, c, g, or t
  Peptide Sequence Number=SeqID_13198
  Probeset Number=SeqID_22290
cattgggacctcgagccggccgggaacagttcttgagacgattgatttttgcggaacgcgtggtacgtaacagattctcggtacatctggggaggatcaggaaaatggctgaatgctcaactatcgaggttggcgccgatggaatcttttaggcatttggatacgagatattccaacaaaaacaagaaggtggaatttaatagcgcctgcgattcccctgagttcaatgtgagttcacatggtagcggactaatcattgcgagaactttctctcctgcattaggatcttccaagaatgtgttctcaaaatcaggtcctggattgagaattgtttctaggaagatgttttctattttgatacgagcaagccctccacgagctacgactccgaacctactgtgtgtgacctaatgtctcacagagttcccactgactgccagacaactaatgatgcattaagccaagaggctctgaatttgacatctcacgtgaagagtcttacgacgaagtctccactcctgagaatggagctggtgacaactaccaaacagttgaaggtagttatttccattgccggcgaggaaactgcaaagtcgcgggcggcaaaggaagtaatcaagtcactcactgcacanctgaacgagatagcagagagattacctgtacgagaaggcacaaacactaagctgccagctctgtctggaatttccattccaagtgacatttcgtctttggctatggagagtgtgggcagcccaagcagctccggagaacaaatcatgaatggtcataatggattgcttgcgtctaa

SEQ ID NO: 7888 - DNA, 613 bp, Zea mays
  Peptide Sequence Number=SeqID_13199
  Probeset Number=SeqID_22291
aaaaaaaaaaactacgctttataaaaaattaaaggggagacaaggggaatacaggcgaaaaaaaagaagaacgacaaaaaaaaaaaaacaagatgagaaaaaaaaagagagaaaaaaacagaaaaaaaagaggagaaaaaaaaaaaaaaaaaaccaaaaaaaaagagggggaaaaaaagggaaaaataaaggggaaaaaagggcgaaaaagaaagagagaagaaagctttaaaaagggccccaaaaagtaagcccaaaagaaaaaaaagaaagaaaaaaaccggaaaaaaagagtgttcacagaatattttaaagaacaaaaggtggaaaaacggaagagagttaaaatggaaaaaaacaagagagaggcaaaatgtgccccataaaaaaagtggaaaaaggccggccaattaaaaaaaaaaaaaaggaaatataaggccacagaggcccgcccgaaaaaaggaaaaagtgcccccaagggaaggaaaaataaaaaaaaaaaaaaaaaaaaaaaaaaaaaaaaaaaaaaaaaaaaaaaaaaaaaaaaaaaaaaaaaaaaaaaaaaaaaaaaaaaaaaaaaaaaaaaaaagcttgtacctgcccgggcgtccgt

SEQ ID NO: 7889 - DNA, 1570 bp, Zea mays
  misc_feature (4)..(4): n is a, c, g, or t
  misc_feature (92)..(92): n is a, c, g, or t
  misc_feature (97)..(97): n is a, c, g, or t
  misc_feature (99)..(99): n is a, c, g, or t
  misc_feature (101)..(102): n is a, c, g, or t
  misc_feature (104)..(104): n is a, c, g, or t
  misc_feature (108)..(109): n is a, c, g, or t
  misc_feature (126)..(126): n is a, c, g, or t
  misc_feature (130)..(131): n is a, c, g, or t
  misc_feature (134)..(136): n is a, c, g, or t
  misc_feature (138)..(139): n is a, c, g, or t
  misc_feature (141)..(141): n is a, c, g, or t
  misc_feature (144)..(144): n is a, c, g, or t
  misc_feature (316)..(316): n is a, c, g, or t
  misc_feature (518)..(518): n is a, c, g, or t
  misc_feature (671)..(671): n is a, c, g, or t
  misc_feature (870)..(870): n is a, c, g, or t
  misc_feature (888)..(888): n is a, c, g, or t
  misc_feature (980)..(980): n is a, c, g, or t
  misc_feature (1186)..(1186): n is a, c, g, or t
  misc_feature (1253)..(1253): n is a, c, g, or t
  misc_feature (1281)..(1281): n is a, c, g, or t
  misc_feature (1368)..(1368): n is a, c, g, or t
  misc_feature (1377)..(1377): n is a, c, g, or t
  misc_feature (1441)..(1441): n is a, c, g, or t
  misc_feature (1484)..(1484): n is a, c, g, or t
  misc_feature (1504)..(1504): n is a, c, g, or t
  Probeset Number=SeqID_22292
agtnaaccaaacccgagaaagccggcgaataaaatataatttgcagacggaccccccgccgccccccaccattcaggacgaggaataagacncaaancngnnanaagnngtcccaaaagaaagcangggnnagnnnannanaanaaatgtatcccagaaagaggagggggggcggggcgggcaaggaagcaccacgaggacgaagagccgagggaagcagagaagcgaggagagccgcaaggaacgaaagagagaagacgcaggcgcggagcagcagagagaaggagaaggcaacgaaacaacggcgaaggggggngacgacacacaagcacaccgaaaccaagccgcaacgcacaacagagaaggagaaaaaaggacgcacaaagaggcaaaccacaacgaggaccgcggagggccgccacacgcacagaggacacaccgcgcccagaagacaaccaagcgacggagggagagacagagaggaacgcgcagcacaaaacgaacaaagagacagagancccgaacaaaagacgccagaaggaacgcgcaggatcagcacaggagatagaagaacgaaagaccggcgcgaagagagaagaggaagagacgagggaggaagaaagaagagaaacacgacgcacgagaacgagagggcgaagcgcggcggacgntcgcgagcggagcgaacagggcaaagcgagccagtgcagaacaacagaacagagacgcagacagacacgagcagcagaagaggacagggaagagagcgcgacggaagggagaacaggggagagacggacgaacaaagagaccgcgagagagagagcagaagagacatacagacgacagcagagagggacagagagagcnacaaaccagagaagaagngaggcaagaacgagaggcggcaacgataggaacacgcgacaacagctcgacagagaaagcacacaaaggatacaacaacaccgagaagacgnacggagatgaggacgcggagagaacatgaagagacgagggacgccgaccgcgaacaggaaaagaagatacacgagaagaagcaaagacgacacggcgacgcgggcgcaggcgagcgaagagacgcgcgagcaggaaatgacgccggcgccgagacgggaagcagcgaccgaagaagcgagtgagaggggaagaggcgaggcacaangaagagagagcaatcgacacacgcagagagctggtgcgacgaggaggaacacaggagaacgagagancacgcgaagaacgagaacaagaacgaangacacgaacgcagagcagagaacagacgcacaagggacagaagagacgagagagcgagaagagcaggaggaacgaacgctacagganaataatgancgcgcgacacggcagacatagagaagaggacagcgactacaagagacacacagactgcagacgncaggacacgcgcgcgatgagcagtcagacgcgagatgcgcagntagcgcgcgagcccgcacgngaagaaagagagcgatggcgaggagagtggagcaacggcgaacgagaagtgatcgaacgacgagat

SEQ ID NO: 7890 - DNA, 1002 bp, Zea mays
  misc_feature (364)..(364): n is a, c, g, or t
  misc_feature (748)..(748): n is a, c, g, or t
  Peptide Sequence Number=SeqID_13200
  Probeset Number=SeqID_22293
acctatacaccctacaaatactttcytataaccttatwttcctattctatacctaycatccccctatyttcmccaaawaataccatccahacawacmaamccctcccaccamcaaaamccaacaacawaatcayatctaaacctcccaaaccacttaccatactcaaaaacttcaaaaccctacctcccaaaytaccatccatactcctcatatctaccttctcctaactctcataattcccattcttcctctmcacccccacctaattaaaccaaamattctcccmcaacaccccccaaaaaamaccccacccaattctcaacattchmcaaaaatatccacatcaacacattcaaactactnctcaactcaatttttctaaaattcaactcattcctattcamacccttataccaaaaaatcaaaccaaaaataatataaataccacaccccttcattaatctacatcaccttaacaacccccacactaytcaacttctaatcactcaaaatctcccacaaatccatacaaamcaccttcmccacaaacaccmacttcaaaaccatctacctcatcctcttcaccttcctaaacatccctctcaccttcctatacaacatcccattcacaataccaacacmactaacaacccccaaaaacaacaaacaaaaactataccccaacatcctcaacatctccwtcatcatccctcaaatawtcwtcacactaaacaccaacccataaancacactattcaaaaaaaacamcwtcccaacattcaacatcacatcaaccttcaccctcatcaacaacatcrtrrrcrtgttcctgctgcccaagatctccaagcgccagttccgggccgtcaghgcgggcggccactgatcgaaccccggggcgcgccggccgccggcacgcarcccrrcaagagctgtatrttragagtatacgttgaacagaaaccatrcatatatactaaacaataatatcacatcaatta

SEQ ID NO: 7891 - DNA, 520 bp, Zea mays
  Peptide Sequence Number=SeqID_13201
  Probeset Number=SeqID_22294
tgcagctgtcgaaggccgagcgcgcgtacctgttcgagctggccgcgcaacgcgatccggccgagccggacgtcgcggccggcgacctgccgccgacgctcgcggccaccgtcgccgcgatcgccacgcccgcgtacgtgctggacaggcaatggaatgcgctcgcgtggaacgcgccggccgccgcgctgtttaccggctggctcgacggcgaccacgatcgcaacctgctgcgcttcacgttcatggcgccggccgcgcgcacgctgatcgtcgactgggaaacccgcgcgcggcggctcgcggccgaattccgcgcggactcgatccgccatctcgccgacgcgccgacgcgcgcgctgatcgacgcgctgatggccggcagcgacgcattcgcgcagtactgggcgtcgcaagacgtgttcgagcgcgaaggcgggatgcgcgagttcgaccatccggccgacggccgcgtcgtgtatcagcagatcacgctgaagcccgcgcatcgcgaggacct

SEQ ID NO: 7892 - DNA, 471 bp, Zea mays
  Peptide Sequence Number=SeqID_13202
  Probeset Number=SeqID_22295
tccaccatgggcaagaaacgcaagcgcgagccaactcctccgtctgaggactttggtgactcggaatattcagaggaggagttctcctctaaatccgaagggtctccggctcccatccctctgcgtgagtcgtctgatgattcagacgactcccaggggcttgcggcggaggtctggacttacatccgggtcgtcgagcgtttcgggctcgcgggctcggatgagtcggaggactcctcggatgaggaggactcgtccgaggaggacggcggcgacggtggtgagggcggcgacgacgacgacgacgacgacgatggaggcggcggcggcaggggcggcaacggcagcagcaggggcagcaacagcggcaggggcggcagcggcggcagcaggggcggcaaggccagtggctaaatgtcacgtagtagtagtagtggcagtagtagtagcaatagggaagttatcaactca

SEQ ID NO: 7893 - DNA, 812 bp, Zea mays
  misc_feature (20)..(20): n is a, c, g, or t
  misc_feature (26)..(26): n is a, c, g, or t
  misc_feature (40)..(40): n is a, c, g, or t
  misc_feature (57)..(57): n is a, c, g, or t
  misc_feature (87)..(87): n is a, c, g, or t
  misc_feature (184)..(184): n is a, c, g, or t
  misc_feature (308)..(308): n is a, c, g, or t
  misc_feature (317)..(317): n is a, c, g, or t
  misc_feature (319)..(319): n is a, c, g, or t
  misc_feature (323)..(323): n is a, c, g, or t
  misc_feature (335)..(335): n is a, c, g, or t
  misc_feature (340)..(340): n is a, c, g, or t
  misc_feature (345)..(345): n is a, c, g, or t
  misc_feature (348)..(349): n is a, c, g, or t
  misc_feature (363)..(363): n is a, c, g, or t
  misc_feature (371)..(372): n is a, c, g, or t
  misc_feature (378)..(378): n is a, c, g, or t
  misc_feature (384)..(385): n is a, c, g, or t
  misc_feature (388)..(389): n is a, c, g, or t
  misc_feature (402)..(402): n is a, c, g, or t
  misc_feature (409)..(409): n is a, c, g, or t
  misc_feature (419)..(419): n is a, c, g, or t
  misc_feature (431)..(431): n is a, c, g, or t
  misc_feature (435)..(435): n is a, c, g, or t
  misc_feature (444)..(444): n is a, c, g, or t
  misc_feature (483)..(484): n is a, c, g, or t
  misc_feature (501)..(501): n is a, c, g, or t
  misc_feature (514)..(514): n is a, c, g, or t
  misc_feature (524)..(524): n is a, c, g, or t
  misc_feature (527)..(527): n is a, c, g, or t
  misc_feature (537)..(537): n is a, c, g, or t
  misc_feature (547)..(547): n is a, c, g, or t
  misc_feature (554)..(554): n is a, c, g, or t
  misc_feature (585)..(585): n is a, c, g, or t
  misc_feature (591)..(591): n is a, c, g, or t
  misc_feature (593)..(593): n is a, c, g, or t
  misc_feature (621)..(621): n is a, c, g, or t
  misc_feature (632)..(632): n is a, c, g, or t
  misc_feature (636)..(636): n is a, c, g, or t
  misc_feature (643)..(643): n is a, c, g, or t
  misc_feature (658)..(658): n is a, c, g, or t
  misc_feature (661)..(662): n is a, c, g, or t
  misc_feature (670)..(670): n is a, c, g, or t
  misc_feature (692)..(692): n is a, c, g, or t
  misc_feature (717)..(717): n is a, c, g, or t
  misc_feature (728)..(728): n is a, c, g, or t
  misc_feature (735)..(735): n is a, c, g, or t
  misc_feature (747)..(747): n is a, c, g, or t
  misc_feature (769)..(769): n is a, c, g, or t
  misc_feature (772)..(772): n is a, c, g, or t
  misc_feature (789)..(789): n is a, c, g, or t
  misc_feature (794)..(794): n is a, c, g, or t
  misc_feature (799)..(800): n is a, c, g, or t
  misc_feature (811)..(811): n is a, c, g, or t
  Peptide Sequence Number=SeqID_13203
  Probeset Number=SeqID_22296
aggttcacgcctgaggaganagacanagctcctagtcccnccccgccccccccgaanagatggggctctcctttggtaagctgttcntccgcctcttggccaataaggagactaggattctcatgggcgggctcgatgccgccggtaagaccaccatcctctacaagctcaagctcggcgaaancgtcaccaccatccccactatcagatacaatgctgaaactgttgagtataaaagcattagcttaactgcttgggatcttggcggccatgacaagaccaggcccctgtggaggcactactttcanaacacacangnactnatttttgttgtngacgnccacnacnnggaacatgttgttnaggctacnnatgatntccacnngannctaaatgatgatnaccctgngtcacgctgngctgcttgtttngcanacaaacaanatcttcccaatgctatgaatgctgctgaaattactgacnngcttggactgctttccntgcgacaacgganctggtacatncangagcacttgngctacatctnggaaaanggctgtatgaggggcttgactggcttaccancacatntncagcaagtcttgaatcttttacggacanggctcctaacnagangatgtcntgaacaacttatggntgnntttttttnacattattattactaagacacnatctacaagcagatttagtgcttgngaaaaaaaaanaacttcngagctcttgganggattgacacatagattggatnggngtctttggttttgggancaaantcatnncctatagggtnt

SEQ ID NO: 7894 - DNA, 662 bp, Zea mays
  Peptide Sequence Number=SeqID_13204
  Probeset Number=SeqID_22297
tcactgtattccaccttgcccgccgagttacaagcattggttaccaagttccaatctgtgtttgcacttcctgttggcttgccccctgtccgagattgtgatcatcatatctctcttgtacccggtgctcaaccatttaatgtgcgaccatacagatatgcaccagcattgaagactgaaatcgagcgccaagtccaagagatgttgtcttcaggcattattcaacacagcaacagtgagttctcctcttcagtcatcttggttaagaagaaagacgactcctaccgcttttgtgttgactatcgacatctgaatgctcttactgtgaaaactcgatttcctgttcctattatggatgaattgctcgacgagttatatggtgctgcctggttttccacgttggacctccgtgctggtttccaccaaattcgcatggcgcccgaggatcaacacaagacggcatttcagacccaccacggccattttgagttccgagtcatggcatttggccttaccggtgcacctgctacatttcaaggagctatgaataagacactggcgccacttcttcgcaaatgtgtcttggtctttttcgacgacatcttggtttatagtccgacatgggaaactcacctgcaacacaatgagcttgtcttgcaagg

SEQ ID NO: 7895 - DNA, 1449 bp, Zea mays
  misc_feature (45)..(45): n is a, c, g, or t
  misc_feature (751)..(751): n is a, c, g, or t
  misc_feature (942)..(942): n is a, c, g, or t
  misc_feature (1230)..(1230): n is a, c, g, or t
  misc_feature (1395)..(1395): n is a, c, g, or t
  misc_feature (1444)..(1444): n is a, c, g, or t
  Peptide Sequence Number=SeqID_13205
  Probeset Number=SeqID_22298
ggcggagcagcagcgcgcgggaggaaaccaacgaacagggcgaangaaaggaagaacgagcgagaaagagggcatagaaaaaagagggggaaggaccacgcggagaggagaggggagaaaggaggttgtcccccaaaagagggggagggggagggggaaacagaaaagagattttccccccgagaggagggcgaaagaaagaacgggaagaaaggaaaaaatacacaaaaaagcgacgaagggcggcaccgaaaagtgtatataccccaccacacagaagaaccgcacgaaggagaaaataaggaagacacgaaaagagagagggggagagaagagaaaagagaagagaagagacagcggcggaggcagagcgagacgagcggaaaaggaaccggggagcaaagagagcggaggacaggggcagaagacgaaaacaccacggcgagaaggagaaaaaggagaacaagcgaagagaggagacagacgagaaagagaaggggcgggaggaaaagagcatatcactagcgccaagcaaacgagcgagagcgcaaaaagagcgaaaggaggagggcaacaaaaccagaccgagcaaaaccggcgccacccaaacagagccgacgagaaccgcggccggacgcgcaggcggccgcggcgacaaccacgagagaccagcgcagcagagcgcgcgacgaagaccgagaagaagaggcacgacgagaaacaaagaacaaagaaacggcagaaggagagnacaaaaaaaaggcggacataggcaccgcgcggggcagcgagaatagagagagcgagcggtacggacgaacagaccacaacagcacgcgggagggaggaggaagaggcggagagacgggagaggagaaaagcgcagaaggacagtagaaggcacacacgaagaacacaggaagagaggaggaacaacgacgnaatagaggcaacgagtaacggggagaggacacaatgccgaccgacgacgagaaagaaaaccagcataagaagacggccggccgcgtcaacgagagacagcagcagcacgcagcaaggacgatgcgagcagacacgacgcggagcagaacaggaacaacccagatggtagaagagaggagaggcacggaacgaagaggataggacagacgggcggggagacacgccgcaagaggagaggcggacagaaaggagagactcagaaggggcaagagccagagaagagaggangaagagaaagatgagcgccagaggcaagaaagagaggagacagaacgccagagagacgaacgacagcagacagcgagacaagagcaagatggaagaggcagcaacagaagtatagagacgaagggagagaacggagggcgagagacgagggagagcgaagaagtntataagaacggaagcgatgaagcaaagatagcgacaagccggacacgcngcgcg

SEQ ID NO: 7896 - DNA, 517 bp, Zea mays
  Probeset Number=SeqID_22299
gctgaaaagccatgatggctacgaagcccaagctccactatcccaatggacgaggccggatggaatccgtgagatgggttttagctgccgcaggagtcgagtttgatgaagaatttttagaaacaaaagaacagttgcagaagttgcaggatgggaaccacctgctgttccagcaagtgcccatggttgagattgacgggatgaagttggtgcagacccgaagcatcctccactatatagcagacaagcaccatctcttcggcaaagacctcaaggagagaaccctgattgacatgtatgtggaggggacactggaccttctggaactgattatcatgcatcctttcctcaaaccagacgatcagcaaaaggaagtggttaacatggcccagaaggctatcattagatactttcctgtgttcgaaaaggtgttacggggtcatggacaaagatttcttgtcggtaatcagctgagccttgcagacataattctgctccagaccattttggctcttga

SEQ ID NO: 7897 - DNA, 677 bp, Zea mays
  Peptide Sequence Number=SeqID_13206
  Probeset Number=SeqID_22300
tgcaaaaaattgcccctaaagccacggtggagcagggcatggttcacgccatgagcgcggcgctcggccactggcagtaccatgaagaagtctggctgcgcggtaacgaagacgcccgggcacgggtaattgaagcgctggaaacgctgcgtcaggcgttttccctgtttggcacgctggtgccgcgcaaggccaatagcgaactgcgtcagaagctgacccggctggaagagctgctggcggatagcgaggccagcgcagaaaccgtctgcttctcaccgacctcggtcgaagctcagttagcacttactcactggctggtggagtcgcagtggcagccgtggctggacgagaagaacaaaagcaagctacagggctcgtttaaacgcttcagcgacatcatgctggggcgcatcggcgcggatctgcgtgaaaccttcgtcgacgtgcagctgtttaatgaatttcaggacaaagccacgcgcctgaaccgccagttgctggcggtgcacctgctggcgggtgcgtatccggctgaagaagtcagccagtggctggcgggctggcaggagttgcagcacgccattcgtgaaaaacaggagcgcggtctgattcagctggtcaatctggcgatccgtcaaccgccgttctggctgaataacggtgcgaaacgctaa

SEQ ID NO: 7898 - DNA, 610 bp, Zea mays
  Peptide Sequence Number=SeqID_13218
  Probeset Number=SeqID_22301
tgcagcagtttgcgcagccggtcatccgccagctggcgcagcagatggcggagacgcagtcggtggtgatcctgtccgatgccagcgggctggtgctgaacacctttggcgatatgcaggcgctggagaaagcccagcgctttgccctggcacccggtaatttgtggagtgaatgcggacgcggcaccaatgcaattggcaccgcgctggcgattgatgacggctgtgaaattgatggccagcagcatttcctgacgcgcaaccagggtctgtactgcgccgcaatgccgttgcagatgcccaacggccagatagccggcgtgctggatatctcgggtccggcacactttccgcatccgcataccctgaaccgggtgaaagcagcggcaaagcagatcgagtacctgtgggtgaagcagagcctgcatccgcagcagtggctgcttagtctgcatccgcagccgcagggcatcgacaccagtgatgaactgctgctggtgttttctgacaatgtgctgaccgcagctaaccggctggcgatgcgcgaactggctctcagcgccgatcgctttgccagcctgacgtttcagcagctgtttccgcagctgca

SEQ ID NO: 7899 - DNA, 882 bp, Zea mays
  Peptide Sequence Number=SeqID_13219
  Probeset Number=SeqID_22302
atgggtctcaccggcgtgcacgacgacatagagaaactgcgtcgcgaggagaggctcactgagctggaggccagcggtagtcgggccagcgagcctagagctgcggacgagcacggcccggaccacgacgtaggcaagacggtggcgggcacgggctggggcagagccaccggagacgacgacaccgggcacgacaaagggagcagaggggtcctgggcgagcaccagcgacggcccgacgaggaggctgggagggcgcgcggcatgcagaggaggcaaggccgacaaccggtggaagcaaggagagaggagctcggcctagggctaccgagcagggtgggcgagcttgaggatgaggacggcgttgtccagggctgctgtagtacgctcgactgcgagggtgaccgtgaaggagaagagactgaagccaccgaggcagcctcgatctccgaagtcatgaggcaatccaaattagttgtgacggagggagccattgacgaaggtacttttggtgccgaagctgagcaagctgatattaaagaagaagaaaatgctgatgaggaagaagaagattatagcaccttgatcccatcaaaacccagccacctagattttgagaaatctattgtatctgaagctgatgtgtccatgatgatgaagttgggctacttcagagaagctgaaagaaaactaattcgttttgccggagaggaaaccactccgatgtcgaaggatgatgaagtggtagttttcaaaagctttttcagagcaggattacattttcctttgaacgagatgattggagaagttttggataattctgagatttttcttcatcagctgacccctaacgccattgttaggctcaacattttcatctag

SEQ ID NO: 7900 - DNA, 761 bp, Zea mays
  Peptide Sequence Number=SeqID_13220
  Probeset Number=SeqID_22303
agatcttccacccttgctaaccctagccgcctcccgcacgcttctcctccgctccccgccccgcctcgagcagctcagggacgcgcacagccatggtcgacggagaccgagaccttcgccttccagggcgagatcaaccagctcctctcgctcatcatcaacaccttctactccaacaaggagagcttcctccgcgagctcatgtccaactcctccgatggcttggacaagatcagggtcgagagcctcacggacaagagcaagatagacgcgcagcccgagatcgtcatccacatcatccccgacaaggcgaccaacacgctcacgatcgctgacagcggcattgggatgaccaagtccgacctcgtcaacaagctcggcgaccatcgccaggtcggggaccaaggagatcgtggaggacctcgtcgacggcggcgacgtgtccatgagtgggcagatcggcgtcggatgctactccggctacctcgtggccgagaggggtgtcggcaccaccaagcacaacgacgacgagcaggacgtgtgggagtcccagggcggaggctgcttcaccgtcactcgtgatacgtgtggggagcagctcggcaggggtaccaagatggtcctctacctcaaggacgaccagatggaataccttgaggagcgccgcatcaaggatctagttaagaagcactctgagtatatcagctactccatgctccggatggactgagaagaccaccgagtacgcagtttctgatgat

SEQ ID NO: 7901 - DNA, 634 bp, Zea mays
  Peptide Sequence Number=SeqID_13221
  Probeset Number=SeqID_22304
caagcttaaaaccctgccccggcacctgttcatgaactttcgtgtcgtggacgagcatgaacgcatgctggccgcgggccgcaacctggcccaattgaaggccgagttcggccgccaggcgcaggccgatttccagcaactggccgcgcgggatgcgcaggtcgcgcaagctttggcgcaggacggcctgacgtcctggtcattcggcgaattgccggaaatcatggaaatcaagcgcaaggggcaatcggtcatcggctatcccgcgctggtcgatcgcggcgcgcattgcgatctcgatgtgttcgacgaccccgaagaggcccgcaagcatcatcgagccggcctgctgcgcctgttccggctgggcttgcgcgagcagatcaagttcctggaaaaaaacctgcccgacctgacccgcataagcatgttgttcatgccgctgggtacgcaggaagccttgcgcgaccagatcatcgattgcgccctggaacgcgcctgcctggccgaaccctggcccgtcaaccaggaagaattcgaatcgcgccgcctggaaggaaaagggcggctgggcctgctggcgcaggaagtcgcgcggctggccggggccgtgctggcggaatggccgccctgc

SEQ ID NO: 7902 - DNA, 589 bp, Zea mays
  Peptide Sequence Number=SeqID_13222
  Probeset Number=SeqID_22305
ttccaagacggacgattgcacagctcctacgcgtattagcaacaaggcagtcatgtgagctccccactcccagaccagtccagcggctcagcaggagcatgtcagggagctcgctctcgccatgagcaaggagaatgaccaccgcgactggatactccgccgctgctgcggatccggcgccgactgcatcctcacgttcgacgacgtgggcggcttcatcgaagctggtcatctacctcgcgctgcgaccctccaagccgaccttctacctccaggaggtgcagctccgctccatcgacctcagagacccggagctctccctcgacctccaggtgaccatcgcttcacggaacccgaacgaacgtaggtacgagtactacaagaccctggactcgttcaccacgtaccgcgactacgaggcgacggtgccggtgtctatgccgcaggtgtaccatggtcacaggcacacatcatgtgtgatgcccgatgatgtcggcgcgacgctgtgcccctgccgtagcacctcgcgcgatgtcatgaggcaagacatctcctcggtctacgtgctgctccacatcacggtggacgg

SEQ ID NO: 7903 - DNA, 355 bp, Zea mays
  Peptide Sequence Number=SeqID_13223
  Probeset Number=SeqID_22306
atgggacattttgaattccgtgtcatggccttcggactcactggagcacctaacacatttttggatgctatgaacaccaccttagctccggttttgagaaaatgcgccctggttttcttcgacgacatacttatttacagcccaacttttgactcccatattgctcatttgaactccgtgctgcagttgcttcagcaagatcaatggaaagtgaaactttcaaaatgtgcatttgctcagacttctatttcttacctgggacacattattagcgaccatggtatagcaactgacccagcaaaaattctggtcgtcaaagaatggccaattccgacgtccaccaaagaacttcgcg

SEQ ID NO: 7904 - DNA, 1002 bp, Zea mays
  Peptide Sequence Number=SeqID_13224
  Probeset Number=SeqID_22307
tgcatgcctgcaggtgagtgagaatctgattgagctgtacagtaatcaacaaaccctgtttggccgtggcagcatcgaacgcctggtcccgctgctggcggcgaatccgcagcccacgctgctgttctgcggccgctcatttctcaacagtgcggcgtgggcgcgtctgggcgcgacgctgaacgatcacattctgggctatgaaattgtcagccatgaagcctcgccagacgagatcgatggctgggtgacgcgctggcgtggccacgtcgatcgcgttgtcgccatcggcggcggcagcgtgctggatgcggccaaagcctttggcgccatgatgcagcatccgctgaatatcgcgcgctacctcgagaaagtgggcgatacgccggtacaggcggtcacgctgccgctgatcgccattcctaccaccgccggcaccggcagcgaggtcacgcagaatgcggtggtgaccgatcagcagcacattaaggtgaaggcctcgctgcgccatccggtgtttgtgccgcaggtggcgattctcgatcccgatctgctcaaaggggcgccggatcgcgtgctggccacctgcgccatcgatgcctttacccacctgttcgaggcttatctgtcacgcaagggcaacctgttcagtcagcaaaacgcgctcaacgggctgcaactgttcatgcaggcgtggccgtacctcaatctggacgacagccgcggcgatgcggcacgtgaagccatgatgatggcatcatggctcggcggcgtcagcctgagcagcgccggtttgggggtgatccacggtattgccggcgagctgggggcgattaaaccgttccatcacggcgaagtctgcggtcgtctgctgttcccgttccttgatgtactggcggagagcgcgcaccccgaacagcagcggctgatggcggcgctggctgaacgcctgctgcccgatgaaacggcaccgccggcgctggcgctgaaagcctggctgca

SEQ ID NO: 7905 - DNA, 1677 bp, Zea mays
  misc_feature (36)..(36): n is a, c, g, or t
  misc_feature (38)..(39): n is a, c, g, or t
  misc_feature (42)..(42): n is a, c, g, or t
  misc_feature (49)..(50): n is a, c, g, or t
  misc_feature (58)..(58): n is a, c, g, or t
  misc_feature (60)..(60): n is a, c, g, or t
  misc_feature (62)..(63): n is a, c, g, or t
  misc_feature (94)..(97): n is a, c, g, or t
  misc_feature (99)..(99): n is a, c, g, or t
  misc_feature (101)..(101): n is a, c, g, or t
  misc_feature (106)..(106): n is a, c, g, or t
  misc_feature (112)..(112): n is a, c, g, or t
  misc_feature (120)..(133): n is a, c, g, or t
  misc_feature (136)..(139): n is a, c, g, or t
  misc_feature (141)..(144): n is a, c, g, or t
  misc_feature (171)..(172): n is a, c, g, or t
  misc_feature (176)..(176): n is a, c, g, or t
  misc_feature (180)..(180): n is a, c, g, or t
  misc_feature (184)..(185): n is a, c, g, or t
  misc_feature (187)..(187): n is a, c, g, or t
  misc_feature (219)..(220): n is a, c, g, or t
  misc_feature (225)..(228): n is a, c, g, or t
  misc_feature (230)..(230): n is a, c, g, or t
  misc_feature (239)..(239): n is a, c, g, or t
  misc_feature (254)..(254): n is a, c, g, or t
  misc_feature (261)..(261): n is a, c, g, or t
  misc_feature (331)..(332): n is a, c, g, or t
  misc_feature (504)..(504): n is a, c, g, or t
  misc_feature (1261)..(1261): n is a, c, g, or t
  misc_feature (1324)..(1324): n is a, c, g, or t
  misc_feature (1348)..(1348): n is a, c, g, or t
  misc_feature (1677)..(1677): n is a, c, g, or t
  Peptide Sequence Number=SeqID_13225
  Probeset Number=SeqID_22308
atgaagggagccaggccggagaggaggaaatacacncnnttntaacacnnctccaacncncnnggggggagaaggagaggggggatcaatacannnntntnttttnttttcnccctcctnnnnnnnnnnnnnnttnnnntnnnnggtggcccccgaggggggggggaaaannaaanaaanacannanaaaatttttccacaacaaacaaaaaacaaaannaaaannnnanacaacacanaacccaacacacaancaacaanacacccaacacaacaacaacaacaaaaacaaaacaccacacaaacaaataaacaaaacaaaaaaaaaaannaataaaaacaaacaacaaacaaaaaacaaacaacacaaaaaaacaacaaaacacaaaacaaaaacacccacacttccacctcttttcccctcaaacaaaaaccaacaaccacaaaacaacaaacaaaaaacaaccaacaaacaaaacaaaaacaaaaaaaaacaacaaaacnatataaacacacaaaacaaaaaaaaaaaacaataccccagcacacaacaccaccaatacgcacgaaacaaaaaaaaaaacacaaaacaacaacaaaggaacacacacgaggaaagggggggggaacgacacggagaggaagaagaggggaaggagggagtaggacgaaaccgcggggcgaagaggaggagacggagggggcggagagaggcgaagggaggagggagaggggagagaggggagacggagagaagagagagggcgagggaggaaggaggcggcgcagagaggggaggagaggagaaagaagagaaagaagaagggagcgagagtgggggagaaaagaagcagagagggaaggggaagaggagaagggggggaggacaggagtattcacagaaggagcgagacgggagacagaggaggagaggaggacgcggagaaggggaagaagaggtagagaaggaggagagggggacgagagacgagaggagagaacgggcgagcgaggagggaggaggagagaaatgagagagaggggggaggaggagggtgaggagagagggaggaggaggcgagaagaggaggggcgaggaaaagaaggcacgagcgggagaagggcgcgcgacgagaggggaccggaacgttccacggagagagggacaagaagagaggagaaaggacgacagcgaggcggagggacgagggagaatgagaagacgggaggaagagagagaagcgcgagaggcggccgaggnacggaagaaagagaggagggggaagagggagaagaggaaagcggcaatagagaagaaaaatangcgaagaacaaccgacagaggtgngagggagggcagaggagaagacggcacggagcagagcgaggagaggacggggaaggagtgatgaagggggagagattagaaggggagaggtagggggagatgaaggaggagggcgagagagaagaaggagcacgagggagcgtgagagagaatatcagagccggagacgaagagagagaggagacacgagacgcgacggcaacagagagagagaggagtgacaaacatcacgagaggacgtggggggaggagaggaaggaccgagacggagaggaaagagagcgtcgaagcggggggaggaagagacaaaggagacagagacacacgcn

SEQ ID NO: 7906 - DNA, 771 bp, Zea mays
  Probeset Number=SeqID_22309
aaaaccaatgccgtttcccgccaggattttgataccgccgccgaagcgtggcgcatcgcccaggcagagctgattgttcagcaggcgcgggtgattcaggcgcagatcgaagtggataaaaagcaactcgatctcggctacacgcgcatcatggcaccgattgacggcacggtggtggcgatcgtcacgaagcagggccagaccgtaaacgccgtgcagagcgccccgaccatcgccaaactggcgcagctcggcacaatgaccatcaaagtgcatatctccgagacggacattaccaatattcagcccggccagcaggcgtggtttaccaccttcgccaatccggataaacgttacaacgccacgctgcgcagcatcgaactggcccctgagtcggtgatgaaagatgatgcgctgatgggcaacagcgaaagcaataccgtgagcagcacgaacgcggcggtctattacaacgccctgctcgatgtgccgaacccggataatgcgctgcgcatctccatgacggcgcaggttaatctgctgcgtgaccaggcgaaaaacgcgctgctggtgccggtacaggccacgaaaaaggccagcgatggtcgtacttacgtcgaaatcgcggatcaaaataatcagcctgagaagcgctacatcaccaccggcatcagcgacagcgttgacatccaggtgctgagcgggctgcgcttaggggaaaaagtgatccttgccacgcagcagcctggcgcggacaaggtggtgatgtaa

SEQ ID NO: 7907 - DNA, 414 bp, Zea mays
  Peptide Sequence Number=SeqID_13226
  Probeset Number=SeqID_22310
atgggcaagaacaacaagcgcaagcgtgagccgactcctccatcggaggagtttggtgactcggaatactcggaggaggagttctcctccgagttcgaggggtctccggctcccgtctctcccccggcgtcgtccgatgactcggacgactcccaggggatagccacggaggtctggacgtacatccgggccgtcgagcgcgccgggctcgaaggctcggatgagtcggagtactcctcggatgaggaggactcggacggcggcgacgagggtgaagacgacgacgacgacggcgacggtgacggcagcggcagtggcaggggcggcggcgacggcagcagggacagcaccaagggcagcagcaggggcagcaccgagggcggcggcggcggcaggggcagggccagtggctag

SEQ ID NO: 7908 - DNA, 1699 bp, Zea mays
  misc_feature (516)..(516): n is a, c, g, or t
  misc_feature (1032)..(1032): n is a, c, g, or t
  misc_feature (1038)..(1038): n is a, c, g, or t
  misc_feature (1092)..(1092): n is a, c, g, or t
  misc_feature (1122)..(1122): n is a, c, g, or t
  misc_feature (1190)..(1190): n is a, c, g, or t
  misc_feature (1291)..(1291): n is a, c, g, or t
  misc_feature (1495)..(1495): n is a, c, g, or t
  misc_feature (1512)..(1512): n is a, c, g, or t
  misc_feature (1568)..(1568): n is a, c, g, or t
  misc_feature (1615)..(1615): n is a, c, g, or t
  misc_feature (1647)..(1647): n is a, c, g, or t
  misc_feature (1653)..(1653): n is a, c, g, or t
  misc_feature (1685)..(1685): n is a, c, g, or t
  Peptide Sequence Number=SeqID_13227
  Probeset Number=SeqID_22311
agaagaaagagataggagggagggggggggggggggggagggggaggagagaaaataaagaagaagcagagagagaatataataaacatgaggggaggagggaggagaaggaggagggtttcacaaaaaaagaagagggcaggagaaggggagaagaggatttgtaaccaagaaaaaagagaggggaggagagagaggagagggaaaaggaagagaaagaggaggggagggggagaaggatgttttgtgtccgccacaaaaaaaaagagagggagagggggggggaggagaaggggagaagggggaggagggaggaggggagagggggagggggggggggagaggagggagggggggagagggaaaaaaagagagggggaaaaggagggagagagagaaagagaggagaggaaggggagaagaagggaagaagagaaaagggagggaagagaaaaaggaagagagagaagagagggaagggagggaggagagagagggtgggggaggagcagggangaggaggaggaagagggaggggaaggaggaaggaggaggtgggagggggggagcgggagagactggagaagagaggagggaagaaaaaagggaggggtggagaggagagagagaagggaggggggggaggggaaagcgagaggagagaggggaaaggggagtaagaaataagagagggagaagagataagagagggaaggaggagaagagaaagggaggagaggagagggagagtggaggaaaggaaggggggaggggtagaggagaaagagaggagagaggagaaagaaagaagagaagcgagaggggagagaagagagggaaggaggaaggggaggagagaggaagggagggaagaggtgaagggtaggagggaagaaggaagttgagggagatagagggagaagagtgagcgagcgagggggggacggggggtgaagaggagggagagagacgatagaggggagcgaaggagaagggggaggagcaaggaatagagaacggagatgtaggaangagagnatagatgagtgcaactagagaatgggaggagagaggagagagggagtaggtcanagagtgagagtgatgatgagagagagatgnagaagtggaggtgtggggagagaggagggagacgaggagagtgaagagtgtgagaggaagaaggaganagagcgagcatacgagagaggaagaggaatggaggaggaggaagatgagtaagacgaaggagggcagaggtagagatgagatgatgaggtgatagacgagnggagactgtaaaaggctagaagacaaagagagtagatgcgagaaggcgagagagaagtgtgcggagaagaagagatggaaggagaggggagagcagagaagggggtgatgtgagtagaataggagagagcgagaagaggcagaggagaaggtaagagagaggagagatggaagatgagagagttgagagatgagaaggtgcgcnagcgatgagagagaggntgggaaaatgagaagacggcaagggagagagggagcggagtgagaggattagacgnaggaggaggcggacaacgggaagagagagaggtgagaggagagtganaagagcgtagcgcacgatgggtggcgagcatngtacgnagaatgaatgacagggcgcaagaacagtgcgncagatggtgaggag

SEQ ID NO: 7909 - DNA, 676 bp, Zea mays
  misc_feature (615)..(617): n is a, c, g, or t
  misc_feature (632)..(636): n is a, c, g, or t
  misc_feature (639)..(639): n is a, c, g, or t
  Probeset Number=SeqID_22312
gatcatcctaggaactgaaaaataaaagcaaaaaccgaagtgttatcatcgtactattccgatctcgtaactcaatatcccgatctcgtttttttgcagttgttcaattgagacacaggtcatgggttctgtagctgaaacagagagaaccttgtacccatttttaactggatcctctgtggttgccatcaaatacaaagatgggattctcatggctgctgatatgggaggttcctatgggtctacactgcgatacaagagtgttgagcgtttgaagcctattgggaaacattcccttcttggtgccagtggggaaataagtgattttcaggagattctacgctacctcgatgagcttatccttaaggacaacatgtgggatgatgggaattctctggggcctaaggaggtgcacaactatttaactcgaatgatgtataataggcgtaacaagttcaaccctttgtggaactctcttgtacttggtggtgtgaagaatggtcaaaagtaccttggcacggttaacatgattggaattaattttgaagacaatcatatagccactgggctgggaaatcatcttgctaggccaattttccgtgatgaatggcatgnnnatttgacttttgaannnnntgncaagttactggaaaaatgcatgcgtgtgcttttatat

SEQ ID NO: 7910 - DNA, 456 bp, Zea mays
  misc_feature (6)..(6): n is a, c, g, or t
  misc_feature (209)..(209): n is a, c, g, or t
  misc_feature (233)..(233): n is a, c, g, or t
  misc_feature (247)..(247): n is a, c, g, or t
  misc_feature (271)..(271): n is a, c, g, or t
  misc_feature (282)..(282): n is a, c, g, or t
  misc_feature (288)..(288): n is a, c, g, or t
  misc_feature (298)..(298): n is a, c, g, or t
  misc_feature (306)..(306): n is a, c, g, or t
  misc_feature (309)..(310): n is a, c, g, or t
  misc_feature (319)..(319): n is a, c, g, or t
  misc_feature (322)..(322): n is a, c, g, or t
  misc_feature (357)..(357): n is a, c, g, or t
  misc_feature (364)..(364): n is a, c, g, or t
  misc_feature (366)..(366): n is a, c, g, or t
  misc_feature (384)..(384): n is a, c, g, or t
  misc_feature (386)..(386): n is a, c, g, or t
  misc_feature (396)..(397): n is a, c, g, or t
  misc_feature (400)..(401): n is a, c, g, or t
  misc_feature (405)..(406): n is a, c, g, or t
  misc_feature (414)..(415): n is a, c, g, or t
  misc_feature (417)..(417): n is a, c, g, or t
  misc_feature (421)..(421): n is a, c, g, or t
  misc_feature (428)..(428): n is a, c, g, or t
  misc_feature (436)..(436): n is a, c, g, or t
  Peptide Sequence Number=SeqID_13228
  Probeset Number=SeqID_22313
gccggncgggccgggaacctccacctctatccaaaacaccaaacaccacactatctccacaatgactaccgagcagaccttcatcgctgtcaagcctgatggcgtccagcgtggcctcattggtcccatcatcacccgcttcgagaaccgcggcttcaagctcgccggtatcaagatggtccagccctccaaggagcacctcgagaagnactacgaggacctcaaggagaagnccttcttccccggnctcattgcctacatgagctccggncccatctgcgncatggnctgggagggncgtgacgncgnnaagaccggncgntccatccttggtggcaccaacccccttggctctgnccccggnancatccgtggtgactacgncntcgatggcgnncgnnacgnntggcacgnntncgantctggcnagaacggnaagaaggagatctccctctg

SEQ ID NO: 7911 - DNA, 578 bp, Zea mays
  misc_feature (157)..(160): n is a, c, g, or t
  misc_feature (459)..(459): n is a, c, g, or t
  misc_feature (492)..(493): n is a, c, g, or t
  misc_feature (529)..(530): n is a, c, g, or t
  misc_feature (532)..(542): n is a, c, g, or t
  misc_feature (560)..(561): n is a, c, g, or t
  Peptide Sequence Number=SeqID_13229
  Probeset Number=SeqID_22314
aaattgcagcttttgtctctaatttcagtgtggtttcccttgatgaagaccaaatttctgcaaatctagtgaagaatggccctcttgcaattggtatcaatgcagtttttatgcagacatatatcggtggcgtctcatgcccatacatctgcgggannnnatttggatcatggtgttcttctagtgggttatgggaaagctggatatgctcccattcgccttaaggagaagccttactggatcataaagaattcgtggggggaaagctggggagagaatggatattacaagatctgcagaggtcgaaatgtatgtggagtggattccatggtctccactgtagctgcagttcatacatctcacaattaaataaaaggatgcctgcttgtggttgtgtcgtgtgacattaagtaagttgagtttgtgtaaatattatcattaagttgtgaatgtatcgtntgatactggtaaaattatctccgtataggatcnngatactgctacgatcatgttatttatgtagtaattnncnnnnnnnnnnnttaacaataaaaaaaaannttgttggccgccttggc

SEQ ID NO: 7912 - DNA, 675 bp, Zea mays
  misc_feature (6)..(8): n is a, c, g, or t
  misc_feature (595)..(595): n is a, c, g, or t
  misc_feature (634)..(635): n is a, c, g, or t
  misc_feature (643)..(646): n is a, c, g, or t
  misc_feature (655)..(657): n is a, c, g, or t
  misc_feature (668)..(669): n is a, c, g, or t
  Peptide Sequence Number=SeqID_13230
  Probeset Number=SeqID_22315
ggctcnnnccgggaaaacaaaaaaccacaccaaatttcagagcaccctatattccctctctctctctacaatcacaatggccttcgcttcttttctcggcagagtcctcttcgcctccgtcttcatcctctctgcttaccaagaatttaatgaatatggagttgttgggggacctgcagcaaaagcaatcagaccaaagtttgatgcctttatgcatcaagtacattctcgagttggctttcaccttccagaaattgatatgaaatttttagttgctggggctattgctctaaaaggcgttggagggattcttttcatctttggcagctctttcggagccttccttttgcttttgcatcagatgattgctactcccatattctatgatttctacaatcatgacaacgaagaccaacaattttttcaacttttcaacaaatttacacagaatatggctctcgctggggctttgctgttctttattgggatgaaaaactccattcctcgaaggcaacccaagaagaacgttcccaaaacaaaaaccttttagtagcctcaatttaaagagtcattctgcgaggaattctcggattgnttcctggttgatcattaaacccattctccatttacccannatttggcnnnnatgtttgtnnngttccagcacnnatatcc

SEQ ID NO: 7913 - DNA, 661 bp, Zea mays
  misc_feature (163)..(167): n is a, c, g, or t
  Peptide Sequence Number=SeqID_13231
  Probeset Number=SeqID_22316
ggttttaaacacctcctgaagttgcgccagatgctccctacaagtttgggatcattggtgatttgggccaaacattcaattctctttctactcttgagcactatatacagagtggagcacagaccgtcttatttgttggagatctttcttatgctgataggtnnnnntacactgatgttggtttacggtgggatacatggggccgatttgttgaaaggagtacagcatatcagccatggatatggtctgccggaaatcatgaaatagattacatgccttacatgggagaaattgttcctttcaagaactatcttcaccgatatactactccttatttggcatccaagagcagcagccccctctggtattcaatcaggcgtgcgtctgctcatataattgttctatccagctattctccatttgtaaagtacacgcctcaatggatgtggctcaaagaagaacaggagcgggttgatagggagaagacaccttggctcattgttctcatgcacgtgccactctataacagtaatgaagctcactatatggagggtgaaagcatgcgggtagttttcgagagctggttcatcaaatacaaagttgacgtgatctttgctggccatgttcatgcttatgaaagatcatatcgattctccaatat

SEQ ID NO: 7914 - DNA, 586 bp, Zea mays
  Peptide Sequence Number=SeqID_13232
  Probeset Number=SeqID_22317
gacccccttgtgtttcaattcgcccacacaatctgatttctccctttatacatcgaaaacttgaggatttgagctatgggaaaaagaaagtcaaagacaaagccacctccaaaaaaacgaatggataagcttgacactgtctttagctgccctttctgcaatcatggcaccagtgttgaatgccgcattgacatgaaaaacttgataggggaagcttcttgcgggatatgtcaagagagctttagcactaccatcacagctttatctgagccaatagacatatacagtgaatggattgatgaatgcgaacgggtgaacaacctagaagatgatggtgcttagtgattgtgagaagaatctgtggtagcgaatggaatgactgtctagctttatattttctccagcctgtaattatatcagttccttcctgttgtgagccctggtggtgctactccgagcttagttaacagattgtaatgcatgtacactagaatatgagaataattgggactatatagataaagccactttgataggaagccgatatgtaagccatattttagtttatattattgcagcatatgtg

SEQ ID NO: 7915 - DNA, 604 bp, Zea mays
  misc_feature (580)..(580): n is a, c, g, or t
  misc_feature (586)..(595): n is a, c, g, or t
  misc_feature (597)..(599): n is a, c, g, or t
  misc_feature (602)..(603): n is a, c, g, or t
  Peptide Sequence Number=SeqID_13233
  Probeset Number=SeqID_22318
ggaaaaagaagattatctctaatggttctaaaattcactgcatgaagacatggaatcccatcaataataggaagttcgaaacactgtcctacctaccacccctttcagatgactccattgcaaaggagattgactacatgcttaagaagggatggatcccttgccttgaatttgatgaggaagttggggaatatttgtagagaaaatagccagatgccaggttactatgatgggaggtactggacattgtggaagctaccaatgtttggatgcactgactcttcccaagtcctgaatgagatccatgaatgcaaacggacatatccaaacgcatatatacgctgcatagcatttgacaacaagcgccacatgcagtccatagcttttgtcattcagaaacctgctagtaccactagcacttgagtcattttgctcttatttctcttcaaatccttgttgaaattttagatcttttctctctactatttgtttctcttcttaaatctttttttctgagaaatgtaatatgaatgtttagtgtttactaatttagcggtatgaataagacggatttctaaanataaannnnnnnnnnannncanna

SEQ ID NO: 7916 - DNA, 675 bp, Zea mays
  misc_feature (6)..(7): n is a, c, g, or t
  misc_feature (204)..(205): n is a, c, g, or t
  misc_feature (547)..(549): n is a, c, g, or t
  misc_feature (551)..(551): n is a, c, g, or t
  misc_feature (572)..(572): n is a, c, g, or t
  misc_feature (593)..(595): n is a, c, g, or t
  misc_feature (640)..(640): n is a, c, g, or t
  misc_feature (642)..(642): n is a, c, g, or t
  misc_feature (656)..(663): n is a, c, g, or t
  Peptide Sequence Number=SeqID_13234
  Probeset Number=SeqID_22319
gggaannctcgggtcaatgtttggatgtgacaagtacgggattaagccagaccttgtttccttggcaaaggcactttcttgtgcatatttgccaataggagctggccttgggagcccagaagtttcagaagttatacactcacaaagcaacaaacttggtaatttttcccatgggtctacttattctggacacccggtgccctnngctgtggcacttgaagcaggcatcatctacagagaaagaaatattgttgacagggtgaacaagatctcccctagggtccaagatggattaaaagctttgtctgacagtcccatctttggagagatacggggaactggcttgattctggggactgagttcacagacaacaaatcacctaatgatccatttcctcctgaatggggagtaggtgcctattttggagcacaatgtgataagcatgggatggtacttcgtgtacctggagataatatcatgatgtctccaccatttattatctccccagcagaagttgatgagtcaatgagaattcatggaatagcnnntnaagagacggaaaagaaagtanaagagctcaagtctcagcgcnnntagctgagtccgatgatggcataattaaactctgctgccttgttntnaagaaaaatcattnnnnnnnntaacttgccaaa

SEQ ID NO: 7917 - DNA, 584 bp, Zea mays
  Peptide Sequence Number=SeqID_13235
  Probeset Number=SeqID_22320
gcggggaaatggaaaggaataatatatagggaaaaaggatgtttggaaaaaaaaaaaaaaaaaaaaaaaaaaaaaaaaaaaaaaaaaaaaaaaaaaaaaaaaaaattaaaaaaaaaaaaaaaaaaaaaaaaaaaaatttaaaaaaaaaaaaaaaaaaaaaaaaaaaaagtcccttccctgccggcccccccggccatgaccccggttttttccccagttccccccatcatttccataaagggccatcaaacaccctattgggcaaccctataggctacaacaagcccttgcgggaaccgtttaacaacacccctttgcccaattacaacaacaatccttggcacatttaaccatacaaaccatcgcaacacaactaaagcaacagtttgtcccccctttgacccacctacccccaggaaaccccgtctcctacttgaaacaacaactgtttgcttccaacccaaattctttggcaaacacagccgcataccagaaacaactacagttgcaacagtttctaccagcttttattcaactacccatgggaaaccctgccacatacctgaaacagaaacaactgtttt

SEQ ID NO: 7918 - DNA, 673 bp, Zea mays
  misc_feature (6)..(9): n is a, c, g, or t
  Peptide Sequence Number=SeqID_13236
  Probeset Number=SeqID_22321
ggtttnnnnctcgaaggagaacgaccaggaggagcaaccgttgcagcagcagcagaagaagaagcagaagccatggttctcaagacggaactttgtcgtttcagtggggcaaagatctaccctgggagaggcatcagatttgttcgtggtgattctcaggtcttcctgtttgccaattcgaaatgcaaaaggtatttccacaaccggttgaagccatcaaagctcacctggactgccatgtataggaagcaacacaagaaggacattgcccaagaagctgtgaagaagaggcgtcgcgcaaccaaaaagccttactcgaggtcaattgtcggtgctactttggaagttattcagaaaaaaagaagtgagaagcccgaggttcgagatgctgctagagaagctgctcttcgggaaatcaaagagagggtcaagaaaacaaaggatgagaagagggccaagaaggcaggagttcaggccaaggtacaaaaatcccgaggcaagggcagtgtttccaaggctgctgcagccaaaggtcctaagcttggtggtggaggtgggaagcgctgaatctttagttttgtttcttttttggctagcactttaatagagttgttttgaagctttttgtactgatattttatttgcttgattaatctttttgtgtttggtactg

SEQ ID NO: 7919 - DNA, 373 bp, Zea mays
  misc_feature (164)..(165): n is a, c, g, or t
  misc_feature (276)..(277): n is a, c, g, or t
  misc_feature (305)..(309): n is a, c, g, or t
  misc_feature (333)..(335): n is a, c, g, or t
  misc_feature (337)..(338): n is a, c, g, or t
  Peptide Sequence Number=SeqID_13237
  Probeset Number=SeqID_22322
ggagaagagagtgtgagttgaacggaaaatgggaaggaagaaagggtttgttgagttcgatgaatcgccgccggacgatttcgacccggcgaatccgtacaaggatccggtggcaatgttggagatgagggaacgcatagtgagagagaaatggatccaaattnngaaggctatgatcataagggagaagcttcgatggtgttaccgcattgaaggtgtcaaccaccttcagaagtgtcgccaccttgttaatcagtaccttgaatctacacgtgnnattggttggggcaaagatggccgtcacnnnnntctccatggtccaaaagtcgaacnnntnngactttgaatgactattctgtggttaaattaaagg

SEQ ID NO: 7920 - DNA, 632 bp, Zea mays
  misc_feature (178)..(181): n is a, c, g, or t
  misc_feature (452)..(456): n is a, c, g, or t
  misc_feature (509)..(511): n is a, c, g, or t
  misc_feature (519)..(519): n is a, c, g, or t
  misc_feature (560)..(561): n is a, c, g, or t
  misc_feature (566)..(566): n is a, c, g, or t
  misc_feature (589)..(590): n is a, c, g, or t
  misc_feature (598)..(598): n is a, c, g, or t
  misc_feature (625)..(626): n is a, c, g, or t
  Peptide Sequence Number=SeqID_13238
  Probeset Number=SeqID_22323
ggaacaagacacagttcgctactacatcggccatggttatccgcatcaactccctcaccctcccttctgctttacccaaaatagagttaagaggtggaaattcacggagcccgagcctcagggttagctcgcagatgatgccccaaatgcgaaaggaaggtcgtggtcgccgagtctnnnnacgaagaacattgataaaaaaggatgaatatctgccctacaggatggagcgcattcctttcctggaggagcaggtgaggaggttaaaggacgagcgaaagatcttgcaactggacgtagagaggttaatgctatcagaagataataagtttgattttgtgaatgagatagcagctgaggccaattcttatgttgagagcaacatggatgagtatggacttgagaagaaagctattctccatgttttgagcaaccgagtaaatgattctggnnnnnaccgaccagaagcatattatgagcctgatcccttcaagcctgggccacattannngagagaantacatacctaagtacagagaaagtgtcatgctgagatgttnnattantggataggaatttacaacctttnnttacttangctacttgatgtacgtcaaattacccnntgttgt

SEQ ID NO: 7921 - DNA, 681 bp, Zea mays
  misc_feature (165)..(166): n is a, c, g, or t
  misc_feature (576)..(578): n is a, c, g, or t
  misc_feature (595)..(597): n is a, c, g, or t
  misc_feature (646)..(646): n is a, c, g, or t
  misc_feature (671)..(677): n is a, c, g, or t
  Peptide Sequence Number=SeqID_13239
  Probeset Number=SeqID_22324
ggcctcagcagctgcaagaaccctaaccctagagagcgcaacaccttcgataaccatgactttcaagcgcaggaatggaggtcgcaacaagcatggtcgtggccatgtcaaattcattcgatgctccaactgtggcaaatgttgccctaaggacaaggcaatctnnaggtttcttgtgaggaacattgttgaacaggctgctgttagagatgttcaggaggcttgtgtctatgaacaatacactcttcctaagctatatgtgaagatgcagtactgtgtttcctgtgctattcactctcacgttgtgagggttcgatctcgcactgataggaggaagcgtgacccaccacagcgcttcatcaggcgcagggatgatgcaccaaggcccggtcaacctggtcaagcacctcgtcctgctggagtaggagctcctgcccgtacctaagagcaaattttaagatttttggtcttgttggatcgaatcggttttatattatgaacttaaaagtttcctttgttgcttattttataaaatttcagttttgattagggatattatattttcttctaattgtnnnctttagtcctcggacgnnnccatcttggtttgttatgattctgtggtttcgatgagaatggacgacantgatattttataaatttgatcgtgnnnnnnnaaaa

SEQ ID NO: 7922 - DNA, 679 bp, Zea mays
  misc_feature (12)..(12): n is a, c, g, or t
  misc_feature (153)..(153): n is a, c, g, or t
  misc_feature (155)..(156): n is a, c, g, or t
  misc_feature (197)..(199): n is a, c, g, or t
  misc_feature (202)..(203): n is a, c, g, or t
  misc_feature (617)..(619): n is a, c, g, or t
  misc_feature (651)..(652): n is a, c, g, or t
  misc_feature (662)..(666): n is a, c, g, or t
  misc_feature (670)..(675): n is a, c, g, or t
  Peptide Sequence Number=SeqID_13240
  Probeset Number=SeqID_22325
ctttgtaatggnaacgtcactgtgatttcactactgtgcctgttggttctggtggaacatgctcatgcaacaacttacaccgttggaggacctgggggatggaccttcaacactaatacttggcccaatggaaaaaagtttagagctggtgangnnctaatcttcaactatgactcaacaacccacaatgtggttgnnntgnncagaagtggatacaacagctgcaagacaccggcgggtgctaaagttttcagttcaggaaaggaccaaatcaggctagcaagagggttgaactacttcatatgcaacaatgctggtcactgtgaatctgggatgaaggttgccattaatgcagtgtgatgccttggtgttgaagtgagacagtaattaaaagttaatggtcaattagctaagggtctctcttttcccaaaatagcagcattagtagatgttagtgtttgatcatgtatgtatgtgctttcttgtatggattaatcacataattttgtaaagtgagtgggagtgaggtggctttctagactttgtctgtttggtatatatgtgtgtggtgagagtgtgatagataagggtcttgttaactttggatctgcaaactnnnaaattattgaagtctgcgtgccaattatctgnntctttgtgtnnnnncgtnnnnnngtgt

SEQ ID NO: 7923 - DNA, 686 bp, Zea mays
  misc_feature (5)..(10): n is a, c, g, or t
  misc_feature (20)..(28): n is a, c, g, or t
  misc_feature (167)..(168): n is a, c, g, or t
  misc_feature (582)..(587): n is a, c, g, or t
  misc_feature (653)..(654): n is a, c, g, or t
  Peptide Sequence Number=SeqID_13241
  Probeset Number=SeqID_22326
tatannnnnncttataatgnnnnnnnnncagaagtaactgtggcgaggcttctcaaagatggtatcatgttcctcattcatggctgaaaccaactggaaatttattggtagtgtttgaggaaatgggtggagatccgaatgggatctttttggttagaagggttttnnatagtgtctgtgctgatatttatgagtggcagccaaatcttgtaagttatcagatgcaagcttcaggaaaagtcaaaacacctgtgagaccaaaagcacatttgtcatgtggtcctggacaaaaaatctcatcaataaaatttgctagctttggcactccagtagggtcttgtggtaactaccatgaaggtagctgtcatgctcacaagtcatatgatgcttttcaaaagaattgtgtggggcagaactcatgtgcagtgacagtggcacctgaaatttttggaggagatccatgtccaaatgtcatgaagaaactctcagtggaggcaatttgcacctgatcattttcaacctcagaaaataaatggaacaaaagttccagagattgatttgttttacttcaattcaacacannnnnntttgagtcaacaaagtttacacttctagatcaccacaagcattaatttggcttttaccaaggtgannttgcagatgaacacaacacaccatctggttga

SEQ ID NO: 7924 - DNA, 594 bp, Zea mays
  misc_feature (22)..(24): n is a, c, g, or t
  misc_feature (163)..(164): n is a, c, g, or t
  misc_feature (564)..(565): n is a, c, g, or t
  misc_feature (573)..(574): n is a, c, g, or t
  misc_feature (576)..(580): n is a, c, g, or t
  misc_feature (582)..(582): n is a, c, g, or t
  misc_feature (584)..(588): n is a, c, g, or t
  Peptide Sequence Number=SeqID_13242
  Probeset Number=SeqID_22327
gaaaattaagtaacttgataannnttgaagtcaagagaattgaagtgctgcaatggctgcagatgaggaagatgtgaagcttttcggagctgtgggaagcccatttgtcatcagggttcagattgctctcaagttgaaaggaattgaatacaaatatcagganntaaagctgggcaacttaagtgataccctcctcaaatacaaccctgtttataagatggttcctgtgtttgttcacagtgggaagcccatttcagagtcccttgtgattcttgagtacattgaagagacatggaaaaacaaccccatcttgccttctcaacctttccaaagagccatggctcgtttctgggccaagttcatagatgacaaggtttgatgaaaaagaaattacttactttggagttcaagctatgatcttctgaatcatcttcatattgcaaagataaaactttgcctccttagctttctatgtatttaacattttagcaacagcttgcaaaataggcagcaggacagacgctggaagttatcaatatttatctaaaaccgctcttgacaccnnattaaatnnannnnntntnnnnntatatt

SEQ ID NO: 7925 - DNA, 711 bp, Zea mays
  misc_feature (4)..(4): n is a, c, g, or t
  misc_feature (15)..(15): n is a, c, g, or t
  misc_feature (18)..(18): n is a, c, g, or t
  misc_feature (20)..(22): n is a, c, g, or t
  misc_feature (32)..(32): n is a, c, g, or t
  misc_feature (40)..(40): n is a, c, g, or t
  misc_feature (67)..(67): n is a, c, g, or t
  misc_feature (73)..(73): n is a, c, g, or t
  misc_feature (82)..(82): n is a, c, g, or t
  misc_feature (118)..(118): n is a, c, g, or t
  misc_feature (123)..(123): n is a, c, g, or t
  misc_feature (145)..(145): n is a, c, g, or t
  misc_feature (243)..(243): n is a, c, g, or t
  misc_feature (701)..(705): n is a, c, g, or t
  misc_feature (709)..(709): n is a, c, g, or t
  Peptide Sequence Number=SeqID_13243
  Probeset Number=SeqID_22328
cagnccgtagcaccnttnannngttgtctccncagtcccnataagcggtaggatgtgtaaattggtnggtaanttcgccaantcgaactggccgcaattcttcgcatctgcgtcatgnccatnccccacctgatacaccgatatnccgttttcgctctttcgagtttgatggtcaccgtctacagtcgtgccgtgatttgcaagccgaccggacagaaaatgcacgcccgcgctgacgcttcngacactgccccgaactggcccgacgatattttcgcgacacttgaacgcttcgacgtccggcaggtgccttacgtgcctgacgccggccattcgaagctgatccagcgcgtgctggcttcatcgacgatgcgcggcattccgctgacgacggaggaggagggcgtagcgctgctcgccggcgcctggaccggcggtcagcgcggtgtgctgctgatgcagtcgagcggcgtcggcaattgcatcaacatgctgtcgctgatcccgatcctgcgctttccgttcctcacgctcgtgaccatgcgcggcgagtggggcgagttcaatccgtggcaggtgccgatgggttcgaccacgcagggcgtgctcgagctctccggcatcaaggtgctgcgcgcttcgaacgcggccgaggtgccggccgtgctcgaagcggccgccaccgcggtggagtccagcgnnnnnaacnat

SEQ ID NO: 7926 - DNA, 958 bp, Zea mays
  Peptide Sequence Number=SeqID_13244
  Probeset Number=SeqID_22329
ctgggcgggctggagaacctcctggcagtgaacatctcgcacaaccgcctcgtcgggcggctgccggcgtcgggcgtgttccagagcctggacgcgagcgcgctggagggcaacctgggcatctgcagcccgctggtggcggaacggtgcatgatgaacgtgccgaagccgctggtgctggaccccaacgagtacacgcacggcggcgggggcgacaacaacaacatggggacgaacggcggtggcgtgggcgcgccgaggaagcggcggttcctgagcgtgtccgccatggtggccatctgcgcggcggtcgcgatcgtcctcggcgtcatcgtgatcacgctgctcaacgtgtcggcccggcgccgggccgaggcggcgggtggtgtcggccctgggcacgggcagaagaaggaggtggacgagagcgtggtgaccagcagcagctcgacgaccaagtcgtcgccggcgccggcaccggggggcaagggcaatggcaagggcaagctcgccgccggcaagatggtgacgttcggccccgggagcagcctccggtcggaggacctggtggccggcgcggacgcgctgctgggcaaggcgacggagatcgggcgcggcgcgttcggcacggtgtaccgcgctcccgtgggcgacgggcgcgtggtggctgtgaagaagctggcggcggcgagcatggtgcggtcccgcgaggagttcgagcgggaggtgcgcgtgctggggaaggcgcggcacccgaacctgctgccgctgaagggctactactggacgccgcagtggagctactaccggtgcacccacagcaactgccgcgtgaagaagcgcgtggagagactgtcggaggactgccgcatggtgatcaccacctacgagggccgccacacgcactccccctgcagcgatgacgccgacgccgacgccgccggcgaccacactggca

SEQ ID NO: 7927 - DNA, 531 bp, Zea mays
  misc_feature (496)..(498): n is a, c, g, or t
  Peptide Sequence Number=SeqID_13245
  Probeset Number=SeqID_22330
tacatctagtgtggtagaccaacttaggccagctttgttttacctaaagagacttgggttcaaggatttggaagccttggcttatcaagattctgttctgttggtgtctaatgtagaaaggaccctcatccctaagctgaagtatttggagaatttgggattttccaagggcgaggttagatgtatggtgttgagatgtccagcattgctcactttcagcatagaaaataattttcagccaaagtttgagtatttttctgtggaaatggggagaaaattggaggagctgaaagaatttcctcagtacttcacttttagtttggagaacaggataaagcctagacacatggaggttgtgcaaagtggggtcaattttcctttgtcagtgatgcttagaagcactgatgaagaatttagggagctgataaagccaagggatggatgactatgatgggagcattatgttatgtgtacttattatgtgaaagcatacttnnncaatgaagttaggatatttgactaaaaaaaaaa

SEQ ID NO: 7928 - DNA, 687 bp, Zea mays
  misc_feature (6)..(10): n is a, c, g, or t
  misc_feature (22)..(23): n is a, c, g, or t
  misc_feature (163)..(165): n is a, c, g, or t
  misc_feature (168)..(168): n is a, c, g, or t
  misc_feature (680)..(682): n is a, c, g, or t
  Peptide Sequence Number=SeqID_13246
  Probeset Number=SeqID_22331
gacccnnnnnattctccctttnncctctctctctctctctgcgtctcaacaagtttccattttttcgatcagatccgtaacaccaacctcaccaatagcctctgttacacatccatgacgcttggctcaggaggatccagtgtcgtggttccaaggaacttcnnnttnttggaggagcttgaacggggagaaaaagggattggagatggcactgtaagctatggaatggatggtggtgatgacatttacatgcgatcttggactggcaccatcatcggcccccataacactgtacatgaaggaagaatttatcaactgaagctgttttgtgataaagactacccagaaaagcctccaagtgttcggtttcattcacggatcaatatgacttgtgttaatcatgaaactggagtggttgaaccaaagaaatttggtcttcttgcaaattggcaaagagagtacacaatggaggatatactgacccagctgaagaaggaaatggcagctcctcataaccgaaagcttgtccagcctccagagggtacctacttttagcatccaagatcatatagttgtcggatcatatatagtgtgtaatgttttgtggatccttctgaactcaatcaagaacatgtaggggaatgccccaaaaaagcttcatatttccatctccatggctnnngagtt

SEQ ID NO: 7929 - DNA, 694 bp, Zea mays
  misc_feature (678)..(678): n is a, c, g, or t
  misc_feature (690)..(692): n is a, c, g, or t
  Peptide Sequence Number=SeqID_13247
  Probeset Number=SeqID_22332
gctcttttgatgttcgtaggtggttcttccccactcacttcaaagaggagaagggtcaccaacatttattcaacccacatggatactgaagctgctaatgccaagattgcagctatgaaagaaagatttggacgagagatccatgtttttgaaacatcagctctttctccatcttcaaatgctgtgtcatccaatgaagaggagactgatgacttctatgagtttaccgcggaagattatcaccggattttggctactaaaaaggaagataaattcttgaagactcgaaaaatccgagaagcagaagaggcatctcgtaggtcaagaataaccaaggctgtaattagagttcgcttccctgataatcacacattggaggctaccttccacccatcagaaacagtccagagtttaattgatctcctcagtaaagtgattgcaaagccagagcagccatttcatatatatactactccgcccaagaagctgatcaatgatatgtctcaggatttttatactgctggcttttgtcctggtgccatcgtgtacttttcatataatgttcccaaaggtgatagcactgtggttgaccatattggtccttacctacgtgaagagatcttgtctttgaagggtttggatgttgctaatgatcaaggccaacaatctgagcctgtncagtgtgcaccnnngc

SEQ ID NO: 7930 - DNA, 556 bp, Zea mays
  misc_feature (6)..(6): n is a, c, g, or t
  misc_feature (165)..(166): n is a, c, g, or t
  misc_feature (473)..(475): n is a, c, g, or t
  misc_feature (478)..(478): n is a, c, g, or t
  misc_feature (510)..(512): n is a, c, g, or t
  misc_feature (520)..(524): n is a, c, g, or t
  misc_feature (545)..(551): n is a, c, g, or t
  Peptide Sequence Number=SeqID_13248
  Probeset Number=SeqID_22333
gacgantcctaaccctccttcttcccttcagtgtgtgagtgaatcacgtcgtttctctgttctgcaaccatggcaaatcctagagtcttcttcgacatggctattggcggccaaccagtcggccgaatcgtcatcgagctcttcgccgataccacaccaaggacnnttgagaacttccgcgccctctgcaccggcgagaagggagtcggacgtagtggcaagcccctccactacaagggatcctccttccaccgtgtgatccctaacttcatgtgccagggtggtgacttcaccgccggaaacggcaccggcggtgagtcgatctacggtgccaagttcgccgatgagaacttcatcaagaagcacaccggtcccggcgtgctttccatggcgaacgctggtcccggaaccaacggatctcagttcttcatctgcacgaccaagactgagtggcttgatggaaagcacgtggnnnttngacaggtggtcgagggattgaatgtggtgaannngatcgagnnnnntggatctagctccggcaagannnnnnngccat

SEQ ID NO: 7931 - DNA, 701 bp, Zea mays
  Peptide Sequence Number=SeqID_13249
  Probeset Number=SeqID_22334
tgtttctatgataacaatgcacatctctctttttccttcgtccccacgagcaaccgataatccagacgacgctcgctcccgaaccctactctcccgtcgtatgtggcgacgacgtactatcggaatcattatcctaagatggtgaagttcctcaagcccggcaagggcgttatcctcctccagggacgcttcgccgtgaggaagggaattatcgtgcgcgtgttccaggaggggacccgcaaccgcccctatggccactgcctcgtgcgagggctctccaagtacccaaagaaggtgatccgcaaggactccgtcaataagactgcaaagaagtcgcgcgtcaagtgcttcatcaagctcgacaacttctgtctgctcatgaccacccgatacaccctcaacgtcgatttcaaggatggcgccaccggtgggtccgactgtactctctacccagaataagaatgttctcgtctgcaagactgacaaagtgcgccttgaggagaggtctcaagaccggaaagaacaggtgagttctttaccatgctccgattctatatgctcggcctcccgaatagacctgctttagctggcgatttgttgtatcggacagactccatctctgtattcgtattacatgaatatttcgtgtttagtcctgggggtctcagagataaatttgctaagatatgccgatgttgtgt

SEQ ID NO: 7932 - DNA, 445 bp, Zea mays
  Peptide Sequence Number=SeqID_13250
  Probeset Number=SeqID_22335
tgcaggacgcgctgcacttgtttgacgtaatgccgcacaggcgcgtgccgcctgatttggtctctcacaccatcttgatggacgggctgtgcaaggcctggaggctgaaggatgctcgtcggatgtttgacaggatggtacatggggggttgcgccctgacgctgttgcttatagtgttctgatcacagggtactgcaacgagggacaactaaaggaagcgaggtcgctgctgatggagatggctgggagtgggctcttggacatagctttcgctctcagggttgtcgttcagggtcatgtaaaatttggaaagctacttacctgcttgaacatggtggcaccactaaggaaatatggtatcgtcatcccatcacagagttatagctgcttgattggtgcattgtgtgaggatatgcgccctaatgctgcgaggggcttgctgca

SEQ ID NO: 7933 - DNA, 973 bp, Zea mays
  misc_feature (3)..(3): n is a, c, g, or t
  misc_feature (7)..(9): n is a, c, g, or t
  misc_feature (12)..(13): n is a, c, g, or t
  misc_feature (15)..(16): n is a, c, g, or t
  misc_feature (19)..(19): n is a, c, g, or t
  misc_feature (22)..(22): n is a, c, g, or t
  misc_feature (24)..(24): n is a, c, g, or t
  misc_feature (30)..(33): n is a, c, g, or t
  misc_feature (37)..(39): n is a, c, g, or t
  misc_feature (43)..(45): n is a, c, g, or t
  misc_feature (53)..(53): n is a, c, g, or t
  misc_feature (55)..(55): n is a, c, g, or t
  misc_feature (58)..(58): n is a, c, g, or t
  misc_feature (60)..(60): n is a, c, g, or t
  misc_feature (62)..(62): n is a, c, g, or t
  misc_feature (66)..(66): n is a, c, g, or t
  misc_feature (75)..(76): n is a, c, g, or t
  misc_feature (78)..(79): n is a, c, g, or t
  misc_feature (81)..(82): n is a, c, g, or t
  misc_feature (84)..(84): n is a, c, g, or t
  misc_feature (87)..(87): n is a, c, g, or t
  misc_feature (89)..(89): n is a, c, g, or t
  misc_feature (91)..(91): n is a, c, g, or t
  misc_feature (102)..(102): n is a, c, g, or t
  misc_feature (105)..(105): n is a, c, g, or t
  misc_feature (107)..(107): n is a, c, g, or t
  misc_feature (112)..(112): n is a, c, g, or t
  misc_feature (128)..(128): n is a, c, g, or t
  misc_feature (131)..(131): n is a, c, g, or t
  misc_feature (134)..(135): n is a, c, g, or t
  misc_feature (138)..(138): n is a, c, g, or t
  misc_feature (143)..(143): n is a, c, g, or t
  misc_feature (188)..(188): n is a, c, g, or t
  misc_feature (265)..(265): n is a, c, g, or t
  misc_feature (308)..(308): n is a, c, g, or t
  misc_feature (314)..(314): n is a, c, g, or t
  misc_feature (325)..(325): n is a, c, g, or t
  misc_feature (376)..(376): n is a, c, g, or t
  misc_feature (406)..(406): n is a, c, g, or t
  misc_feature (502)..(502): n is a, c, g, or t
  misc_feature (640)..(640): n is a, c, g, or t
  misc_feature (664)..(664): n is a, c, g, or t
  misc_feature (687)..(687): n is a, c, g, or t
  misc_feature (690)..(691): n is a, c, g, or t
  misc_feature (708)..(708): n is a, c, g, or t
  misc_feature (710)..(711): n is a, c, g, or t
  misc_feature (717)..(717): n is a, c, g, or t
  misc_feature (720)..(720): n is a, c, g, or t
  misc_feature (749)..(749): n is a, c, g, or t
  misc_feature (753)..(753): n is a, c, g, or t
  misc_feature (755)..(755): n is a, c, g, or t
  misc_feature (804)..(804): n is a, c, g, or t
  misc_feature (818)..(818): n is a, c, g, or t
  misc_feature (838)..(839): n is a, c, g, or t
  misc_feature (863)..(863): n is a, c, g, or t
  misc_feature (870)..(870): n is a, c, g, or t
  misc_feature (875)..(875): n is a, c, g, or t
  misc_feature (888)..(888): n is a, c, g, or t
  misc_feature (890)..(890): n is a, c, g, or t
  misc_feature (895)..(895): n is a, c, g, or t
  misc_feature (900)..(902): n is a, c, g, or t
  misc_feature (908)..(908): n is a, c, g, or t
  misc_feature (919)..(919): n is a, c, g, or t
  misc_feature (922)..(922): n is a, c, g, or t
  misc_feature (925)..(926): n is a, c, g, or t
  misc_feature (935)..(935): n is a, c, g, or t
  misc_feature (939)..(939): n is a, c, g, or t
  misc_feature (942)..(942): n is a, c, g, or t
  misc_feature (945)..(945): n is a, c, g, or t
  misc_feature (947)..(947): n is a, c, g, or t
  misc_feature (949)..(949): n is a, c, g, or t
  misc_feature (953)..(953): n is a, c, g, or t
  misc_feature (958)..(960): n is a, c, g, or t
  misc_feature (966)..(966): n is a, c, g, or t
  misc_feature (970)..(970): n is a, c, g, or t
  misc_feature (972)..(972): n is a, c, g, or t
  Peptide Sequence Number=SeqID_13251
  Probeset Number=SeqID_22336
ctnactnnnttnncnnatnatnantaaatnnnnactnnnatcnnnagtcttcnanttntntncttntaaaagaanncnnannanaangntnatgttgaaacntcncncgcgnggcgggcgctcctaanctnggnnccngcgcnagcagggtgaacgcctgtcacctgtactcaacggcttacagaatntaaccctgctacgtgatatcgagttgcgggtgtatgacactgatgatgaatagaatcatcaggagtttacctgccanccagatatgacttgtgatgataaaggctgccagctctgcccgngcggcntattacccgtnggtgatcgcggcacgaccctgaagtggcggctggctgactctcatacgcantacggtattttgctggcgaccctgccgcangggcgtcatcttagccatgatcaacaacaactggtggataccctggttgaacaactcaccgccacgctggcgctggatcgccatcaggaacgtcancaacagttgatcgtgatggaagagctgtgccaccattgcgcgcgaactgcatgattctattgcccaatctctctcttgcatgaagatgcaagtgagttgttacagatgcatggcgatgcgctgccagaaaccagccgngaactgtaagtcagatccgtaacnaactgattgcatcctgggcgcanttnnagaattgctacccattncnntttgcnctnaccaacctggatacgtccgcctgaggcantgcnanagacaacgccaatttgcttcccgggaactggatataatgccgctgctgngcttcgataggcanccattgtgaattgccggagnnttagaacgcctaacttccaccaanaatctgnaacgnggcaaaaatatgnanttccncaaannngggggntaaaccccaanttnggnnaatcctccnttangancgncncnaaangtcannncttctnttantnt

SEQ ID NO: 7934 - DNA, 730 bp, Zea mays
  misc_feature (187)..(187): n is a, c, g, or t
  misc_feature (241)..(241): n is a, c, g, or t
  misc_feature (283)..(283): n is a, c, g, or t
  misc_feature (295)..(295): n is a, c, g, or t
  misc_feature (299)..(299): n is a, c, g, or t
  misc_feature (302)..(302): n is a, c, g, or t
  misc_feature (308)..(308): n is a, c, g, or t
  misc_feature (318)..(318): n is a, c, g, or t
  misc_feature (320)..(320): n is a, c, g, or t
  misc_feature (337)..(337): n is a, c, g, or t
  misc_feature (349)..(349): n is a, c, g, or t
  misc_feature (357)..(357): n is a, c, g, or t
  misc_feature (368)..(368): n is a, c, g, or t
  misc_feature (372)..(372): n is a, c, g, or t
  misc_feature (388)..(388): n is a, c, g, or t
  misc_feature (396)..(396): n is a, c, g, or t
  misc_feature (406)..(406): n is a, c, g, or t
  misc_feature (427)..(427): n is a, c, g, or t
  misc_feature (432)..(432): n is a, c, g, or t
  misc_feature (456)..(456): n is a, c, g, or t
  misc_feature (461)..(461): n is a, c, g, or t
  misc_feature (464)..(464): n is a, c, g, or t
  misc_feature (477)..(479): n is a, c, g, or t
  misc_feature (482)..(483): n is a, c, g, or t
  misc_feature (488)..(488): n is a, c, g, or t
  misc_feature (494)..(495): n is a, c, g, or t
  misc_feature (497)..(497): n is a, c, g, or t
  misc_feature (531)..(531): n is a, c, g, or t
  misc_feature (549)..(549): n is a, c, g, or t
  misc_feature (553)..(553): n is a, c, g, or t
  misc_feature (559)..(559): n is a, c, g, or t
  misc_feature (564)..(564): n is a, c, g, or t
  misc_feature (616)..(616): n is a, c, g, or t
  misc_feature (647)..(647): n is a, c, g, or t
  misc_feature (653)..(653): n is a, c, g, or t
  misc_feature (706)..(706): n is a, c, g, or t
  Peptide Sequence Number=SeqID_13252
  Probeset Number=SeqID_22337
actcctatgggcgattgggttcctcgaggccggccgggaaaacctgccgccgcccgccagcaccaaacttccatccgccccgagctctgcctccgccgccgccgcgccatgaggcctctcgacgagaaggaaacgactcaggtattcgagaagctggtcaagttcacggggcccaacctgaagcacntcctggagcgccccgcagtggagggccccgacgcggagcccggccgctactgcntccggcttcaccgcaatcgcgtctaccacgcctccgaggcgntcgtgcgccgcngcancgncgtgtnccgaccgcgncncgtcggcgtggggacgnccatcggcaagntcacccancacggcgcgtnccancttacggtccacgcgntcgacctnctcgttgcanacgcgcgccgccgcgtctggntcaanccgacaccgagcgttcctttctcnttggnaantccgtgcccaagnnnttnnctcgntcgcannancgagaacaacaaggtcggggacggggtggtcgtnatggtcatggttgacgtncctnccgggntcggnattgcggcgaggtcggcgcaggattgcaggaaggccgaaccaacggcggcgncgtgctgcccagtcggaacgccggggagtanctccgnaggaggagaagttttgtgaggtgagcgcataggcttggctggttaaggcatantcctgagtgaattatggaagattg

SEQ ID NO: 7935 - DNA, 481 bp, Zea mays
  misc_feature (403)..(403): n is a, c, g, or t
  Peptide Sequence Number=SeqID_13253
  Probeset Number=SeqID_22338
cgagcagtcaaggcaacgacccgatacagttgcccaacatgtcgctcgctaggggagagaagacgaacttacaattcatattgcgtgatctgaacaccaacgatgatggcacgcaaaaaggtatgtacgctcttgaccaagatcaagaggtgtcggtcgccgatactctaacttggtctgcaagaaagctgatgttgatctgaacaaacgtgctggtgagcttacctctgaagagctcgagcgtatcgagaccaacatgcaaaaccccacacaatacaagatctcttgctggctactcaacagacaacgcgacattggtgactgcgaggactctcacatcctgtgcaacggtgtcgactccgagctccgtgaggatctcgagcgcctcaagaagatccgcgcncaccgtggtctccgacactactggcgtctccgagtccgtggtcagcacaccaagaataccggccgacggggcaggact

SEQ ID NO: 7936 - DNA, 1105 bp, Zea mays
  Peptide Sequence Number=SeqID_13254
  Probeset Number=SeqID_22339
atggctatggtgtatattcattctgccttcatcctcatattcttgagttcaccctgtcaatccaacgaccagctgactcaaacaaagccactcttgctcgaagacacgctcatctcggagggcggggactttgcccttggcttcttttcccctaccaatttcagcaagaagctatacatcgggatttggtacaacaatgtcccagagcgggagcgcacggtggtgtggatcgccaaccgtgacagcccagtcaccaccccagctacatcagtgaagctagccgtcacaaacgattcagaactggtgctgtcagactcccaaggccacatcttttggatggcaacgagcagcacaagtggaggcgctggagcttttgcagtgctgctcaactcaggcaactttgtccttcgatcgccaaacggcacggacgtatggcaaagcttcgatcacccgactgatacagtgcttccaaccatgaggagtatgataagatacaggtcacaaccggctacgggcctctttgcctggaagagccctgacgatccatcaaccggggacatctcttccggcatggatccggcctcctcaaacgttcaggtgttcatttggaatgggacattgccgtactatcgttcttctttttttaatgatgtcccagcatccggcggcacgtaccaggccaacaatacctccgtcacataccaatggatgatggtcgatacaggggatgagatctactatacgttcacagtcttagccggttctccctacatgcacttctcacttcaccacacaggcaagatgaggctcctggtctgggaaaatagcacatcatcctgggtgctcatttctgaggaacctagtgttggatgtgatctctacgcctcttgtggcccgttcggatactgcgatctcactaaggcaatgccgacatgccagtgccctgatcattttgagctggtcgacagtctcaacttctctagaggatgccagagaaaggaagagctgaaatgtggaacagagagctatttcatgaccatgcctaacatgaagattcctgacaagttcttgcacattagaaatagaaccttcgaccagtgtgcag

SEQ ID NO: 7937 - DNA, 526 bp, Zea mays
  Peptide Sequence Number=SeqID_13255
  Probeset Number=SeqID_22340
tgcagggcctcggtctcggcggcgaactgccggtcgcggccacgtacatcaacgaaatcacgcgtgcgcacggccgcgggcgcttcgtgctgctgtacgagatcgtgttcccgatcggcctgctggtatcgatggcgctcggcgcgtggctcgtgccgcggttcggctgggagatcatgtacttcgtcggtgggctgccgctgattctcgcgctggtgctcacgcatctcgtgccggaatcgccgcgctggctcgcatcgcgcggacggctcgccgaagccgggcgcgcggtgggcgtgttcgaatcgtcggtgcgcggcgaactgccgccggccacgcaggcggccgcatacgacgagatggtccgccagcatccgaagcgccggatgagcgacctgttcagcgccgcgtatcgcaagcgcacgctcgcggtggcgacgctgtgggcgacgtgcgggttcatccagtacgggctgtccacgtggctgccgaccatctacaagaacttctatcacgcaccgctgca

SEQ ID NO: 7938 - DNA, 1089 bp, Zea mays
  Peptide Sequence Number=SeqID_13256
  Probeset Number=SeqID_22341
atgcgggcgaggatgcccgtgtctctctggagagggcgtgtgagcgccgacagaacatcgagagtcgcaacctcggctacgccttcgctgcggtcgcaccgtagaccccgacgggcgctcggatccaagcgggtgtcccgttggttggcgtgggctgcaccgcactcgcggatcatctccgtgcggcgtcttggccatccaagtttcggccacacctgccggaaaagtacggcggcacacctccatgcagtgaggcaggagcccgaagagactcttcgggccttcatctcccgcttcactaaggtacggggcactatacctcgtatctctgatgcttccatcatcaccgctttccgccagggggtgcgtgatgaaaagatgttggagaagttggccacgcatgacgtggaaactgtccccacacttttcgctctagccgacaaatgtgccagggccaccgagggtcgtgcatggcactcgacaccacagacccgggttacccagacgggtggcttgggtgccgtcgcccaggacggcaaaaagaagaagaagaaccgcggccacgagaggccgcagactgctgcaccagtcgtcacggctgcgactgggggccggggcgagcgcaacaagcacccagggccgcaggggagcaacagcggctcatgccctatgcaccccaacgctcgccacagcgccacggagtgccgcgagatcatcaaactcgtgaagcgcgtcagcggacggcgcgaccagacctccagggacggctccccacctcgtcgccagcccggcaaggagaggtccgacgacggcgaggtggctgccgaagagcgggacctcgggtatcagtcacccgagggggtcctaaaggacgtcttcaccggggactccgactccagcggcgagagcgaccgccgcaagaagctgtatgttatgtacgacgggagctgggatatcacctccctcaggaacgtcaagtccctgcgccgcgaggtcctgtcggtgaccccaggggtctcgaaggctgctccacatcagcggtggaggagcaccaccatctccttcggggcatccgactgccccgactga

SEQ ID NO: 7939 - DNA, 475 bp, Zea mays
  misc_feature (7)..(9): n is a, c, g, or t
  misc_feature (11)..(11): n is a, c, g, or t
  misc_feature (36)..(36): n is a, c, g, or t
  misc_feature (38)..(43): n is a, c, g, or t
  misc_feature (47)..(48): n is a, c, g, or t
  misc_feature (78)..(80): n is a, c, g, or t
  Peptide Sequence Number=SeqID_13257
  Probeset Number=SeqID_22342
gatcaannnangaaagccatagtatccatcatagangnnnnnntcannactggggatgttgacatggctgcatctgannnaagagaacttgggtcaaatgaatattatccatacttcattaagcgtcttgtgtccatggccatggacaggcatgataaggagaaagaaatggcttcggttttgctttcagcattgtatgctgatgtcatcagtcccgcgcagattagggatggattttttatgcttattgaatctgcagatgatcttgcagtggacatactagatgcagttgacatccttgctttattcctggcacgtgctgttgttgatgatattcttcctccagcctttcttgccagggccaagaaggctcttccagaatcttccaagggatatcaggtaatccagactgctgagaagagttatctctcagctccacaccatgcagaactcgtggagaagcgatggggtggta

SEQ ID NO: 7940 - DNA, 598 bp, Zea mays
  Peptide Sequence Number=SeqID_13258
  Probeset Number=SeqID_22343
gggcacccggccgttgggggtttccttcacccccaacggatggaactccccccgtcgaggccatctcggagggggtgcccatggttttctgcccccggcacggggaccagtttggcaacataaggtacgtgttccacgtgtggaaggtaggcccggagcttgtgggggaacaactggaaaaaggccaggtcaaggcccccatcgacaggctttttggccccaaggaaggggaggagatcaaggagaggatgaaggaattcaagatcgctgcggccaaaggcatcggcatcggggttgacgttgacgaaaatgggtccccccgcccggatttaaccgatttggttgatttcataaaatccttttgagctcatgacgatcgatttgttgggtgatgcctactctgtccatcgtgatggacccctgtttgtggtcacttccccgttcctgacggggttgtgttttagggtatcattgtgcgatcagttccatgtttttggccatgttttaaaataaaacaaaaaacttgtgtttttgggggaccattgtggtccctttcatgtttttgacggcgagttggaataaaacaagacctttgtcc

SEQ ID NO: 7941 - DNA, 507 bp, Zea mays
  misc_feature (422)..(424): n is a, c, g, or t
  misc_feature (426)..(430): n is a, c, g, or t
  misc_feature (497)..(505): n is a, c, g, or t
  Peptide Sequence Number=SeqID_13259
  Probeset Number=SeqID_22344
tttgctcctgtcgccaaaatggttacagtaagggtgtttctcatagttgtagcgacaaagaattgagaagttcatcaaatggatgtacataatgcatttctgcacggtgatcttatggaggaagtatacatgaaattaccacccggtttccaggtggggactttctagaaagtgtgtaggctcaagaaatcactttatggtttgaagcaggcgcccctgtgctggtttgctaaattgttaaccgttttgaagaattatggttttaaacaatcttattcagattattctctgtttactttaggaagaggatccgttcagcttagtgttattgtttatgtcgatgatctcatcatcttcgggagtcatccagatgatatacagaaatttaaggattatctcagtgcttgctttcacatgaaagnnntnnnnnttttaaagtatttctcgggaaagtggctcgcggacccaatgggtttgtactttgtcaacgtaaatannnnnnnnnca

SEQ ID NO: 7942 - DNA, 439 bp, Zea mays
  Peptide Sequence Number=SeqID_13260
  Probeset Number=SeqID_22345
atggaaagtaaagtttcccagtctggaaacaatgcgaataatcgcggcgataatgcggttctggcgctgagtaatatcgacttaaaattgctgcgggtatttaaatgcgtggtggaagccggcggattaaccgccgccagtcacgaattaaatattggcctggcggcgatcagtaaacaggtttctgacctggagattcggctgggcatgacgctgtgcagccgcggccgtgaaggttttgagctgacgcagtacggcatcaatgtttatcaggccacgctggagctgttcgtgtcgctcaacctgtttcgcgagcggctgcacaatagtcgcaacgagctgctgggcgacatcgcgatttgcgtggtggataacaccattagcgatccgcactcgccggtcaccagtgcggtgctcacgtgcaccagaaagagcccaa

SEQ ID NO: 7943 - DNA, 404 bp, Zea mays
  misc_feature (13)..(15): n is a, c, g, or t
  misc_feature (32)..(37): n is a, c, g, or t
  misc_feature (88)..(90): n is a, c, g, or t
  Peptide Sequence Number=SeqID_13261
  Probeset Number=SeqID_22346
catttaaatgtannngataatagcggagcccnnnnnntgatgtgtattcgaatcataggagctagtaatcgacggtatgcttatattnnngacattgttgttgctgtaatcaaagaagcagtaccaaatacgcctttagaaaaatcagaagtgatcagagctgtaattgtacgtacttgtaaagaactcaaacgtagcaacggtataataatacagtatgacgataatgctgcggttgtcattgatcaagaaggaaatccaaaaggaactcgaattttttgcgcaatcgcccgggaattgagacagttcaattttactaaaatagtttcattagcacccgaagtattataacacaagaccttgatataaatatattatttatgaatgaaatcgattaattaata

SEQ ID NO: 7944 - DNA, 525 bp, Zea mays
  misc_feature (42)..(42): n is a, c, g, or t
  Peptide Sequence Number=SeqID_13262
  Probeset Number=SeqID_22347
caggaccggaccggaattaatttccgggttcgcgagctcacnatacggccggcgcgccgggcctcaagcgcaggtggttcattccgttcatgaacaccaccgacctcggaaagcagttcaccatgtccgaggtgcgcaagcacgcgtcgcaagagtcggagtggatcgacgtgcacggacacgtctacaactgtaccaagattctcaaggaccacccgggcggtgccgacagcattcttattaacgccggcaccgactgcaccgaggatgtcgacgccatccactccgacaaggccaaggtgcttcttgacacctacctgattggttagctcataaccacgggcaccggttacagattcgacaacttcgtccacggcggctacgttctgtcgcacctagtggccatccgcgaggcccgtaggggtcccgggtttttcaacctgagcgaaaagatccactggcgactcgtaagcatgaaggggctgtcccgcgacgtccgcctttaccgtttttagctgccgacga

SEQ ID NO: 7945 - DNA, 404 bp, Zea mays
  Peptide Sequence Number=SeqID_13263
  Probeset Number=SeqID_22348
atcgtgctcctccatgggatgtcgtagtccatagtctcagatcgagatccggtgttcacctcgacgttctggcgggaactgatgcggctcatgggcacccagctccacatgacaacggcgttccatccatagttcgatggccagacagaggctgccaaccgcgtcatcgccatgtacctccgttgcttcataggcgatcgtccacgagactggatgcggtggctgccctgggcagaatacaccgacaacaccgcattcagtcgtccctgtgggagacaccgttccgtgtggtctatggctgagacccgcccaccatcaggtcctatgaagatggcaacactcgagtagctacagtggacaagacgatggccgaacgagacgagttcttggctgatgtccgccat

SEQ ID NO: 7946 - DNA, 652 bp, Zea mays
  Peptide Sequence Number=SeqID_13264
  Probeset Number=SeqID_22349
atgatagtgcaaatcgttgagcaccgcgccgagactttggaggatttcctggtggaggacgaagctgcttcttccacgccacgagttcccaaccgcccagtgctgggcattgctgctgtgcacgctgcgcaacagcatacaactgcgcagacatctcggactccgtcgagggcagctccgggggcattgtctgcggccagggagttgctgcgccaccctccaagctccatggcctcaccgggggccatgaagcagtggcgtgatgacgtcgaccgactgctcggcatggcacattctacctcgagcaagtcgaggtcatggtcatcctggcgccaacatgaggcgtcagcatcggtgcgctcgccctcagtaaggggtgcacagaccaacgacctccgggcagaactcaaccgtaggcgtacgagagaggatgctcggatctctttggagagggcgcgggagcgccgacaaaacattgaagatcgcaacctcaatcaagacttcgctgcggtagcaccgcaaaccccagtgtgtgctcggttccagacgggtgtccccttaaccggcatgggctgcgccgccctcgcggatcatctccgcgcggcgtcctggccatccaagttccgaccacatctgccggaaaagtacgacg

SEQ ID NO: 7947 - DNA, 396 bp, Zea mays
  Peptide Sequence Number=SeqID_13265
  Probeset Number=SeqID_22350
atcgttgttccaaatagcactacacctcagcaatcaacggcaaaaaacccacccagtgacgtatacacacgctcttgtggagctgcttactccaagggaattgcagcctgacttggctcatgagctgcgtcacctcaagtgcgatcatggtgtttggcatactatcgccaatatactcacaatgggagcatacactgtccctggttttggcatgattgctggctttctggaagagcagttatacagatggctacgagctgcagagctgacttgagacaggtcagctcttattgtggtgcaagatccgaaggtagtcatctatgttctgacgaacttgcccgtaggatgcccctatcttggcctcaagctaaatggggatgccttcctggtgcaagc

SEQ ID NO: 7948 - DNA, 657 bp, Zea mays
  Peptide Sequence Number=SeqID_13266
  Probeset Number=SeqID_22351
gcatcgacttgagctgtattccgctgtatttcaacgccgacgcgccgttggcctgtgccatgcatgaagctttcaccatgaatgtcgcccgcctgtggctgcgcctgccgggtgacatggacagaagaccgctcgacgggtatttcaccgcgctgggctttggcgataacgacgacctgtggccgaagggcagcagcagtttcagcggctatcagctgttgctggagtatttcaccttccgcgagaaattcatgttcacgggcctgcgtgggctggagaccgtggtctttccggctgagctcccctggtttgaaatcgacgtggtactggcggaacgctgggagcatgatttcagctttaccgaaaagcatctgcgccagaactgtgtgccggtgattaacctgttcccgctggaatccgacccgctgacgctcaattcattgcagaccgaatatatgctgcgcccgatgcgcgtgcaggatggtcataccgagatttatgcggtggattcggtgatgtcatccagccagcatagctacgtgccgttttcgagctttcgccataaaggcggcatgatgcgccatcaggcccccgaatattggtacaacggtcgcgtacgtaacggtccgaccggactgcataacacctggcttgtcc

SEQ ID NO: 7949 - DNA, 786 bp, Zea mays
  misc_feature (269)..(269): n is a, c, g, or t
  misc_feature (336)..(336): n is a, c, g, or t
  misc_feature (375)..(375): n is a, c, g, or t
  misc_feature (416)..(416): n is a, c, g, or t
  misc_feature (432)..(432): n is a, c, g, or t
  misc_feature (502)..(502): n is a, c, g, or t
  misc_feature (535)..(535): n is a, c, g, or t
  misc_feature (579)..(579): n is a, c, g, or t
  misc_feature (583)..(583): n is a, c, g, or t
  misc_feature (585)..(585): n is a, c, g, or t
  misc_feature (589)..(589): n is a, c, g, or t
  misc_feature (591)..(591): n is a, c, g, or t
  misc_feature (609)..(610): n is a, c, g, or t
  misc_feature (625)..(625): n is a, c, g, or t
  misc_feature (639)..(639): n is a, c, g, or t
  misc_feature (641)..(641): n is a, c, g, or t
  misc_feature (653)..(653): n is a, c, g, or t
  misc_feature (655)..(655): n is a, c, g, or t
  misc_feature (672)..(672): n is a, c, g, or t
  misc_feature (675)..(675): n is a, c, g, or t
  misc_feature (680)..(680): n is a, c, g, or t
  misc_feature (683)..(684): n is a, c, g, or t
  misc_feature (687)..(687): n is a, c, g, or t
  misc_feature (694)..(694): n is a, c, g, or t
  misc_feature (697)..(697): n is a, c, g, or t
  misc_feature (702)..(702): n is a, c, g, or t
  misc_feature (706)..(706): n is a, c, g, or t
  misc_feature (711)..(711): n is a, c, g, or t
  misc_feature (716)..(716): n is a, c, g, or t
  misc_feature (729)..(729): n is a, c, g, or t
  misc_feature (736)..(736): n is a, c, g, or t
  misc_feature (738)..(738): n is a, c, g, or t
  misc_feature (743)..(743): n is a, c, g, or t
  misc_feature (746)..(747): n is a, c, g, or t
  misc_feature (749)..(750): n is a, c, g, or t
  misc_feature (752)..(752): n is a, c, g, or t
  misc_feature (758)..(758): n is a, c, g, or t
  misc_feature (771)..(771): n is a, c, g, or t
  misc_feature (774)..(776): n is a, c, g, or t
  misc_feature (779)..(779): n is a, c, g, or t
  misc_feature (783)..(784): n is a, c, g, or t
  Peptide Sequence Number=SeqID_13267
  Probeset Number=SeqID_22352
ttgtttgaaacccttgagctccccgcggtggcggccgctctagaactagtggatcccccgggctggcggcaaatgagcagaaatttaagtttgatccgctgtttctgcgtctctttttccgtgagagctatcccttcaccacggagaaagtctatctctcacaaattccgggactggtaaacatggcgctgtacgtttcgccgattgtttccggtgaggttatccgttcccgtggcggctccacctctgaatttacgccgggatatgtnaagccgaagcatgaagtgaatccgcagatgaccctgcgtcgcctgccggatgaagatccgcagaatntggcggacccggcttaccgccgcgtcgcatcatcatgcngaacatgcgtgacgaagagctggccattgctcacgtcgaanagatgcaggcagtttntgccgtgcttaaggcaaatacaccatgaccggtaagccttcgatccggttgaggtggatatgggccgcantgaggagaataacatacgcatttcggcggcacngattggaacaagcgtgacaagttccttttaccaccgacgatttntaancntacncnctgacgcagcggtttgtnnatatcatcgtgtcgntctaaaggttggcntnttcgtccttaantntatgaaacctgatcccnttngtttnttnnacntgaaatnggnaaaanttgnaacgnggccntaagggttttggnttgcttncngtttnganntnntnaatttnaaaaattcctcgnacnnngcngganntc

SEQ ID NO: 7950 - DNA, 582 bp, Zea mays
  Peptide Sequence Number=SeqID_13268
  Probeset Number=SeqID_22353
atgcgacgtcttaccggagcaacctcaccttctcccggcctgacaggcgcgctccagtacctcaccatctcccggcccgacatcgcctacaccgtccagcagttgtgccttcatatgcacacaccacgggagccccacctcaccaccctcaagtggattctgcggtacctctggggctccctcgactacgaccttctcctccgaccatcctcgacgtcggaacttgtggtctacgtcgacagtgactgggccggctgccccgacacgcatcggttcacctccggctatgccgtgttcctgggcgccaaccttgtctcttgggccgccaagtggcagtccattgtctctcgctccagcgccgaggctgagtaccgcgttgtggccaacagcgtggcagaggcatcctggatgcgccagctcctccacgagctctacaaccccctccagcgcgccaccctagtttactgtgacaacgtcagcgccgtttacctctccactaatcccgtgcaacatcagcgcacgaagcatgtggagatcgacctgcacttcatccaggagtgtgtcgcagtaggcaacgttcgg

SEQ ID NO: 7951 - DNA, 750 bp, Zea mays
  misc_feature (75)..(75): n is a, c, g, or t
  misc_feature (154)..(154): n is a, c, g, or t
  misc_feature (180)..(180): n is a, c, g, or t
  misc_feature (203)..(204): n is a, c, g, or t
  misc_feature (234)..(234): n is a, c, g, or t
  misc_feature (276)..(276): n is a, c, g, or t
  misc_feature (278)..(278): n is a, c, g, or t
  misc_feature (293)..(293): n is a, c, g, or t
  misc_feature (322)..(322): n is a, c, g, or t
  Peptide Sequence Number=SeqID_13269
  Probeset Number=SeqID_22354
ctcttgccgctccccttttgaaggtagcccaccgattagcttccgtacgccagcaaataaaagccgtagccctanccgaggagcgcccatggccgctgcgatcgtggcctgaggcggcggggctcttcccatggggtgaggggatggaccctancctcaaggaggaggtgataaatgccntggatgatgcgaggggcgcggcnncccctctttgccttgtggggcggatcatcntacacaacaaggacgccaccgactcgtcttccaccgaccacnanggaaaggaggccggnggagcgcgccccggcgcacccggccccgnggcccgcggggaccgtgaagcgcagggcggtgctgctccactcccctctgtgcctggtcggaccacgaccgccagggggcccccgtccacgcgcctgcctccccacgcccgtcccccgccccctcagcccgccccgggaccccccctcgcacccccttacccccctcccccccacccgcccagcccccaacccatcgtccccccccacccccaccaccccccaccccccccccacccccaccccccccccccgccgcccggccccgcccgcccccccccccacccccccccccccccccccccccccccgttccaccccggcgcccccttcgcccccccacccccccccccccccccccgccccctcccccccccgccaccccgccgcccccgcccgcccccccctcgccccccccccgcgccccccc

SEQ ID NO: 7952 - DNA, 475 bp, Zea mays
  Probeset Number=SeqID_22355
cacgcacacgggcagggcgggggacattcaaactcgagacgcctgtgttcaacgaaggtggatccatcaatgagcacgctgtagacatacttcagagattgctcctgggccagactgctgatgcaaatcccagctgtggaccgccaggacgcatacagaatggatacacttgatggacaggttataagagccaacaccaaatcatagggaaaagaatgatggcgaagatcatcgggtgtgatgacccatgctcaactgataccacctgatggaatggagtctaaggagttctatacaagctggtgctaagcactttagcgacacatccactctggagcaggaatcaagaaacgagaatatggggatttccctttgccaatagcattggtagagaacagaggcaggtgcaggcttaacgatcatggggagaagatacttcccgatggaactcccggggttccaaaactgatgaaag

SEQ ID NO: 7953 - DNA, 833 bp, Zea mays
  misc_feature (1)..(2): n is a, c, g, or t
  misc_feature (6)..(7): n is a, c, g, or t
  misc_feature (492)..(494): n is a, c, g, or t
  misc_feature (524)..(525): n is a, c, g, or t
  misc_feature (542)..(544): n is a, c, g, or t
  misc_feature (572)..(574): n is a, c, g, or t
  misc_feature (629)..(630): n is a, c, g, or t
  misc_feature (634)..(638): n is a, c, g, or t
  misc_feature (647)..(648): n is a, c, g, or t
  misc_feature (652)..(656): n is a, c, g, or t
  misc_feature (665)..(666): n is a, c, g, or t
  misc_feature (702)..(702): n is a, c, g, or t
  misc_feature (704)..(706): n is a, c, g, or t
  misc_feature (710)..(714): n is a, c, g, or t
  misc_feature (718)..(726): n is a, c, g, or t
  misc_feature (735)..(778): n is a, c, g, or t
  misc_feature (782)..(782): n is a, c, g, or t
  misc_feature (785)..(793): n is a, c, g, or t
  misc_feature (795)..(802): n is a, c, g, or t
  misc_feature (805)..(809): n is a, c, g, or t
  misc_feature (811)..(811): n is a, c, g, or t
  misc_feature (815)..(822): n is a, c, g, or t
  misc_feature (825)..(828): n is a, c, g, or t
  misc_feature (830)..(833): n is a, c, g, or t
  Peptide Sequence Number=SeqID_13270
  Probeset Number=SeqID_22356
nntatnngctgatgggtaggtttagccaactactgtacctagatgctgaagaaccaaggtcccagccaactgaggagcaactggcagctcagaggaatgctttggagaccgtaaagaaatgccaaataggtaccatcttcaccgagagtaaattcttacaagctgactcactctcaaatctagcaagagccctcattcaggcagcaggccgacctcagaggataaccagctcgcttgatgatgaaggcacggcagtgttctgcttagagctcctaattactgtcacattaaataacagagacaggattgtgcttttgtggcagggtgtttatgagcacataacccatatcgttcagtccacagtgatgccttgcaatctggtggagaaggctgtgttcgggcttctgcacatctgccagaggctgcttccttataaggagaatctggtggatgacttactgaggtcactgcagctgattttgaaacttgatnnncgtgtagctgatgcttactgtgagaacatnnacgttggaggtcacacnnncttgtgaaggccaatgcaacccatatcnnntctcagatgggctggcgaactataatttccttactctgcgtcaccgctcgccatnntgannnnnctgatgctnncttnnnnnctctggttnncatcatgtctgagggagcacacctctcacctgccancnnnatcnnnnncagnnnnnnnnncaaggcagnnnnnnnnnnnnnnnnnnnnnnnnnnnnnnnnnnnnnnnnnnnnatgnctnnnnnnnnnannnnnnnnctnnnnnanttgnnnnnnnngcnnnntnnnn

SEQ ID NO: 7954 - DNA, 443 bp, Zea mays
  Peptide Sequence Number=SeqID_13271
  Probeset Number=SeqID_22357
gcacgcgtacgcaggctcggaattcggctcgtgagatcatgctatggtgcatatatatttattggctgcggttgattgctcctgggcacgtttaagcgatgcccctttcgtgaaactacgttggggcgctccttgcctcttaccatggttggtagcaacaaatcctgtgaactatggccgcccctgtgaactgtcatgtgtggaagctttatccgcagccctcataatatgtggggaggaagatacagcacattcgctgcttgagacttttaaatggggtcactcattcttgtctctaagcagagatctcctgaatgcatcctcccagtgtgaaaatgggcctgctatcattactgtgcagaagtcatggttatcaagtaactcgagtgttccaaagcccacctgcaacggggcccaggaatcctgctgaacacggtaggatc

SEQ ID NO: 7955 - DNA, 1520 bp, Zea mays
  misc_feature (10)..(10): n is a, c, g, or t
  misc_feature (26)..(26): n is a, c, g, or t
  misc_feature (88)..(89): n is a, c, g, or t
  misc_feature (165)..(169): n is a, c, g, or t
  misc_feature (171)..(171): n is a, c, g, or t
  misc_feature (173)..(174): n is a, c, g, or t
  misc_feature (179)..(180): n is a, c, g, or t
  misc_feature (1139)..(1139): n is a, c, g, or t
  misc_feature (1281)..(1281): n is a, c, g, or t
  misc_feature (1292)..(1292): n is a, c, g, or t
  misc_feature (1409)..(1409): n is a, c, g, or t
  misc_feature (1422)..(1422): n is a, c, g, or t
  misc_feature (1447)..(1447): n is a, c, g, or t
  misc_feature (1455)..(1455): n is a, c, g, or t
  misc_feature (1490)..(1490): n is a, c, g, or t
  misc_feature (1510)..(1510): n is a, c, g, or t
  misc_feature (1512)..(1512): n is a, c, g, or t
  misc_feature (1520)..(1520): n is a, c, g, or t
  Peptide Sequence Number=SeqID_13272
  Probeset Number=SeqID_22358
ctgcgtgcgngcatccgcgggcgggnacagagcgggaccacacaagacaaatggtgaagaaggaaaaagagaagggaaagagaagaannttttcctcctatccaccccaaaaagaggagagagggaggttttcctctacccagagaggagagagagaggagaagnnnnngngnncgggnnggaggagaggagcagaagcggtgtggccacccaaaaaagaacgaggggagggaagggggacgagagagggaggagcgaggagaagacagaaaagaagaacgaaacaaagacaagagaacacacaacaacagggcgggagggaggacaagagagacggcacggagcgagggggggagaggagcgcggaggaggagcgagcggaggggcgaacggcagacacaagagagtgagggcgcgcgcgcctgcacgcggagacggaaggaggacgaagggcgcaggcgagaggagagaagggagggagggagagggaaggaggagaggaaggaggccggaaagagagacggggagaggaggaaaagaaagcgagcagaagagaggagaggagagtgtagagcgcagccgagcggccaagcgaggaggaagagggaggggagagggagaagagagagagagagagtaggacagcaacagcagagagggagaacgacacggcgacgaaagtggcgagagatgcagaaggagaggaggtgagggacggagagagccgcgaggaacgaacagcgacgaccacagagagacgcagacggaagcgaagaagtaggcgacgacgaggaagaggagcggagacggacaggagagggagaagaaagagaagaacgcaggaagaggcagacgaggagagagagggagaggagaacgcgaaagggcagacgagagcaagacggccacagcgagcagaggagagaggccacgagacgcgctagcggcgagaggccgggaggaggagagaggaacgatagaagagaagagaaagagaagacgtgacgatgatggaaagagagaagaagagacgaggagaagggcggactgagacgggacggggtgatgtcgcggcatgaagcggagacgcgacgacgacatgagaggagcgatagaacggagagagcacgcgtgagcgngcggcaggcaagtgacaggagcgtagggaggaggaacgagacgagcggtcagcgcggaccgacacaccgaggcgagacgagacggcgtgaggcgacgacacgagacgacgaagtaggaatcgagagcgcagaggacggaggncagacacacgnagagagcgaagagaacagatcgataggactagccgcgagaagaagatagacacactagagacgagaagatgtaggacgacgggagaggtgatcgcgacaggcaacgctgcaggcgcngcgacgagcgaancgatgcaacgtcgactcgagcgagncgaagcgnacagaacgacaactacagaatacgacaatcaggancgaagggcagatgtataganangtgaaagn

SEQ ID NO: 7956 - DNA, 388 bp, Zea mays
  Probeset Number=SeqID_22359
gactgctgacgtgcatcagcaccaccacactggaggaggactcttaggaccgtgagaaaggacctaacactggaacggcggtatcagcacgagttcgttggggagccgactgtgcccgataccgtcagtattctgaggggactcacggagaagtacgaggggcaccatggcgtgaggatccaggaccgcgccctggtggacacggcacacatctccgggaggtacatcatggatcggcacctgcctgacaaagccataaacctggtggacgaggcctgcaccaatgcgagggtgcagctcgacagcctgtcggaggagattgatatcctggagaggaagagaatccagcttgaggtcgagctccacgcgctcgataaggagaaggaca

SEQ ID NO: 7957 - DNA, 703 bp, Zea mays
  Peptide Sequence Number=SeqID_13273
  Probeset Number=SeqID_22360
cattgggtacctcgaggccggccgggatggagttgacgatcactcatacggcgtctcattctcgtcacactcgcaagttgcgagcaatgaagcccaacatagtgtaccaagatagtctactatgagaggatccaaacagacgtgctgcaaacctgtgatccaaccctcgctgatcgctgaaagtgacttcatgctacctgaaacctgaacaactccggcgtccgagcgcatttgggaaaggcacgtatctacgttcccctgcttccagatcttggagcacttgagcatgcctgcagtactagtactgttcctcaacagcctgaacgtttcgattccatcaacgctggtgaacctgactgatctcatcaggttggatctctgcgacaacctggttaccggacctatcccaactacgtgttggttccatcagcaggctgcgatatctgaggctgtacgagaacaacctgacagggcctataccaccatcgtttggcaatctgactagccttctggaactgaagctccacaggaattcgttgagcggttcgattccggcctcccttggcgacatcaaatcgttgcagttcttgaaattgaacgagaatatgctgaccggcacggttccattggaagtcctctcccttgtcgttgtcggcaacctgaccgagctaaatattgcaagaaacaaccttgatggcactgt

SEQ ID NO: 7958 - DNA, 470 bp, Zea mays
  misc_feature (8)..(8): n is a, c, g, or t
  misc_feature (183)..(183): n is a, c, g, or t
  misc_feature (199)..(199): n is a, c, g, or t
  Peptide Sequence Number=SeqID_13274
  Probeset Number=SeqID_22361
gacctcgncggaaccctaaccctagccccgccgccgccccccgttccgccgccatgagggagatcctccgcttccagggcggccagtgcggctgcctgatcggggccgtgttctgggcggtgatctgcgacgagcacggcatcgaccagacgggctagtacgcgggcgactccgacctccagntcgagcggatcaacgnctactactacgaggtcagcggcggccgctgcgtgccccgcgccgtgctcttgttcctcgagtccgggaccatggagtcgctgcgctccgggtcctacggccagatcttgcggcccgacatgttcgtcttcggtcagtccggtgacgtcttgctctgggccaagggccactacacccagggcgtcgagctcatcgactccgtcctcgacggcgtccgtatggtggccgagatctgccactgcctccagtgatttcgcgtctggcactcgcct

SEQ ID NO: 7959 - DNA, 410 bp, Zea mays
  misc_feature (356)..(356): n is a, c, g, or t
  Peptide Sequence Number=SeqID_13275
  Probeset Number=SeqID_22362
tacaaccatggcgacccacactgataatgcttttctcaaacaacctaatgtgttcctcacctaaaataaatctggcaagggaaagaagccaggcaagggtggcaatcgatttttaaaaagcattggccttgccttcaagactcccagggaagcaattgaagggacctacattgacaagaaatgaccattcactggaaccgtttctatcacaggcataattattgctggaacatgccacaatgctaatatgaacagaaccatcattgttcgcatgaactatcttcactttgttaaagaaataccagacgtatgaaaagaggcactccaacattccaactcacatctccccatgcttncctgtgaaagaaagcgaccatgtattattttccactgcatgcccctataaaaac

SEQ ID NO: 7960 - DNA, 562 bp, Zea mays
  Peptide Sequence Number=SeqID_13276
  Probeset Number=SeqID_22363
gcgcaaatcagtgacatcaaccagctgaaaaccggtgagctgcggctcggcattccgccgatggtcggcatgcagattgccggatcgatctccgcgttccgccgccgctatcccggcgtacagctgaaaatctccgaatttggtggcctgacggtgcagcaggcggtgctgagcggcgggctggatattgcgctgaccgccctgccgattgatgcggagctgccgctgaacacgctggaactgatgcgccatccgctgtgcgtgctgctgccgcgcagcgcgcgctggctcaaccgcaccagcctgacgctggccgagctggctcagcatcccctgctgatcctcaacgaagagttttcgcttaaccgccagctgatgaaagcgtttcagcgccagggagtgatgccggatatcgcgctgcgcagcgcgcagtgggattttcttgccgcgatggtgcaggcggatatggggctggcgatcctgccggagccgatctgccagcggctggataaacaggccttgctgtggctgccgctggagtcggagctgcaggcatgcaagc

SEQ ID NO: 7961 - DNA, 418 bp, Zea mays
  Peptide Sequence Number=SeqID_13277
  Probeset Number=SeqID_22364
tatgcaccctcgtagctcggaattcggctctgcggcttgtacgggaccagtttatatggctcaagcatttgatgagacgcatcggggtatgtcttatgcatcagtgaggatcaattccttcgataaacgtgttggcctttcggagaagataaacaatgggatatccgttgccaatgaaagggtgaaatctgcctaccaaagatggcatgtttctgataaaacaatggttgtattgttggctgcacagcgcaagctaaatgatacaggctctgctgtgaaaaccaacacgtatgtgtctgctgcaacaagctcgctggatggtgcttttagcaaggtcgccaaggctgctcatgttgctggctcaagaaccagggagatgttccagacggttgtgtcaaatgtaacagacaaaggccct

SEQ ID NO: 7962 - DNA, 781 bp, Zea mays
  Peptide Sequence Number=SeqID_13278
  Probeset Number=SeqID_22365
caggatgccctgctcggccagttgggcgatcgcggcatgctggtggtgagctggcaacgcggcaagtgctggcgcgcgcgcgactggttttggcagcagaaaattgacctgatgcgccagctggcgacgttgctgaaagccgggctgccgctggcggagagtctgaaattgctggccagcggccatcctcatgcaggctggcgcgtgctgctgagccttctgcaacagcgggtcatggccggagagccgttttctcaggcgctgcgcgcctggccggatatcttcccgccgctgtttccggcactgatgcaggtgggtgagctgaccgggcaactggacgagtgctgccgccagctggcactacagcagagcaggcaacagtttctgcgccaaaaggtagtgaaagcgttgcgctatccgctgttcatcctgctggtggcgctggcggtcagcgccgggatgctgctgtttgtgctgccggaatttgttgcggtgtacgccagctttgacgcaccgctgccggcctttaccgccggcgtgatggcgctgtcggcactgttgcagcaggcggcgctgccgctgctgttgtgcggtgtggcgtccgggtggctggcgcgtctgacctaccgacgatccgttgcgtggcaaaagcgcagccagcagtggctgctgcggcttccgctgctggccccgttgtggcgcggcggtcaatacagtacacatatacgcgattctgcaactgacgcagcaggccgggctgtcgctgctcctgagcctgcag

SEQ ID NO: 7963 - DNA, 572 bp, Zea mays
  Peptide Sequence Number=SeqID_13279
  Probeset Number=SeqID_22366
cagctgcgctgcgcggaggcatcgctggcgacgctgcaacagcaaatcaacgtggttcagcaaacctgggagccgacgcagagcacagcagcgtaacggtctggcgccgctcaccgacgttgagaatgcccgtgcgcagctggcctcccttaacgcgcagctgccacagtatcaggcccaggagcgtcaggcgatgaacgggctggcagtgctgctgggcaaaacgccgggcgcgctggataacgaactgatgagcagcaaagcgctgccggcgttgccgaagctggtggcggtgggcattccatcgacgctggcgcgccgtcgtccggatatccgccaggctgaagcgaatctgcatgcgcagaccgccaatatcggcgtatcggtcgcgaacctgttccccagcctgtcgctcaccgggcagctgggcgtgcgtaacaccgatgccagctaccttgacgactggagcagccacttcttcagcgtcggcccggcgctgtcgatcccgatttttcagggcggacgtctggtttccagcgtgaaactggcgcgtgcgcagcaggcgagcgcgg

SEQ ID NO: 7964 - DNA, 439 bp, Zea mays
  Peptide Sequence Number=SeqID_13280
  Probeset Number=SeqID_22367
attcggctcgaggggcggcaatgatcttttttttggcattcgtcgtccggaccatcttctccaagatggggatgaagggcaagcccgtcagcgggatgaactactacgcctgcctctccatcatgtcgatggtgatcctactgcccttcaacctctacatggaggggcccaaggtgtgggcattgggctgtcctacagcactctccaagatcagttccaacttcttctggtgagtggcggcacagagcgtgttctaacacctgtacaaccagttgtcctacatgtccatggacaagatctcgccgatcaccttttccattgggaacaccatgtagcggatctgcgccatggccacgtccatgataatgttacagacacccctacagacgataaacctgctcagggacagcatggccatactgagcaccttgatctactc

SEQ ID NO: 7965 - DNA, 619 bp, Zea mays
  Peptide Sequence Number=SeqID_13281
  Probeset Number=SeqID_22368
cattgggtacctcgaggccggccggggtgagtctagcttgctatatcataccctgaattgacagacatgcaagaccgggccatttttgaagctgttatagctgtgaccaacctgggcgttcagagttccaccagataatggctcctcttcgtcgaaacaccacacgaactggtcaatcaagagactcttatccaccaaattgctgacaaagtgttcgccaatgtgaacaagactatcgactacgaaattgcaacaatgattgacatccccagggcagctctggtgtgtgatgacatagcgcaccacgttgaattcttctccttcggaacgaacgacgtgacgctcatgacctttgggatacagtacgcatgatgagcaaaagctcattcccgtctatcttgatcagggcatcctccaacatgaccccttcgaggtcctgaaccagaatgcagtgagcgagctgatgaagtctgctacagaaaggagccgcagagctacgactaacttgaaagtgttcatttgagtacaactcagagcagagccttcatctgtgaccttcttcgcaaaggctgtactggattacactatcttgctcccctgtcagggctacgagtgctac

SEQ ID NO: 7966 - DNA, 479 bp, Zea mays
  Peptide Sequence Number=SeqID_13282
  Probeset Number=SeqID_22369
ctttttccctactatcagcaacaacaatttcttccattcaaccaactatttacattgaaccctgttgttttttgcagcaacaactatttccattcagccaggtaggttttgcctattttcatcaacaacaactttttccatttaaccaattggccgcactgaaccccgctgtttatttgcagcagcaaatattactcccatttagccagctagttgcagcaagccgtgtttcctttttgacacagcaacagttgttgcctttttaccagcagtttggggctaaccccgcaacccttttacaactacaacaattgttgccctttgtccaacttgttttgacaaacccagcagcctcctaccaacaacacatcattgggggggcccttttttagattgctttttagttgtaattcaataataaagttttttggatgaggtatgtggccaaccaaaaataaaaagttacatttttagttttt

SEQ ID NO: 7967 - DNA, 792 bp, Zea mays
  misc_feature (20)..(21): n is a, c, g, or t
  misc_feature (26)..(26): n is a, c, g, or t
  misc_feature (29)..(30): n is a, c, g, or t
  misc_feature (32)..(32): n is a, c, g, or t
  misc_feature (35)..(37): n is a, c, g, or t
  misc_feature (40)..(40): n is a, c, g, or t
  misc_feature (42)..(45): n is a, c, g, or t
  misc_feature (50)..(51): n is a, c, g, or t
  misc_feature (53)..(54): n is a, c, g, or t
  misc_feature (57)..(57): n is a, c, g, or t
  misc_feature (66)..(66): n is a, c, g, or t
  misc_feature (69)..(69): n is a, c, g, or t
  misc_feature (76)..(76): n is a, c, g, or t
  misc_feature (94)..(94): n is a, c, g, or t
  misc_feature (98)..(98): n is a, c, g, or t
  misc_feature (101)..(101): n is a, c, g, or t
  misc_feature (106)..(106): n is a, c, g, or t
  misc_feature (108)..(108): n is a, c, g, or t
  misc_feature (119)..(119): n is a, c, g, or t
  misc_feature (124)..(126): n is a, c, g, or t
  misc_feature (136)..(136): n is a, c, g, or t
  misc_feature (139)..(139): n is a, c, g, or t
  misc_feature (142)..(142): n is a, c, g, or t
  misc_feature (149)..(149): n is a, c, g, or t
  misc_feature (152)..(152): n is a, c, g, or t
  misc_feature (154)..(154): n is a, c, g, or t
  misc_feature (169)..(171): n is a, c, g, or t
  misc_feature (176)..(177): n is a, c, g, or t
  misc_feature (180)..(180): n is a, c, g, or t
  misc_feature (188)..(190): n is a, c, g, or t
  misc_feature (194)..(195): n is a, c, g, or t
  misc_feature (197)..(198): n is a, c, g, or t
  misc_feature (205)..(205): n is a, c, g, or t
  misc_feature (207)..(207): n is a, c, g, or t
  misc_feature (212)..(213): n is a, c, g, or t
  misc_feature (215)..(215): n is a, c, g, or t
  misc_feature (222)..(222): n is a, c, g, or t
  misc_feature (229)..(229): n is a, c, g, or t
  misc_feature (233)..(233): n is a, c, g, or t
  misc_feature (236)..(237): n is a, c, g, or t
  misc_feature (255)..(255): n is a, c, g, or t
  misc_feature (260)..(260): n is a, c, g, or t
  misc_feature (306)..(306): n is a, c, g, or t
  misc_feature (321)..(321): n is a, c, g, or t
  misc_feature (329)..(329): n is a, c, g, or t
  misc_feature (336)..(336): n is a, c, g, or t
  misc_feature (376)..(376): n is a, c, g, or t
  misc_feature (428)..(428): n is a, c, g, or t
  misc_feature (786)..(786): n is a, c, g, or t
  misc_feature (792)..(792): n is a, c, g, or t
  Peptide Sequence Number=SeqID_13283
  Probeset Number=SeqID_22370
aggaggaagggaagagatannttttnacnnanatnnnccncnnnnctccnntnnttnatataaaantanaaaacanaaatattattaaaaacanaatnaancaaananacacgaatagntaaannnaaagaaaaanaanaanctaaatnaancnaaaaatgagaaaagnnnagcanncgnaaaattannngccnncnnaagatanantaacnngnaaaagtnccccttntaanatnnaaggagagacgcggcganttganaacccgtatactgcgagcctttcaacagggccgcggcaagaagccngtcgagggtggcggntgctggtngccattnccgacgtgtcgcattacgtaagccgggcgaaccgctggangcgacgcctacgagcgcgcgacctcggtctacttcccgcgccgcgtcatccngatgctgccggagaagctgtccaacggcctgtgttcactgaacccctacgaggaccggctcagcatggtctgcgacatggtcgtcgcggccgacggcacggtcgcggcctaccagttctacccggccgtcatctgctcgcacgcacgcttcacctacaccgaggtcgcggccatcctggccaatacccacggccccgaggccgccaagcgccgcgagctggtgccgcatctgatgcatctgcacgaggtctaccgcgcgctgctggccgagcgccagcgccgcggcgccatcgacttcctgcagcccgggggatccactagttctagagcggccgccaccgcggggagtccagttttnacctan

SEQ ID NO: 7968 - DNA, 1561 bp, Zea mays
  misc_feature (1)..(1): n is a, c, g, or t
  misc_feature (67)..(67): n is a, c, g, or t
  misc_feature (98)..(98): n is a, c, g, or t
  misc_feature (796)..(796): n is a, c, g, or t
  misc_feature (1266)..(1266): n is a, c, g, or t
  misc_feature (1310)..(1310): n is a, c, g, or t
  misc_feature (1322)..(1322): n is a, c, g, or t
  misc_feature (1453)..(1453): n is a, c, g, or t
  misc_feature (1484)..(1484): n is a, c, g, or t
  misc_feature (1489)..(1489): n is a, c, g, or t
  misc_feature (1493)..(1493): n is a, c, g, or t
  misc_feature (1496)..(1496): n is a, c, g, or t
  misc_feature (1514)..(1515): n is a, c, g, or t
  misc_feature (1526)..(1527): n is a, c, g, or t
  misc_feature (1530)..(1532): n is a, c, g, or t
  misc_feature (1535)..(1549): n is a, c, g, or t
  misc_feature (1554)..(1561): n is a, c, g, or t
  Peptide Sequence Number=SeqID_13284
  Probeset Number=SeqID_22371
nggagggcagtgcagggacaggcgaaggagggggaccggagcagagggcatagagcaagcatatagnaggtgcaaggcggagattgaggaggcgcgangacccgggaggcaggagagacgaaggagcgatacatcacaggggagagagagaagaacgtgagacagaagacagaagtgcgggcggagaggagaggcggacgcgacaaagaaggacacgagacgagcagacggggaagagcgcgcagagagaagatgggaagaacgagcagaagaacgaagacgaaagacactaaaagggacgaacgacagagcagacaaaagacaggctagctcaaggccgacagcgcgagcgcagcgcggcgcgccgagagcgagaaagagagcgaaggagagcgggaggacagcgagagagggcagcgaacgcgaacgagcggcggccgcgcggcgggagaggcgcggacggcagaggagagcgacgagggagagaagaagagagagaggacgaggcgggaggggacgggagggagcggaggagcacacgagcgaccgccagagagaacagcgcaaggagcggcaagagaggcgagaaggagagagcagcaccgagacgagagagcgaggagcgagagaggaagacggagaagagcgaggcagtgcggcagaacgcgggcgagagagagagcgagagcagaacacgcgaggcagacgcacagagaccgaacgacgagacagacagaagagcacggcgagccgaagcgcggcggaggcggagaggaggaacgaggaacaagaggangcaagacagcagaagccagaggagccgcgggggagagcaaagaagaagagggaggagagagagcgaggagaaagaagagagagcgagaggagaggagaaagagagagaaagaacacagacagggacgagaggagagccagagagagaggagggcaaagaggcggcgaagaggagaggacacagacgaaaaacgagaagaaacggaagagcgagacgagacaagagagcagagaagcgagaagaaacggaagagagagcgacaacgagagaaagaaagacgaaagaaaagagagagagacagagaagaaaggaagagagaagagaggaaggggggggaggggagggaagggagaggaggaggagaagagagggggaaggagaggagaagaagagagagaagggaggagcggggcgtgaaaggggggattacagagaggcagagggggggagagggagagcgaggaggcggngggcgcgggggggcgagggggggagggggtggagggagggaggnggagtcgggggnggggagagaggggggaggggacgacagaacggaattggaggggggaaagcgcgagcgagcgaggcgagagaagagggagcaccaagaaaccagcgagaagaaggccacaaaacgacaaggaagagaatagnagaagagaacagaacataaaaaacaaaacantaaantaancanccccgcaaacaaacgacnnaaacccccctnnttnnnttnnnnnnnnnnnnnnnaaaannnnnnnn

SEQ ID NO: 7969 - DNA, 747 bp, Zea mays
  Probeset Number=SeqID_22372
ctcgaggccggccggggatgcgcctcccagctggcatcgccatcgacggcgtgccgccatagacggcctgacatccccccgcccccgcccccgcccccgccctattaatcccttcatcatcccattcccacaaacctcgcgcgcggcggacggagaaggaaggatggcgtcggagccggtggcgcgcgcggcggcgcaggaggtggcgcgctggggcgcgatgctccagaccggggtcagcctgcgctacatgatgtagttcggggcgcgcccctcggagcggaccctccttctcgccgcgcagttcctgcactaggagctccccatccgcatcgcgcgacgggcgctcgacctcgactcgctccccttcggcctctccaccttgcccgccatcctcaaggtgaaagattggtatgtggagtcattccgtgaaatccggacctttccatacgagaggaaccataatcatgagctcgccttcacccagatgatccaaatgacccggggacgacacactcatgcggagcctgcgattgcattgagtgtgctagcagctgacgaaggtcttgaccgctccaaatgagttcccccctgtgatccatgagatccctccgtttcgtgaccgcttctacgtgtccacgtttgtgatccggatgctgatacggcagccgtcgctttgcatggacctgatcctggatccggggcgctcgggcttatccctctttaatgtcccccatgacagttgct

SEQ ID NO: 7970 - DNA, 849 bp, Zea mays
  Peptide Sequence Number=SeqID_13285
  Probeset Number=SeqID_22373
ggggcgtaaacaatcctgacaatcctttcctgccgccatggcaaacggtgctacgcgaggcggcccaggccggttaccgcagcattgaactcgggccgtggcgctatctgccgaccgatgccgccgaactgcgccagcagctggaagcgcatcagctgtcgctggtggccggcaccatttttgatgatttggtcagcgaggcgaatttcccggcgatggttgagctgacgcacaacatctgccgcaacctgtcgcaggtgccgtgcgcggcacgcacgcacggtgataaccggcccgcgccctatctggtgattatcgatttcggcaacccgcagcgggcgcaatttgctggtcagacagagaaagcgccgcgcctggcacccgcagactggcagcgcatgatgcagcacatcactcagctcagtcacatcgcctggcacgactacggcgtgcgaccggtgattcatcctcatgccggtggctgcattgagtttgctgatgaactggagcagctggtacaggacatcccgcatgaggtcgccggactgtgtctcgataccggccatcttttttattccggcatggatccgcagacctggctgcaacgctactggtcgcgcatcgactatctgcatttcaaagacattaatgcggccgtctggcgcgatgtgattgcgcgcggcgtcgactttttcactgcctgtgccgagggcgtgatgtgcccgcttggccagggcgcgattgattacccggagctgcgggcgtttctcgctgaacgtcacaatcagggctggatcaccatcgagcaggagcgcgatccgcgcaatgccgccaccagtctgcaggtcc

SEQ ID NO: 7971 - DNA, 475 bp, Zea mays
  Peptide Sequence Number=SeqID_13286
  Probeset Number=SeqID_22374
cgcgagtgcatcccgtgcaagaacaacgttgagcagttctgccacaagaagatgtggtcatacaccgacgtctacactgatggacggcacacgcagggtggattcgcctccaccatggtcgtcgaccagaagtttgtggcgaagataccggcgggtctggctccggagcaagcggcgccgctgctgtgcgctggcgtgccggtgttcatcccgcggaagcactcggataaggcgacagcggcccttcgtggcggcatcctgggcctcggcggcgtggtccacatgggcgtgaaggtagccaagcccatggcccaccgcgtcacggtgatcagctggtcgtacaagaagcgcgcggaggcaatggtcctcctcggcgcgggcgcgtacctagtgagctcggaccgcgcgtccatggcggcggccgctggctcgatggagtacatcctcgactcggtgtccgtgcacctcccgtcgg

SEQ ID NO: 7972 - DNA, 373 bp, Zea mays
  Peptide Sequence Number=SeqID_13287
  Probeset Number=SeqID_22375
atgaacgccaccttggctgcactgttgcggcagtgcgttctcgtgttctttgatgaaattttagtctacattgcctcatttgaggagcatttgcaacatattcgggaagtgatgcaactattgctcaaagatcactggaaggttaagtggtccaaatgcacttttgccaaaacagaacttgcttacttggggcatatcatctctgctcatggtgtggcaaccgatccaggaaagatcaaagcagttactaattggaagtctccttctttcatcaaagaacttcgtagcttcttggggttagctggctactatcgacgctttgttcgtcacttcggcattattgctaagccattgaccacttcactcaaaaaag

SEQ ID NO: 7973 - DNA, 873 bp, Zea mays
  Peptide Sequence Number=SeqID_13288
  Probeset Number=SeqID_22376
ggagatcagcagctggcgcttgccgctggcggtggaactgagcgacggccaggtcggcgtcatcaccagctttgatggcgatgacacggtgcgcgtgcacctggccggcgatgaacaaccggcgccgatcgcgctgaacacgctgctgccgcagatccgctacgccgcggcactgcgtccggtgacggccgccaaagatagccgtgtcgatcgctatctcgccacggtcaggcccgactggctgcgccgtctggtgctgcacgacatgcgtccttacggctacgtgatgctgggatcgttcctgatcaacctgctggcgctggtcggcatcatcttctcgatgcaggtgtacgatcgggtgattccggcgcagtcgtaccccacgctgtacgtgctgtatatcggggtgatcctctcggtggtgttcacctatattctgcgcgtcggtcgcgatcacgtcaccgatctgctcggcaagcgcgccgatatgcgcgtctccgatcgcgtgttcggccacgcgctgcggctgcgtaacagtgcggtgccgcgatcgaccggtacctttatctcgcagctgcgcgagctggaagcggtgcgcgaaatggtgacgtcgaccacggtgacggcgatcgtcgatatgccgttcttcctgctgtttatgctggtgatggcgatcatcgcgccgcagctggcgtggatcgcgccggtggcggtgctgctgatgatcctgcccggcgtgctgagccagaaaaaactggcgaagctggcgcagcaaaacctgaaagagtcgacgctgcgcaacgcggtgctggtggagagcgtgcaggggctggaagatatcaagctgatgcaggcggaggaccgctttctgca

SEQ ID NO: 7974 - DNA, 498 bp, Zea mays
  Peptide Sequence Number=SeqID_13289
  Probeset Number=SeqID_22377
caagtagttttggcaaacctttttccttactatcagcaacaacatttttttcctttcaaccacctatttcccttgaaccctgttgtttatttgcagcaacaactattcccattcagccaggtaggttttgcctacttttatcaacaaaaattttttccatttaaccaattggccgccttgaaccccgctgtttttttgcagcagcaaatttttctcccttttagccagctagttgcagcaaaccgtgtttcttttttgacacagcaacagttgttgcctttttaccagcagtttggggctaaccccgcaaccctttttcaattacaacaattgttgccctttgtccaacttgttttgacaaacccagcagcctcctaccaacaacacatcattgggggggccctcttttagattgcttattagttgtaattcaaaaaaaaagttttttggatgatgtatggggccccccaaaaataaaaagttccatttccagatttt

SEQ ID NO: 7975 - DNA, 373 bp, Zea mays
  misc_feature (28)..(28): n is a, c, g, or t
  Peptide Sequence Number=SeqID_13290
  Probeset Number=SeqID_22378
cccatcttggtccccatccgcggcccgnccggggaggccttgaccttgtttggggggcatggacccctgcggcggcggcgagctgttcgaccggatcgtgcggaggggccactacaccgagaggaaggccgccgagctcgcccgcgtcatcgacggcgtcgcggaggcctgccactacatgggcgtcatgcaccgggacctcaagcccgagaacagcctattcagtgaccactcggaggaggcccctctcaagaccatggactggggactctccatctcctttcgccccggccaaatcttcaccgacgacgtgagcagccgctactacgtaggccccgaggtactgaaaaagagatacaggccacaggcggac

SEQ ID NO: 7976 - DNA, 649 bp, Zea mays
  Peptide Sequence Number=SeqID_13291
  Probeset Number=SeqID_22379
tgcaggtgtggcgaccggtggcggacggcaggaaatgaaggcgcccggcgatcgtaagcagaacctgcacttttactacggcgatgcgtatggccatccagctaccagactcatcggcggaatggtgccggggtattcctgtgacagtgccgccacgccttttatgccgtacttcacaagcagcctcgatgcgcttgcctggcgcaccggcgtaccggaatcgctctacccggaggcgttaatcccgggacagcgtgagattggcagcacggccagcggcaacatgtgggggaatgtctacccccgcagcggctttgtcactcagaccgacagctacaagtcggcggccgttgtggtgcagcgcgtggctgacattatcacccgccagggacagctgcatgtctacagcccactcacagggcagcgttcgccgggctactggccacccgaccccgttcaggaaaataccggcacaaaaaatcacaaatggcagcgtctctctccccagctctcgcagagctgcgcggtgttcccagacaccggcgggcagatagctgaaaacggcaactatgcctgggcgctgtggcagccctacagctgctgcaaacgacgtggccagaccttcctttacagcaccgatttctcctga

SEQ ID NO: 7977 - DNA, 693 bp, Zea mays
  Peptide Sequence Number=SeqID_13292
  Probeset Number=SeqID_22380
ccggccggggcttcttccgcagagatggcgagaactctctctatcgttctatacccgagcaccagccgtggcgctgagcgaccatggatgtcggacagaacgagaggatctccaagggcaaagaagggtggtcagaagaagaccgtggaccctttctcaaataaggattggaatgacatcacggcaccgacgaacgttcagtgcgcgcaacatcaccaacactctcatatccaggacacaggtaccaccgattgcgtctgaggggctgaagcacagagcctttgaggcttgcctaactgatcttcagggcgacaaggatcaggcttacaggaaaatcaggctccgtgctgaatatgtgcagggcacgaatgtgatcacaaacttttggagaatgaattttaccactgatgaactgatatctctattgatgaagagccatacgttaatcttagcccctgttgatgatgagacaaccgacgactacatgatgcgattgttctgcatcggcttcgcgaataggcgcccagaccaggtcgagagaacctgctatgctcatggatcccagatccgtcagatccgccggaagatgccttagattatgatcagccaggctactacatgtgacctgaaagaacttgtgacgaatatcattccagaagtgattggtaaagatattgagaagtctacctccag

SEQ ID NO: 7978 - DNA, 514 bp, Zea mays
  Peptide Sequence Number=SeqID_13293
  Probeset Number=SeqID_22381
tatgacggaacctgcgcgcgctccgcaagctcggatcctgtattacgggcgccccccacgcgttcgggtaccttctcgccatatggaaagcaagtaggcctttaaacagtggagaagggggggagaccctgacgcgagagctgtctgttctttacagccgcttaaatggcatggtgttgggaggaatccttctaatgcatgatctgcacaatttcttacgcccacttgtactcctgatgcactcccttagggtacctcaaagtgtcacacatgtcatcaaaggctactagaaaacctctgcacccgcaatatattttatgcatgacagttacaccgcttgctattccattgaatatatgtggctgccctaggaattccatgcgtatcaccccctgaaagagatgggccatatctgttacaggattcatgggtctccaagcagcacagctcctgatccagcactatcttgagtctcactgctttatccctcgccagatactgcctgacaaatact

SEQ ID NO: 7979 - DNA, 641 bp, Zea mays
  misc_feature (117)..(117): n is a, c, g, or t
  misc_feature (153)..(153): n is a, c, g, or t
  misc_feature (358)..(358): n is a, c, g, or t
  Peptide Sequence Number=SeqID_13294
  Probeset Number=SeqID_22382
gggaaggaggagcccctctgtggctstaagasgaggggtgcgccgcgggggcsgccctaagaaaggtgctgaytgctgaggytttytttggtctyttggcgggggasgacayckgcnagtatccagggtgtmattgaaagaaaagatggtttncttggagatgaatgacctaaagaagattgggcttggcytgaaaggttttggaatattyttttaatttttgggaattgttttyttttttgaaaaggggctaatggaaatgggaaatatttttttyctgtaaggtttgggtttgaaaattggtctgaaataaactatgaagttcttaacaaagcaaaagaattacaagggtactatntaatttggtgctggtttttttctggttctaattgggtggckgttttttggaatgctyttagaggcatatggctttattgtactcttcagtgggttytggccaacactttytgtgttyttgaagaggattyctataatgggctggattttcaaamaacratttgtgaaatggytycttgacggctaragaggaaaaggtgttcgggtctagaaasbytttgaaaaatatatgcytgcggtgyagmaacyagcagcctgtatttttttactacagtagaaacgga

SEQ ID NO: 7980 - DNA, 881 bp, Zea mays
  misc_feature (6)..(7): n is a, c, g, or t
  misc_feature (11)..(12): n is a, c, g, or t
  misc_feature (14)..(15): n is a, c, g, or t
  misc_feature (22)..(22): n is a, c, g, or t
  misc_feature (27)..(27): n is a, c, g, or t
  misc_feature (29)..(29): n is a, c, g, or t
  misc_feature (33)..(33): n is a, c, g, or t
  misc_feature (35)..(36): n is a, c, g, or t
  misc_feature (38)..(38): n is a, c, g, or t
  misc_feature (40)..(40): n is a, c, g, or t
  misc_feature (43)..(44): n is a, c, g, or t
  misc_feature (47)..(49): n is a, c, g, or t
  misc_feature (53)..(54): n is a, c, g, or t
  misc_feature (60)..(61): n is a, c, g, or t
  misc_feature (64)..(65): n is a, c, g, or t
  misc_feature (77)..(77): n is a, c, g, or t
  misc_feature (85)..(87): n is a, c, g, or t
  misc_feature (94)..(94): n is a, c, g, or t
  misc_feature (97)..(97): n is a, c, g, or t
  misc_feature (108)..(108): n is a, c, g, or t
  misc_feature (114)..(114): n is a, c, g, or t
  misc_feature (119)..(119): n is a, c, g, or t
  misc_feature (130)..(130): n is a, c, g, or t
  misc_feature (132)..(132): n is a, c, g, or t
  misc_feature (136)..(136): n is a, c, g, or t
  misc_feature (140)..(140): n is a, c, g, or t
  misc_feature (142)..(142): n is a, c, g, or t
  misc_feature (144)..(144): n is a, c, g, or t
  misc_feature (148)..(148): n is a, c, g, or t
  misc_feature (152)..(152): n is a, c, g, or t
  misc_feature (171)..(171): n is a, c, g, or t
  misc_feature (178)..(179): n is a, c, g, or t
  misc_feature (183)..(183): n is a, c, g, or t
  misc_feature (186)..(186): n is a, c, g, or t
  misc_feature (193)..(193): n is a, c, g, or t
  misc_feature (204)..(204): n is a, c, g, or t
  misc_feature (211)..(211): n is a, c, g, or t
  misc_feature (213)..(213): n is a, c, g, or t
  misc_feature (748)..(748): n is a, c, g, or t
  misc_feature (815)..(815): n is a, c, g, or t
  misc_feature (819)..(819): n is a, c, g, or t
  misc_feature (832)..(832): n is a, c, g, or t
  misc_feature (846)..(846): n is a, c, g, or t
  misc_feature (877)..(880): n is a, c, g, or t
  Peptide Sequence Number=SeqID_13295
  Probeset Number=SeqID_22383
aaagannaggnnannaaattanccccncntttnanntnancannacnnnaacnnccaccnntannaaaaaaaccttncttcgttnnnttttccnccnccccccccttnaatttnttcanaaggtaaactngnaaanatcncncngttnggtnagattgtccccaaacttcngcgcgtnntccnccnttccgtncggggattgtnggccttncngtccttccgcctttggttctgataaccgctacaatgttgggatgtgctgccatcggccctgtggtggatgacgccatcgtgtggtagaaacgttgagcgtgtatgcgaagaaggtttgccgccaaaagagctacccgtaagtcgatgggcagattcagggcgtctggtcggtatcgcgatggtactgtcggcggtattcgtaccgatggccttctttgcggttctactggtgctatctatcgtcagttctctattaccattgtttcagcaatggcgctgtcggtactggtggcgttgatcctgactccagctctttgtgccaccatgctgaaaccgattgccaaaggcgatcacggggaaggtaaaaaaggcttcttcggctggtttaaccgcatgttcgagaagagcacgcaccactacaccgacagcgtaggcggtattctgcgcagtacggggcgttacctggtgctgtatctgatcatcgtggtcggcatggcctatctgttcgtgcgtctgccaagctccttcttgccanatgaggaccagggcgtgtttatgaccatggttcagctgccagcaggtgcaacgcaggaaccctgcancccnggggatcccctangtttagaaccgccngccccagcggtgagtccagctttaacacatnnnnc

SEQ ID NO: 7981 - DNA, 2763 bp, Zea mays
  Peptide Sequence Number=SeqID_13296
  Probeset Number=SeqID_22384
atgcgccaggagagagaagagatatgccaggagctgcgtcgggaaagagaggagatacgccaggaaaggagggcgcaacagcaacagcagcaaataccactgccaccaccaccacctccacttccaccctgggacaagcaccgagaatttatgagccacaagcctcctaccttcgccagttcgccagatccactagatgctgatgattggctgaaatctattgagaagatgctcaacatcgcacaatgctctgatcgggagaaagttctttatgcttctggttgcctgactggtcctgctgctgactggtgggattcttacgttgctgcccacgatgttgttgataccattacttggacagagttcagtacacagttcagaaactaccacattcctgctggtttgatgaagatcaagaagaaggagtttctgtcattgaatcagattgggcactatgctaatgcttgtccggtggggaattatggtacaccagctcagaacaggcaaccgactcctggcaaggggtattctattgccacggttaatcaagtcagcgttgatgctaatcctgatggtgctgacatcgtacttgctgaggagtttgttggtgacaacatccgtgtggttagggattttccagatgtctttccagaggagttaccagggatgccaccagagagggaagttgagtttgttattgatctcttacttaggactgctcctatttctaaacgcccctacagaatgtccatgagaggtgctagggtgttctctaagattgacctcaggtcgggctaccatcaaatgaagattaggacatctgatatttccaagacggctttctcaacccgatatggtctatatgaattcacagtcatgtcatttggcttaaccaatgcaccagcttattttatgaatatgatgaataaggtgttcatggagtatcttgataaatttgtcgtagtattcatcgacgacattcttatctattccaagaatgatagtgagcatgaggtgcatttgcggatggtgctacagaagttacgggataatcagctctatgccaaatttaccaagtgtgatttctggcttgatgaagtacattttcttgggcatatcatctccaaaggaggaattgctgttgatccggctaaagtgatagcaataatggattggaagacaccaagtacagttttgaagatccgaagtttcttgggactcgcaggttattaccggcgattcattgaagggttctctaagattgctaagcctatgacctcattgttggagaagggcaaggagtttaagttgacagaaaaatgccaagagagtttcgatcagttgagatctaaattgatggctgctccagtactgattatgccagatctacagaagaattttgatgtatattgtgatgcaagtcgccaaggtctaggatgtgtgcttatgcaggaaggacacgtcattgcctacgcatctcgccaattgcggaaacatgagttaaactaccccacacatgacttagaactggaagcagtggtgcatgctctcaaggtttggagacactatattatgggaaccaagtgtcaaatctacactgatcacaagagcttgaaatacatttttactcagaaggatcttaaccttaggcaacgccgatggttggaactcatcaaggattatgacctagaaattcactataatctgggcaaggcgaatctggttgcggatgccttgagtcggaaggggcagttagcagaagattttgagaggctcaatctagggataattgctcatactgaaggaattaccatcgaattggaacctaccttagagcaagaaatacgaaaaggtcagatcggtgatgccaaaattcaagagatcaaggatctgataacggagggtagaggcccagatttcacggaagatgagcaaggcatgatatggttcaagaatcggatgtgtgttccggatatcgatagttttcgtgaaaccatattgaaggaggcacatgactcagtttattctatccaccctggtagtactaagatgtaccaagacttgaagcagaagtattggtggcatggactaaagaaggatgttgcttcacatgttgctctctgtgatgtttgccagagggtgaaagcggaaaatcaaagacctgctggtttactacacccgcttaagatacctgagtggaaatgggaagagattggcatggacttcattgttggattaccccgcacatctgttgggtatgactctatatgggtgattgtggataggctaactaaagtagcccactttattccagtgaagaccccatattcaggagccaagctagcagagttgtacatggcacggattactgatgggcagactgagaggaccaaccaagtactagaggttatgttaagagcttgtgctcttaaacatggtggaagttgggataagagtttgccttatgcggagttctcttacaatagtagctaccaggctagtttgaagatgtcaccgtttgaggctttgtatggcagaaagtgccggactccactatattgggatcaaatgggtgaaaggcagttatttgggcctgaaattatagaagaggctgaagaacaagtccagcaaataagggaaaatctgaggactgctcagtcaagactaaaacagcgtaaacccaaacagggcctaaaattacggcgtgaaaatcgcgtgcagccgatcgtgcgcgggtcctggctcgggccgattctagcgtaa

SEQ ID NO: 7982 - DNA, 591 bp, Zea mays
  Peptide Sequence Number=SeqID_13297
  Probeset Number=SeqID_22385
caggggaagagacgccatggcccccgcgctccccgccctgctctgccttgggctgagtgtgggcctgaggacccaggtgcaggccgggaccctccccaagcccaccatctgggctgagccgggctctgtgatctcctgggggagccccgtgaccatctggtgtcagggtcccccgggggcccaggagttccatctggataaagagggaaaccgagttttctgggacagagagaaacccccgggtcccaggaacaaggccaggttctccatccactacatggggcaggaccacgcagggagctatcagtgctactacagaacccgcactggctggtcagagcgcagtgaccccctgcagctggtggtgacaagaccctacgtcaaacccagcctctcagccctgccgagccctgtagtgatgtcgggagggaatgtgaccctccagtgtggctcccatcagggatttaacagattccttctgaccaaggaaggagaagacaagtcctctcgggccctggatggacagcaaatgctcgacgggcagacccaggccctgttccccgtgggccccgtgacccccgggcatgggtg

SEQ ID NO: 7983 - DNA, 516 bp, Zea mays
  Peptide Sequence Number=SeqID_13298
  Probeset Number=SeqID_22386
tcagtccttattagccccaaattgctcatttagagagcatcaaggggccccgggcaataccacattcccacttagtgtgtggagatcctctacccaggctgggacttctggggtatacgaagacccaggcccctggaggagctggtccagggaccgaactccccgtgtgctccccacagcagagcatgactgtcctcctgtcgctgctgctgggcttcaacctgggctgcaccgcatcatgtggttttgtggcacacgtggaaagcacctgtgtgttggacgatgatggggatcctaaagacttctcgtattgcatctccttcaacaaggatttgctgacctgctgggatcccctgcaagccagtatgattcctcttgaatttggggtgctgaacggcttggcccggtacctctcacagttcctcaacaataatagttacctgatccagcgcttgtccaatgggctgcagaactgtgccgcgcacacccatcccttctggagctctctgacccaca

SEQ ID NO: 7984 - DNA, 469 bp, Zea mays
  Peptide Sequence Number=SeqID_13299
  Probeset Number=SeqID_22387
gtcccccggagacggccacaagtgtgcctgtcccaccaacttctacctgggcggcgatgggcgcaactgtgtgtccaactgcacggccagccagtttgtgtgcaagaacgacaagtgcatccccttctggtggaagtgtgacacggaggacgactgcggggaccactcggacgagcccccggactgtcctgaattcaagtgccgcccaggacagttccaatgctcaacgggcatctgcacgaaccccgccttcatctgtgacggggacaacgactgccaggacaacagtgatgaggccaactgcgacatccacgtctgcttgcccagtcagttcaagtgcaccaacaccaaccgctgtatccccggcatcttccgctgcaacggacaggacaactgcggagatggcgaggacgagagggactgccccgaggtgacctgtgcccccacccagtcccagtgttccatcacc

SEQ ID NO: 7985 - DNA, 364 bp, Zea mays
  Peptide Sequence Number=SeqID_13300
  Probeset Number=SeqID_22388
tgggaggctgaccgggtgatggagtggctcagaactcaggaaatggggcctcatgtatcctgtgatgaagtacacaccataccaaccaagatgttccgacgggtgctcaccattgtgcatcgcgcactgcaagctgggtttgaccgcaaccctcgcccgggaagatgacaaaatcgtcaacttaaactttctaattgggccgaaactctatgaagccaactggatggaactacagaacactggctacatcgccaaagtccagtgtgctgaggtttggtgcccaatgtctcctgagttttaccgggagtatgtggcaatcaaaaccaataaacggatcttgctgtacaccatgaatcccaacaaa

SEQ ID NO: 7986 - DNA, 571 bp, Zea mays
  Peptide Sequence Number=SeqID_13301
  Probeset Number=SeqID_22389
tgcagatacacagagcaagggcaggaagagatctttcctcccatcttcataccctttcctgctgggaagagcaaagcatgagagcactgaatcctcaggccactgtcctcataagctcttaccagctgaaataaggcagtgcttccctgttgccccagcttgcacttggctcaccctaatggtgtgtatttggctgaaggttggccactgtggtgtccctccaggtgcaccagctgtatgaaaccatacagcgctggagccccatcgccgcctcccttcctgagctggtacagagacttgtcaccatcaagcagctgcatgaacaagccatgcagtttggtcagcttctgacacacttggataccacgcagcaaatgattgcttggtccctcaaggacaatgccaccctcttgactcaggtgcagacgacgatgtgtgaaaacctgtccacaattgaggggaactttgccaacattgatgaaaggatgaagaaactgggaaagtgagcacctttgggtgatggaggacaggggtaatccctacccctttgaactccattaataccttacac

SEQ ID NO: 7987 - DNA, 336 bp, Zea mays
  Peptide Sequence Number=SeqID_13302
  Probeset Number=SeqID_22390
tgctgagctggccggactacctcatgagagtggctcccaccgcactggccacagcgctggatgtgggcttgtgcaactggagcttcctctacatcaccgtctcgctgtacacgatgaccaagtcctcagccgtcctcttcatcctcatcttctctctgatcttcaagctggaggagctgcgcgcggcgctagtcttggtggtcctgctcatcgccgggggcctcttcatgttcacctacaagtcgacgcaggtcaacatcgagggcttcaccttggtgctggggccatggcagatagctggtgtgctgggtgggcgccaggccatcctctggcctg

SEQ ID NO: 7988 - DNA, 295 bp, Zea mays
  Peptide Sequence Number=SeqID_13303
  Probeset Number=SeqID_22391
gatcctctttagtcgacctgcaggtaccttcatgagtttcaatctggccaacatgagcttcgaggaacgggcgcagatcgaggcagataaggcccggctgttcgagctgtggcagaacaacctgggcaaggccaagggcgaagccgcgcggctgatcgccgaaaagccacggcgcaaaggcaaatgggccgagtgggtgcgcgccgagctggatggcatgtcgccgcccgaatacgccagcatggtgcgcagcgaagtcaacaagctgatggccgcagccagcgccaaccgctga

SEQ ID NO: 7989 - DNA, 762 bp, Zea mays
  Peptide Sequence Number=SeqID_13304
  Probeset Number=SeqID_22392
aatcctctgattccgagcagggtggtggcattgatcccaccactgcgcatggcggatcagttcgatggattccgccaacaatgtcatcattgaggacgaggaacaggccctgaaccccggactggtggctctgcttagggttgcaagcttcctgctgctcttctttgtgggcaactatgcgctgcatgtgtatgcgcagaagacgctcccgccaaagaagaacaagccggtgtcgaagaagaagctgaagagggaaaagctgaagcagggggtctctgccccgggagagtaaacggccatgctgccgatcctcccggcccgagctcctattcacgtgattattaaagaccaaaatttatatatatatcccagctggaggtgtagtgctggagcaactttcccccggccacgctctccccctaatcgcacctctgcctcgcacactccgacaccctcctctccccgccccgcccctcctccccccccccccgcctcccccgcccccccaccccccccccccgcccccaccccccccccccctccccccccctcccccccccccgcccccccacccgccccccccaccaccccccactgcgcctccccccccccctcgccccccccccccccaccccctcccgcccccccacccctcccccgcgcccccccgcacccctcccccccccccgcctccgtccccccgcctgaccccgcccccccgccctccccccaccccccgcccccccgccccgcgcccccccc

SEQ ID NO: 7990 - DNA, 695 bp, Zea mays
  Peptide Sequence Number=SeqID_13305
  Probeset Number=SeqID_22393
gctcatatttactagttcttcatctaacaacaattaatgccaccgagggtagcgtgactcctacctctgcccatggctgctatcgtcgtggctccgtgcacggtgcacaactccacgcatgactacgtagcatccgcatgacgtggcacgcgccgacgtgcgagtacggccggtgtactgggaggacaccgtggatgcgtacgtgcagagctacgtagagctacggcagggagactgccatctgatccgctccggagatccctacgaagagaacctcttctgaggatccgccggttgcgactgtgtcggcgtccgacgccgtgtgctcctgagtgtccgagaactagtactacgatcactactccaacagctgcgcacaggtatagttgtgcggccactacacacacttggtgtgacgcgattccaccgccatcgtttgctgccgtgtttgctgcgacaactgctctggcgtcttcatcatctgcagctacaacccgccgggcaacgtcgtctatgagagcccctactagactgccatgcatactacaattatatatatatgacgcttaatattaatttcaatatggatgcatattataaatagtgttgacaactctgtgtatccttatattacgatgattatattgttgatgaacgtaataagtcaatataaacatgcatgtgatttgtgatgc

SEQ ID NO: 7991 - DNA, 688 bp, Zea mays
  misc_feature (1)..(1): n is a, c, g, or t
  misc_feature (8)..(8): n is a, c, g, or t
  misc_feature (12)..(12): n is a, c, g, or t
  misc_feature (18)..(18): n is a, c, g, or t
  misc_feature (30)..(30): n is a, c, g, or t
  misc_feature (37)..(37): n is a, c, g, or t
  misc_feature (47)..(47): n is a, c, g, or t
  misc_feature (74)..(74): n is a, c, g, or t
  misc_feature (113)..(113): n is a, c, g, or t
  misc_feature (125)..(125): n is a, c, g, or t
  misc_feature (144)..(144): n is a, c, g, or t
  misc_feature (583)..(583): n is a, c, g, or t
  misc_feature (606)..(606): n is a, c, g, or t
  misc_feature (610)..(610): n is a, c, g, or t
  misc_feature (613)..(613): n is a, c, g, or t
  misc_feature (629)..(629): n is a, c, g, or t
  misc_feature (647)..(647): n is a, c, g, or t
  misc_feature (654)..(654): n is a, c, g, or t
  Peptide Sequence Number=SeqID_13306
  Probeset Number=SeqID_22394
ncccgccncatngcatanttaaagtatcanactgtcncgattggccngcacgcatccgattttgccggccgtcntgatgtggttgacgcaacgggtacgcggttgccggcgcngtcttcccgggntccgacacgctcggccagntcaaatacatcatgtgacaggctatgattattcctggttcatcctgacccaggccatcatcaagaaggaatttgcgctgtcgggctccgagcagaatccggaccttacgggaaaaagctggcgcatgaccttgcgccgcgccaccaacaagggcgcgccggcgccggtggaggcgttcaaaagccatggtgtcgacttcatcgtgcgcgacaagatcgcggacctcgttgccgccatgaacaagctcgccggcaatgatctgctcaagctcgacgcgatcaagatgcagatcgaggcgcgtgaccgcgagatcgccaacccttacgtgaaggatgcgcaggtgatgaacatccacaacgcgcggcgctatatcggcgacagactgatccgcaccgcctcgccgcaccgcatcctcgatcccgcacatggcccgctgatngcggtcaagctcaacatcctcanccgnaanacgctcggcggcttcntgcagcccgggggatccnctagttntagagcggccgccaccgcggtggagtccagcgtt

SEQ ID NO: 7992 - DNA, 624 bp, Zea mays
  misc_feature (583)..(583): n is a, c, g, or t
  misc_feature (588)..(588): n is a, c, g, or t
  misc_feature (591)..(591): n is a, c, g, or t
  misc_feature (594)..(594): n is a, c, g, or t
  misc_feature (597)..(597): n is a, c, g, or t
  misc_feature (599)..(600): n is a, c, g, or t
  misc_feature (603)..(605): n is a, c, g, or t
  misc_feature (607)..(614): n is a, c, g, or t
  misc_feature (616)..(616): n is a, c, g, or t
  misc_feature (622)..(623): n is a, c, g, or t
  Peptide Sequence Number=SeqID_13307
  Probeset Number=SeqID_22395
catcaaccagctgttccagggccccgacctggtgggcgcctggtcgctgaagatccgcccgactgccaaaggcctggccttcaacaacctcaacctcggcctcaagggcatgcagcttaatggtgccggcggttgggaaggcgcgcccggcgccagcagcagctggtacaagggccgcctggacggcaagaacattgccgacgtgctcaagggctggggttttgcgccgaccgtgaccagcgaagacttccacctggatgtggatggccgttggccgggttcgccggcctgggttggccccaagcgtttctccggtagcctggatgcgtcattccgtaaaggccagtttgtcgaagtggaaggtggcgcccaggccttgcgggtgtttggtttgctcaacttcaattcgatcggtcgccgtttgcgcctggacttctcggacctgctcggcaagggcttgagttatgaccgggtcaaaggcttgctggccgccagtgatggggtgttcgtcacccgtgaacccatcaccatgaccggcccgtccaccaacctcgtacctgcagcccgggggatccactagttntagancgnccnccncnncgnnnannnnnnnntnactctnnc

SEQ ID NO: 7993 - DNA, 494 bp, Zea mays
  Peptide Sequence Number=SeqID_13308
  Probeset Number=SeqID_22396
ttaaaacaggatctggagaaccctggggtccatttgtgtatcatgaaattttgataggatatcttgaatatggtaaactgcggggattcccaagttgttacataggggctggtccccctttgaagggggaaggattacatcttatattgccatcctgagattcaaaagactccgaaatttgataaacggggtgagtgggatctatttatgcttgggaaagcttttaaggaggaaatggttgttgagctcccaaatttaaaggcccgttttttcctttctatgggggaaggcaaggttaaggtgactgcttttcgcttgccatatttcgatggagattattggccaggagctgcaaaaaatatgatcaatcaactccgccaaaaaaaaaacgcccgcaaactccagaaaaagggtaaacccaaaaaaaaaaaaaaaactaaaaaaaaaaaaaaaaaaaaaaaaaaaaaaaaaaaaaaaaaaaacccaaagggcgt

SEQ ID NO: 7994 - DNA, 568 bp, Zea mays
  Peptide Sequence Number=SeqID_13309
  Probeset Number=SeqID_22397
ccacgcgtccggttcaggggtgcttggatgagcgccgctcagcccctggagccgggcgccattatcatggaggcgcaagagctcaagctggatatcttccaagcactccggaaaatggatggcggaagtcaattacctggggcacttatcccacacctattctctgaacaactcattaggctactgctctgaaggactagcagaagattcttgtgtacgagtacattcccaaagggaacttggagcatgatattttaaggaggagctccaacttccaaacgctcccatggcaacttacgcatgatagtaggtctcaaggatgacagatgtttgcttttctgcacggagaccactccaaagttatctaccgagatttcaagacctccaatattcttatcgactcggaggacaacgcaaaactgtgtgatttcagtttggcaaaggacggtccaagcggtgataagagccatgtttgtactatggtcatggggacacaaggatacactgcccctgaatatcttgccacagggcattttacagcaaagagcgatgtgtacagctacagtgt

SEQ ID NO: 7995 - DNA, 372 bp, Zea mays
  Peptide Sequence Number=SeqID_13310
  Probeset Number=SeqID_22398
aacacgggcgttatggcgctcgacctcgcgcgctggcgccgggcgggatacacggcgcagatcgaggaggggatggagctgcagatgcgggagcgcatgtacgagctgggctcgctgccgaccttgctgctcgtcttcgacggcaggatcagtgtccgtcgaccaccgatggaaccagcacggactgggtggggacaactaccgcggtctctgccgtggtctgcacgccgctgccgttagcctgctgcactggagcggtatggggaagccctgggaccgcctggacgccagaagagtcgagcccgttcgacggcgtgtgggccaagtacgacctgctgcggccgggcgacgacatctagacctcgtgaacac

SEQ ID NO: 7996 - DNA, 623 bp, Zea mays
  misc_feature (2)..(3): n is a, c, g, or t
  misc_feature (6)..(6): n is a, c, g, or t
  misc_feature (40)..(40): n is a, c, g, or t
  misc_feature (42)..(42): n is a, c, g, or t
  misc_feature (519)..(519): n is a, c, g, or t
  misc_feature (525)..(525): n is a, c, g, or t
  misc_feature (532)..(532): n is a, c, g, or t
  misc_feature (534)..(534): n is a, c, g, or t
  misc_feature (537)..(538): n is a, c, g, or t
  misc_feature (543)..(543): n is a, c, g, or t
  misc_feature (549)..(549): n is a, c, g, or t
  misc_feature (551)..(551): n is a, c, g, or t
  misc_feature (553)..(553): n is a, c, g, or t
  misc_feature (555)..(555): n is a, c, g, or t
  misc_feature (559)..(560): n is a, c, g, or t
  misc_feature (563)..(563): n is a, c, g, or t
  misc_feature (567)..(567): n is a, c, g, or t
  misc_feature (569)..(591): n is a, c, g, or t
  misc_feature (593)..(623): n is a, c, g, or t
  Peptide Sequence Number=SeqID_13311
  Probeset Number=SeqID_22399
gnnagngttaaaagctgactccaccgcggtggcggccgcncncacaagggcctgccggaagaggtcggtacggaggtcgcgatcttcacccgcgtcggcgtcacccgcatcatgcgctatgcgttccagctcgcgcagtcgcgtccgcgcaagttcctgactgtcgtgaccaagtcgaacgcgcagcgccacggcatggtgatgtgggacgagattgccgccgaagtcgcgaccgaattccccgacgtgacctgggacaagatgctggtcgatgccatgaccgtgcgcatgacgctgcatccgaagagcctcgacaccatcgttgcgaccaatctgcacgccgacatcctctccgacctcgccggcgcgcttgccggaagcctcggcgtggcgccgaccagcaacatcgatccgcagcgccgcttcccctcgatgttcgagccgatccacggctcggccttcgacatcaccggcaagggcatcgccaacccgattgcgacgttctggaccggcgcgcanatgctngagcatntnggnnagaangacacngntngncggnngangaangnnnnnnnnnnnnnnnnnnnnnnngnnnnnnnnnnnnnnnnnnnnnnnnnnnnnnn

SEQ ID NO: 7997 - DNA, 750 bp, Zea mays
  Peptide Sequence Number=SeqID_13312
  Probeset Number=SeqID_22400
atgcgttattttctcgcggtagccgattgcggttcgctcagcgcggccagcgcccagctgtttgtggcggtctctgccatcagccgtcaaattcagcggctggagcagcagctgggcgtgacgctgtttgcccgtcatgcgcgcgggatggtgctgaccgaggccggcgagatttttgcccatcacgtgcgtaaaaatctgctggatatggagtatgcgctggcagagattaaaggcctgaaggcggtgcggcgcacgctgattcgtgtcgcctgcaccgacgggctggcgtttaccctgctgccccggctgattgccgcctttcgccgcgatcatcccggcgtgctgtttgacgtccgggtggcaagcgctcagggcgtggctgaactgctgcgcagcggcgagtgcgacgtggcattacaattcagcctgcacgcggaacgtgcggttgaggtggtgggctcatggccggcgccggtgttgctggtgatgcatgacagccatccgctggcgggcgtgccgcaggtggcgctggccgatctcagccactttccgctggcgctaccgcagcaaaacaccacggtacgccagctgtttgagctggccagccacatgagtgcccacctgattgaaccggtgctgacctgcgacaatttctccaccctgttccattttttactgcgcacgccgcaggcggtgaccatttgcagcagttttaccctggcggaagaggcccagcagcagggtctg

SEQ ID NO: 7998 - DNA, 571 bp, Zea mays
  misc_feature (146)..(146): n is a, c, g, or t
  misc_feature (157)..(158): n is a, c, g, or t
  misc_feature (235)..(235): n is a, c, g, or t
  misc_feature (403)..(403): n is a, c, g, or t
  misc_feature (434)..(435): n is a, c, g, or t
  misc_feature (473)..(478): n is a, c, g, or t
  misc_feature (509)..(511): n is a, c, g, or t
  misc_feature (529)..(531): n is a, c, g, or t
  misc_feature (547)..(548): n is a, c, g, or t
  Peptide Sequence Number=SeqID_13313
  Probeset Number=SeqID_22401
ttccattcggaagaggaaccttataaagatcgtattgattcttatcaaaaaatgacaggattaacggaggctgttcaaacaggaacaggccaattaaacggtattcctgtagcaattgggattatggattttcagtttatggtttntagtatggganncgtagtaggtgagaaaattacccggttggtcgaatatgctaccaatgaacttttaccccttattctagtatgtgcgnccggaggagcacgtatgcaagaaggaagtctgagcttgatgcaaatggctaaaatatcttctgctttatatgatcatcaaataaatcaaaagttattctatgtatgaatccttacatctcctactactggtggggtgacagctagttttggcatgttgggcgatatcnttattgccgaaccaaatgcttacattgcatnngcgggtaaaagagtaattgaacaaacgttgaataaggnnnnnnctgaaggtccacaagcacttgaatatttatnnnataagggtttatttgatnnnatcgtaccacgtaatnntttaaagggggttctaagtgatt

SEQ ID NO: 7999 - DNA, 575 bp, Zea mays
  Peptide Sequence Number=SeqID_13314
  Probeset Number=SeqID_22402
acagcattcaggccgcggcacagagcgtgctggagcgctatccggccctgaacgtggtcatcaataatgctggcatcatgccgtttgacaacgcggcgggcgaactggatgacgcgcaggcggtgacgctgctcaacaccaacattctgggcccggtgcgcgtcagtgcagctttcatcgaacacctgaagcagcagccggacgcggtgctgattaacaacagctcggtgctggccttcctgccgctggcgaccaacgcgctttactcggccaccaaggccgcaattcactcctataccctgtcgcagcgcttcctgctgcgtgataccggcgtgcaggtcattgaaatttcaccgccgtgggtggataccgatctgatttacaaaagcggcgacccgcgcgccatgccactggacgccttcatcagcgagacgtttgaaaagctgggtaccgacaccatcgaagcgattgtcgaccgcgtgctgccggtgcgcgataacccgggcgcgaacgagcatacgctggtgaatcagttcaaccagtctgtagcggataacccgattcctgttcagtaa

SEQ ID NO: 8000 - DNA, 506 bp, Zea mays
  Peptide Sequence Number=SeqID_13315
  Probeset Number=SeqID_22403
aggtgaagattatagaggtaagctgtggcaagtcccttaccaagtggctttttgacaggaagaagagggcacttcataagaaagatgacgatgtccgtatgataattgaacttattcaggattatgaaatgcctactgtttgtaccactattaaggtatcaaaagatgggcattatatttttgcaactggaacataataacctcgagttcgatgttatgacacctaccaattatccttgaagtttgaaaggtgtttggattcagaagttgtcacctttgaaactttgtctgatgactattcaaagattggcttcctgcataatgatagatacgtcgaatttcattcacagtcaggtttctactacaaaaccagaataccgaagttcgggcgagacttctcttaccactacccgtcctgcgacttgtacttcgttggcgcaagctctgaagtttatagattaaacttggaacaaggacggtacctgaatcctctacagactgatgct

SEQ ID NO: 8001 - DNA, 358 bp, Zea mays
  Peptide Sequence Number=SeqID_13316
  Probeset Number=SeqID_22404
attgtgtcttcgacgttctccatgaccggccacctgatgacctgtgttgatgctcgtcatatggaagaagcacatcgtctacgtcctactgtactacgtggtgttcggtctcacggagatgatctacctctcgtacatcctgtccaagttcatacaaggcgggtaccttcccttctgattcaagcaggccctcatgactcttattgcgacccggcactacggccacatgaagcggtactggtactagctggaccacatcgtgcccaccaaccagattacggcgctgatagagaagaacgactttcggcggatccccggggtggggctcctgtacacggatctggtacagggcatcccc

SEQ ID NO: 8002 - DNA, 498 bp, Zea mays
  Peptide Sequence Number=SeqID_13317
  Probeset Number=SeqID_22405
ctgctctacaatctcagtggttatatgatgcatgtcagtatgatgttactaagctatgcaactcttttgtgtggatccttattatccgccgctcttctaatcattacattttgaaagaatttcaatttcttttcactatagaaaaatgctcttcttaaaacattattctttagtgagattgaatatttatatgcccaaagaagtgctttaaaaaacacctcttttcccgtatttacaaaatatttcgaatatcaattaactgaccgacggcattcttgtagctatcgcgtcattattctattttctactctgttaaccgagggtatactttgtgaagcggcatgggctaatgaggcatactgatactattgcatttgggatcctaaggaaactggcgcgtggactacctggaccatatttggctgataggtacttactccacgaacagcgaaacggaacgggacctggggcgggaccacgctcaggaccactcttggg

SEQ ID NO: 8003 - DNA, 565 bp, Zea mays
  Peptide Sequence Number=SeqID_13318
  Probeset Number=SeqID_22406
cgcctcccccgggaacggggcccacgccagtacggaaacatgctttccctctccatgccccactctggcacgggacgcgccctgcggtgggctgcgggcctcggagccgccgcgccgtcctacggaaacccacgcagcgacgtccaggaggccagagccgcggggtcccggagcccgccaggacctggcccagaagaagaggaaggggaggcctacgaggagccggacagtgaagagggctccgagttttacgagaacgactccaaccttgggcaggaccaactctcccaggatggcagcggctatgagaaccctgaggaagggagcttggatcctcaggatgaagactccttctctaacggagctgagtcttacgagaatgaagatgaagaactggcccctaccgtcaccaggacaacagacttgctgagcccccatggatcagcctgggaccccagcagagaggcagcctcccttgggtcccaatcctatgaggatatgagagggatcttgtatgcagctccccagctccgcttcgttcgagcccagcctggtgctaatcatg

SEQ ID NO: 8004 - DNA, 549 bp, Zea mays
  Peptide Sequence Number=SeqID_13319
  Probeset Number=SeqID_22407
gatagtctactaaggggttattatattaaactgttaagaagatactacacttgatcttagccagaaggtccagaagccataaggagttactatgaacacctgggaaaggaagctttgggtccaagacccaacaaaggttgttaacacaggttatgtcatttagaaaatactgcagccatgaaattaaaagacacttaccccttggaagaaaagttatgaccaacctagacagcatattgaaaagcagagacattattttgccaacaaaggtccgtctagtcaaggctatggttttcccagtagtcatgtatggatgtgagagttggactataaaaaagctgagtgccgaataattgatgcttttgaactgtggtgttggagaagactcttgagagtcccttggactgcaaggagatccatccagtccatcctaaaggagatcagtcctgggtgttcactggaaggactgacgtttaagctgaaactccaatactttagccacctgatgtgagagaactgactcatttgaaaagaccctgattctgggaa

SEQ ID NO: 8005 - DNA, 560 bp, Zea mays
  misc_feature (124)..(124): n is a, c, g, or t
  misc_feature (350)..(350): n is a, c, g, or t
  misc_feature (355)..(355): n is a, c, g, or t
  misc_feature (363)..(363): n is a, c, g, or t
  misc_feature (372)..(372): n is a, c, g, or t
  misc_feature (381)..(381): n is a, c, g, or t
  misc_feature (462)..(462): n is a, c, g, or t
  misc_feature (541)..(541): n is a, c, g, or t
  Peptide Sequence Number=SeqID_13320
  Probeset Number=SeqID_22408
ccgcggcggcgcggcgctggaggaaatcccgtggggtgaggctggcgctgagtatgtcgtggagtccaccggcgtcttcactgacaaggacaagggtgctgcacatctcaaggggggggccaanaagggggtgatctctgccccaagcaaagatgcgccggtgggggtggttggggtcaatgaggacaagtacacctcggatgtgaacattgtgtccaatgcgagctgcgccacaaactgccttgctccccttgctaaggtgattcatgacaacttcggcattgtggaggggttgatgacaactgtgcatgccatcactgcgacacagaaaactgtggacggaccctcanccaangactgganatgtggganggctgccanctttaacatcattcctagcagcaccggtgctgccaaggcggtggggaaaggtcttcctgatctgaatggggagctcactgngatgtgcttccgtgtgcctactgtgggtggctcgggtgtggacctcaccgtgagaatcgaaaagggggcctcctatgangatatcaagaaagctatta

SEQ ID NO: 8006 - DNA, 552 bp, Zea mays
  Peptide Sequence Number=SeqID_13321
  Probeset Number=SeqID_22409
tccattgagttggtgatgccatccaaccatctcatcttctgttgtgcccttctcctcctaagatctatttttaagataaacacctttcaaacgtagactgttgatgctcagtgtttgtggctagccgttaaagacagcatgcaggttttgtctgcaggcaggatgagtgctctgtcctgctgagcccctcctggcgcccctatggccgcagggctcagctgcattgccctcattcccttggcatccttgactcccgcacatctgagcctgcagaccaagcccgtggacccaactgtggatgggggcgcacaggtgcagcaggcggtcaacatcgagtgtgtgtctgacttcacggaggcgccggtcctcaacatccagttcaggtacgggggaacctttcagaatgtgtctgtgaagctgcctatcacactcaacaagtttttccagcccacggaaatggcttctcaggatttcttccagcgctggaagcagctgagcaacccccagcaggaggtgcagagcatcttcaaggccaagcacccgatggacaca

SEQ ID NO: 8007 - DNA, 568 bp, Zea mays
  Peptide Sequence Number=SeqID_13322
  Probeset Number=SeqID_22410
ggtgaagggttccgtgcctttgtgacagactgggacaaagtgacagccacggtggccgggctgacgctgctggctgttgggatctattccgccaagaacgccacgtccgtagcagggcggtacattgaggcccggctggggaagccgtccctggtgcgggagacatctcgcatcacggtgctggaggcgctgaggcaccccatacaggtcagcaggcgcctcctcagtaaacctcaggacgcgttggagggtgttgtcctcagccccagcctggaggctcgcgtgcgggacattgccatcgccacaaggaacaccaagaagaacaaaagtctgtgccgaaatgttctgatgtacgggccacccggtacgggcaaaacgctgtttgccaagaaactggcgctgcactccggtatggactacgccatcatgacgggcggggatgtggcccccatggggcgggacggcgtgacggccatgcacaaggtcttcgactgggccagcaccagccggcgaggcctcctgctcttcgtggacgaagcggacgcctttctcaggaagcgagcgactg

SEQ ID NO: 8008 - DNA, 595 bp, Zea mays
  Peptide Sequence Number=SeqID_13323
  Probeset Number=SeqID_22411
ctcgagggctcggcccgggaaaaaaaaaaaaaaaaaaaaaaaaaaaaaaaaaaaaaaaaaaaaaaaaaaaaaaaaaaaaaaaaaaaaaaaaaaaaaaaaaaaaaaaaaaggaaaacctgctttccttggttgccgtttcctcacaaagccactccaaacccccgtttccagaaccttttggaaactttccgcctcctcctttactcgttccgatggcgaaggaaccgatgcgcgtgctcgtcactggcgccgaagggcaaatgggatatgctcttgttcccatgattgctaggggagttatgcttggggcaaaccaccctgttattctgcacatgcttgatattccgccagcagctgaagcccttaatggggttaaaatggagttggttgatgctgcatttccttttctgaagggagtcgttgcaacaactgatgttgtggaagcgggcacttgccgtgaatgtggccgtcatggttgggggtatccccaggaaggaaggattggaaaggaaagatgttttgtttaaaaggtgttcaattaacaaaacccaagcatttgtttttgaagcccttgcggcccccaactgcaaggttt

SEQ ID NO: 8009 - DNA, 608 bp, Zea mays
  Peptide Sequence Number=SeqID_13324
  Probeset Number=SeqID_22412
agttcatcagccaggacagccctgaggatatcgtcacagtgcacatcgagggcagctccggggcactgtggcgcatcagcccgccaagccgggcacagatgaagcgggagctgtataacggcacggccgacatcaccctgcgcttcacctggaacttccagagggacctggccaagggcggcagcgtggagtacaccaacgagaagcacaccctggacctggcccctaacagcactgcccggcggcagctggccagcctgctggaaggcacctcggaccagtccgtggtcatcccccacctcttccccaagtacatccgtgcccccagtgggcctgaagccaaccccgtgaagcagctgcagcccaacgaggaggctgactatctcggcgtgcgtatccagctgcgcagggagcgtgtgggcacaggggcagctggcttcctcgagtggtgggtcattgagctgcaggactgccaggccaactgcaacctactgcccatggtcatcttcagtgacaaggtcagcccgcccagcctgggcttcctggccggctatggcatcatggggctgtacgtgtccatcgtgctggtcatcggcaagttcgtgcgc

SEQ ID NO: 8010 - DNA, 747 bp, Zea mays
  Peptide Sequence Number=SeqID_13325
  Probeset Number=SeqID_22413
ccaaaagcttgagccatggaatgctatcattgacgggtactgcaagcttggccatgttgatgtcgcaaggtctctgtttgatcaaatgggtgcccgcgacgtcatcacattcaattcgatgatcactggatacatccacagtggccggcttagagacgcattacagttgttcatgcagatgaggagacacggcatgcgtgctgacaattttaccgtggtgagccttctcactgcttgtgcgagcttaggtgcactgccacatggcagggctttgcacgcttcaatcgaacagaggatagtagaggaagatgtttaccttgggactgcacttttggacatgtacatgaaatgtgggagggtggatgaggcaaccgctgtgttccatcgcatgggcgaaagagatgtccacacttggactgccatgatcgcaggtcttgcgttcaatgggatgggtaagaatgctctggagtctttctgccagatgaagcgtgatggttttcagcccacgtcagttacctacattgctgttctgactgcgtgcagccactcaagtctgctcgacgaaggtcggctgcacttcaacgagatgagatcgttgcataaattacaccctcaggttgagcattatggctgcatgatagatttgctcgctcgcagcgggcttctggatgaagctatgcatcttgttcagaccatgccaatgcaaccaaatgccgtcatatggggatccatcatgagtgcctgcag

SEQ ID NO: 8011 - DNA, 520 bp, Zea mays
  Peptide Sequence Number=SeqID_13326
  Probeset Number=SeqID_22414
aacatgggcaacccgatcaaggacgagaagattgcgtccaaactggctgccgacgacaagaaaaagattgaggacgccattgacgcggccatcagctggttggaccccaaccagctccccgaggcggacgagttcgattccaaaatgaaggagctggagagcctttgcaaccccatcattgccaaaatgtaccagggcgcgggtgcccacatgggtggccccggcggcatggacgaggacgctccggctggaaacggtggccctggccccaagatcgaggaggtggcctaagcggattgtgtcagtttcgtgtgtctgctccagtggctggctggcccagtccctgctcgatttattgttgtcgtcccgggggtatccgcgttaaacccttttgttggtgaacaatattatcgtggcccgcgttttaagtaatacggtattttggttcggtttaaaaaaaaaaaaaaaaaaaaaaaaaaaaaaagaaaaaaaaaaaaaaaaaaactcgagggggggcccg

SEQ ID NO: 8012 - DNA, 818 bp, Zea mays
  Peptide Sequence Number=SeqID_13327
  Probeset Number=SeqID_22415
ctcgaggccggccgggagccgcctccttcccccttatactcgctggaggtcaccagaactcgtgccacccctcctcttccttgtgatctccgaatacccgtctcatattccaaggggcgtgccgtgtaatccccggatctccccacccaccatatatcctagtatccgcgcctcaaatgccctcgggaaacgcctccgtcgctataagtgggtggctgtcgcggtttgattcgcacggacgaattgtatcccgggcacgatgtgtctcagattttgatttgatcctgatcctgggaggcggtcctgtgttattgctgccagttaataagtcatgatatcttccgtgaggctctctcctgtgcctgcagccttctcaggttccagactacgctcaaaattaccgtcaattccatccatctccagtctcaaaccctccatatatgtggtctcctcgctgaaagcactctacctaacaccggtagatgggccgcggactgtcgatgattatagtgctcggagacagccacttgagttccgctgctctgcttctgcatgctgatgacaaggagtcagagtactcaggatggcgccagttcagccggtgaggcgcacagaggtgtgaatatcttgatctatttctgcacctgacgggagcttagatgcgatatttaacatttacaacaagaagggtctcaatgcattctcttacgcctggatcatctccacactctccctcgcctgcggctctggtatgatgcttatctcacgcgccaccggtcttgacgaggcccctaataccgacctgaacttctggaaag

SEQ ID NO: 8013 - DNA, 469 bp, Zea mays
  Peptide Sequence Number=SeqID_13328
  Probeset Number=SeqID_22416
accctagaagcctccaccctcctgcgcctccaccctcctcgccgcctcactccctctgaggtcgcagatccgtccggttagacgaagccgcccgcacccatggcctccggtgagctcgcctgcacctacgccgccctcatcctcagcgacgacggcatcgccatcaccgccgagaagatcgccaccatcgtgaaggcggccaacatcaaggtcgagtcctactggccggcgctcttcgctaagctcctggagaagcgcagtgttgaggatctaatcctctccgttggatctggtggttttggtgatgtctataaggcccagctcaaggatggaaaggttgttgcaatcaagaagcttatacatgtgagtggccagggtgaccgggagtttactgcagaaatggagaccattggtaggatcaaacaccgcaatcttgttccgctcctcggctactgcaagtgtggtgagg

SEQ ID NO: 8014 - DNA, 640 bp, Zea mays
  Peptide Sequence Number=SeqID_13329
  Probeset Number=SeqID_22417
tgcaggcgcagccgctggaaaaactcaacgccgccaatctgagccagattatgcgcgatctgcaaagccgtctgccgcagctgcatgggctgttttactatgatgagcagggccgctggatcgccacctccacgcgcagtgtgccagtgggcaccaacaactctgaccgtgaatatttccgctatcaccgcaacaacagccgtgacagtttgcacatcggcccggtgattcgcagccgcagcactggcgatctggttattccggtttccctgcgcgtcagcgatgccgcgcgtgatttcaaaggcatcctgttagccaccattaaagtggattatttccgccgtttttacagttactacgaactggggccgcgcgacgtgctggtactgatgctggcagacagcacggtgctttatgcccgtccgatgcccgacagctatatcggcaagagtctctccgccagccatctgttccagcagatgctggtgaaagccgatcgcggcagcggcgagtggaacgcggcgctggatggccaggtgcgcatcttcggcttcgccagctcagaacgctatccgctggtcgtcgcggcgggttatgacaagcgcaatctgtatctgcgctgggtgaaagggcgactgca

SEQ ID NO: 8015 - DNA, 559 bp, Zea mays
  Peptide Sequence Number=SeqID_13330
  Probeset Number=SeqID_22418
gcctgagatgttcctgccgctgttcttggccatgctgtggggcgggtcgcaggctctggactcattcaagctgcaggtgcaggagttcgtgatggtgcaagaaggcctgtgcatggtcgtgccctgctccatcttctaccccaccagcggtgctcttggaagtgcaaggcaccttacagaggcctgtgggccgggacagccgcagctcccctgccaactgtacctggctcatcctgggcaggaaggagcagacggtaacggtcaggttccaaaaactgcatctggcctgtggctcagagcgcttaaccctgcgctcccccatccagccgcagatctccctgtgcgaggcacctgccagccctctgcaactgcctggaggcaacgtcaccatcacctacagctatgtcggggccagagctcccatgggccagggcttcctgctctcttacagccaagattggctgatgtgcctgcaggaggagttccagtgcctgaaccaccgctgtgtgcccctgctccagcgctgtgatggggtcgacgcctgtggcgatggctctga

SEQ ID NO: 8016 - DNA, 592 bp, Zea mays
  Peptide Sequence Number=SeqID_13331
  Probeset Number=SeqID_22419
ccccccccccggggccgcccccgcgccccccccccctcctcccccccccctgccccccccccccgcccccgccccgcccccctcgcgccccccacacccccccccccccccaccaccgcgccccgccccccccatccagagaccaccctcccccccccccccccccccccccccccccccccgcccacccccgccccccacccccccccccccccccaccccccccccccccccccccacaaaagccttgggtcgcgctgggccccccccccggggcgcgcgcgcccccagggggccgggccccccccgcccggcgcgcccccccccgcccccctcgcccccccccgccacgccccccccccaccccaaatcccctgccctcccgcccctcacccccgcccccgacctagtcctactaatagcccatacatgtagttctcccattctctattttgttgtagttacataatactgctgtcgtttgggtgtagaataattccatataataatgtgatggagggagcctcatttgttcatatgcccgaccaggctttatatatttagatagatgatgtctgagcagagtttatat

SEQ ID NO: 8017 - DNA, 1069 bp, Zea mays
  Probeset Number=SeqID_22420
tcgggacccgcgtatacgtagagccgacctgcaggcgctggcaattcgcagtgtgatgacggccgcgcaggcgcgttatgccatggaattgtttttgctggtgctcgtcggcgatcgcttggatcgcaaaaagctggtggtaacgcacctgctgctgtcggtgctggccctgatcgcggcggggttagcagagagtatgctgtcgctgctggtggcgatgctgctggcggggctgatggcggtggtgacgcaaaccgtggtggcgtgggccgctatcctttcgggaccgtctcaccgagacaaggcggtaggcagtgtcaccagtggcatagtgatgggcatactgctggcgcggctggtctctggcatcatcgccgatatcgccggctggcgggcggtgtatatgacctcagccgcgctgatgctgctgattaccgtgctgctgatgaaagtgatacctgctgccggtccgcagaacacagccacttccgtggccgggctgctggggtctgtcccgcgtctttttgtcaccgagcctttgttgcgtcagcgtggcgcgctggctctgctgatttttgccgcattcagcatgttgtggagttccatggttttgccgctcacggccatgtcgctttcccatacgcaaacagggctgtttagtctggctgggatagccggagcgctggcggcttccagaagtggcgcctgggctgacaggggaaccgggcagcgcgccagcggatgcgcactggctttattaacgctctcgtggctcccgatcgccttcgcgcagacttctttattattgcttgttattggcatgatcatgctggatttcgccgtgcagacggtgcatgtcatcaaccagagcatgctgattgccggcaaacccgctatcaccagccggcttatcggtgcctatatgtgtttttatgcggcaggcagcgcgctgggcgctattactgccacccaactctatgcgcactggggatggtatgccgtgtgcagcggcggggcactggtcagtgcctgcgcacttattctctggtatggaacacgtcaatcatga

SEQ ID NO: 8018 - DNA, 927 bp, Zea mays
  Peptide Sequence Number=SeqID_13332
  Probeset Number=SeqID_22421
tcatagttcatgctattgtgttggagtgaattgagtgtgagttcgtcttcagagattgagtgctgctaacaattggtatcagaggcgttcgatccctggcgacccccccctccggctgtcctccccgacccccctcccccagcccggcccccacctcggaacaccagcgtcgaccagctgcactgcctctagcatggccttcgcggtgctcggccccccccccccccccccccccctgccccccccgccgccccccccccccccttcctccgccggacccgccgtcgcccccccctcccccccgcccaaccccgccgacctccccccccccctctccgcgctggctccccccctcccactccccccctcgccccgccccccccgcgccccacgctccccgccccccggcctctcccgccttccccctccgctccccccgccccccccccccgcctcgtccccgcacccccgctccccgccccccccccccccccctccccccccccccccccgccccccctcccccccccccccctccccccgccccctcccctccccccccccccccccccccctccccccccccgcccgctcccctccgcccccctccccccccttccccccctcccccccccccccccctctcctctcccccgccccccccccctcccctccccccccgctgccgccccctcccccccccccctcggcccgtctcccctccccccccctcccccccccccccacgccccaccgccccctcccccccccctctcacccccccccaccccccccctccccctcaccctccccgccccctcccctcccccccccccccgcccccccctttcccctctcccacctctccgcacccccgctctcccccgcgcccctcccccccccccccccccccccccgccccccccc

SEQ ID NO: 8019 - DNA, 585 bp, Zea mays
  misc_feature (63)..(63): n is a, c, g, or t
  misc_feature (157)..(157): n is a, c, g, or t
  misc_feature (230)..(230): n is a, c, g, or t
  misc_feature (307)..(307): n is a, c, g, or t
  misc_feature (440)..(440): n is a, c, g, or t
  misc_feature (573)..(573): n is a, c, g, or t
  Probeset Number=SeqID_22422
ggggacccatcagccatccccttttgctgcaaatctttctctgaattgtgggtctcggacgtnggggggggagctccataccaaaattctggggacccagctcaacttcgcgggctcctcccgctacgccaccgcagcgcccaccgggggggctcanaagattggctcccttttcagcaagaagcctgcccagaagcccaagcccgctgcgggatggggcgggggtccanacatcatcgacgagctcgccaagggggatgggcctgacaggaggatctacctgccggatgggctgttggaccgggcngaggggccggagtacctcaccggagagggccctggagactatggctacgacccttttgggctgggcaagaagccagaggacttcgccaaggaccaggcctacgagctgatccatgccagatgggccatgctcngtgccgctggcgctggcatcccagagggctgcaacaaggtcggcgctaactgtgggcctgaggctggctgggtcaagaccggcgcgctgctcctggacggaacaccctcaactacttcgggaacagcatcccncatcaacctggg

SEQ ID NO: 8020 - DNA, 498 bp, Zea mays
  Peptide Sequence Number=SeqID_13333
  Probeset Number=SeqID_22423
cagcagcggattcgccagcaggaaaccaatgtcgaagcgcggcagcagcaggtcgagcaagcccgggctcagctcaacactgccgagcttaacctctcttacaccgaagtacgcgcgccgtatgacggtttcgtcaccaaacgcaacgtgcagcccggtacgctggtgcaggccggcagcgcgctgttttcgctggtatcgccggatatctggatcaccgccaacttcaaagagtcgcagctggcacgcatgaatccgggcgataaagtggagattggcgttgatgcctggccggacatgaagctggaagggcacgtcgacagcgtgcagatgggctccggctcgcgcttctctaccttcccggccgagaacgccaccggtaactacgtgaagattgtgcaacgcgtgccggtgaaaattgtgattgataaagggctcgacccgaatcatccgttgccgcttggcctgtcggttgaaccgaaggtgacggtggaatga

SEQ ID NO: 8021 - DNA, 675 bp, Zea mays
  misc_feature (14)..(23): n is a, c, g, or t
  misc_feature (34)..(43): n is a, c, g, or t
  misc_feature (48)..(50): n is a, c, g, or t
  misc_feature (52)..(52): n is a, c, g, or t
  misc_feature (71)..(72): n is a, c, g, or t
  misc_feature (74)..(74): n is a, c, g, or t
  misc_feature (191)..(193): n is a, c, g, or t
  misc_feature (195)..(198): n is a, c, g, or t
  misc_feature (200)..(202): n is a, c, g, or t
  misc_feature (493)..(494): n is a, c, g, or t
  misc_feature (515)..(516): n is a, c, g, or t
  misc_feature (534)..(534): n is a, c, g, or t
  misc_feature (542)..(544): n is a, c, g, or t
  misc_feature (549)..(551): n is a, c, g, or t
  misc_feature (554)..(556): n is a, c, g, or t
  misc_feature (559)..(559): n is a, c, g, or t
  misc_feature (563)..(563): n is a, c, g, or t
  misc_feature (567)..(570): n is a, c, g, or t
  misc_feature (584)..(584): n is a, c, g, or t
  misc_feature (588)..(597): n is a, c, g, or t
  misc_feature (599)..(600): n is a, c, g, or t
  misc_feature (606)..(608): n is a, c, g, or t
  misc_feature (610)..(611): n is a, c, g, or t
  misc_feature (618)..(618): n is a, c, g, or t
  misc_feature (621)..(622): n is a, c, g, or t
  misc_feature (627)..(638): n is a, c, g, or t
  misc_feature (640)..(640): n is a, c, g, or t
  misc_feature (642)..(646): n is a, c, g, or t
  misc_feature (650)..(659): n is a, c, g, or t
  misc_feature (664)..(667): n is a, c, g, or t
  misc_feature (670)..(675): n is a, c, g, or t
  Peptide Sequence Number=SeqID_13334
  Probeset Number=SeqID_22424
tgctctcataccannnnnnnnnnaagctgcgttnnnnnnnnnnggggnnncnaagcagcagcaaagatggnntntcaaacccccgccgttgtcatggacaacggtacgggatactcgaagctcggcttcgccggcaacgactctccctccttcgtcttccccactgcgatagctaccaaaggcccaacagnnngnnnngnnngatcaggttctggacgcccagccgttgcgaacaagccctcattcctgaccggtggagctggaccgggtgggcatctgtctggaaagcgcggcaccgaggacctcgacttcttcatcggcgacgaagctctggccgcagctggaggcgcgggctatggcatcaactacccgatcaggcatggtcagatagacaactgggaccttatggaacgcttctggtccaactcgatattcaagtacctgagagtggagcctgaggaccaccacttcctccttaccgagcccccactgnnccctcccgagaaccgcgaagnnaccgccgagattatgttngagtcgtnnnacgtnnncgnnntcnacantgcnnnncaagctgtgctcgncctnnnnnnnnnntnnaccagnnncnnggtacanganngatcnnnnnnnnnnnntnannnnnactnnnnnnnnnntgtgnnnnacnnnnnn

SEQ ID NO: 8022 - DNA, 705 bp, Zea mays
  Peptide Sequence Number=SeqID_13335
  Probeset Number=SeqID_22425
ttgggaccctcgaggccggccgggatcatgtcccccgcgtagatgatctgcagggaggtagttgggaggagaaacacagctaccggggcgatgggcaacgagctcgattcgcacttcctggacgctcaccgacatcattactgtggggtaccagctgctgttcttcatcatcacagctctcctccggtgcaataaagacaacgcatttcgcaggaagaacgaattatatcataatctgcatcctaacatgtcccttgtgaattggagcatggacattatccgtcatagttgggcatagacagtcgcttgccaccatttggggacgtcgtctaggattatttgtattgatgaggattatgaaatgtggcgaagaccgaaaggatgacagaatgcacgataatgtggagaaagtagcagtttttagtattgtccatgctgtgagggtttgctctgtcagatagactgccgctgttgtgaatgcaagcgacagaaacccctcgattgaaccgatgatcataatcgggtggataatatggaaggctgggatatgtgtagaacctgctgctgatcaccagaagcttgtgttcaaaaattctccaagcaacatgagaaagaggagcgacggctggctatggaagcactctcgtcacccgaactactatgaggagatattcctgtgagagcggagtatttgtagaatcgacc

SEQ ID NO: 8023 - DNA, 844 bp, Zea mays
  misc_feature (103)..(103): n is a, c, g, or t
  Peptide Sequence Number=SeqID_13336
  Probeset Number=SeqID_22426
gctctgctctcccccacctcccggtccggcdagcagaaagcgggggttcagaaagatcbarawccggaggccgcmagtwggagcvccaccaccagcvactkcngcaattgcgggcacggtgacggtcccgygggtcgtcgacccctccacgccgctgctcaaggacgagctcgacrtcgtkatcycgacgatycgcaacctcgacttcctggagaagtggcggcccttcttccagcccyaccacctcatcatcgtkcaggacggcgacccgaccaagaccatcaaggtgccccarggcttcgactacragctcyacaaccgcaacgacatcaaccgcatcctcgggcccaaggcctcctgcatctcattcaaggactcckccttccgcygcytcggctacatggtctccaagaagaagtacatctacaccatcgacgacgactgcttcgttgccaaggacccatcttgcaaggatatcaatkctcttgagcagcacatcaagaacctcctcagcccatccaccccgttcttcttcaacaccctgtacgacccctaccgtkagggttctgactttgttcgttgatacyccttcagcctcagggagggttctcacaccgccgtctcccacggcctgttgctkaacatccctyactatwaagcyccacacagctgggcaagccaaggagaggattagaggatkttgaagcgttatgacaatcccaagggaacttgttcccatgttthgsatgaacttgcttcgacagggattcattggccykctatrtacttggtctcatggttatggcacccakckgttgcacacgacatgtggcaggatgtgttt

SEQ ID NO: 8024 - DNA, 723 bp, Zea mays
  misc_feature (180)..(181): n is a, c, g, or t
  misc_feature (713)..(716): n is a, c, g, or t
  Peptide Sequence Number=SeqID_13337
  Probeset Number=SeqID_22427
gccttctttcgctgtacaaaattcttaccagaacacacttacagtgatttcatctatgtctgtgtctttctgtccccattaattgagaacttcacacatgggtcagtgtagtgggagagtgagactgctgtttcttctgttactgatgccactttcaactgttctgggttggggcaagcnnggtcactatgcaatttgtaagataactcaggagtatcttagtgaagatgctctacttgcagttaaacaactgcttccagattctgctgaaggtgatcttgctgcagtttgttcttgggctgatgaggttcgctaccactatcgttggagtagtcctttacattatgttgacacaccagatttcaagtgcaactatgattactgcagagactgtcatgattcttatggacataagcatagatgtgttactggagcaatatacaactatacaatgcaactcaaatcagctgatacagacacttcatctgaatcaaaatataatttgactgaggcactaatgttcttgtcacattttgtgggggatgttcatcagcctctacattgtggttttattggagacctaggtggaaacaccataacagtacgttggtaccggaggaaaacaaatcttcatcatgtatgggataccatgattattgagtctgctctgaaaacattctatgattcagatctttcaatcatgatacaggctnnnnaaaggaa

SEQ ID NO: 8025 - DNA, 694 bp, Zea mays
  Peptide Sequence Number=SeqID_13338
  Probeset Number=SeqID_22428
ggacgctttcttctccctgtatcggaaccagcaagttttcttctagggttcgtaatcccaatcgcaaaccctaatctgtcaccaattgagataatcattcccccaaaatggcaattgcacgcactggagtctacgtcgatgactatttggagtatgccagcacgttgcccgctgaacttcagaggcttctcaacaccgttcgagaactcgatgaacgatcccaatctatgataaaccagaccaggcagcagacaaagtactgcatggggttctcatcacatggctctaagaagggtaatcatagttacaataacagttacgtgaatgacgatgatgatgcttccattgagaaaatgagaaaagaaattgaggcatatcaggatagtgcattgagtctatgtaccgagaaggttttgttagcacggcaagcatatgatctgatagatagccatataaaacgacttgatgaggatttaaacaactttgccgaagatttaaagcaagaagggaaaataccaccagatgaaccagcaattcttcccccattgcctatagtccctaaaactgaaaagcgcaagcccatatatggaacacctcaatcaaagagacttgattacagggatagagactgggatcgggaacgtgatagggactttgagctaatgcctccacctggaagccataagaaggagta

SEQ ID NO: 8026 - DNA, 708 bp, Zea mays
  misc_feature (502)..(502): n is a, c, g, or t
  misc_feature (567)..(572): n is a, c, g, or t
  misc_feature (591)..(594): n is a, c, g, or t
  misc_feature (681)..(682): n is a, c, g, or t
  misc_feature (685)..(687): n is a, c, g, or t
  misc_feature (690)..(691): n is a, c, g, or t
  Peptide Sequence Number=SeqID_13339
  Probeset Number=SeqID_22429
ggagaagagaagagaagggatggctcgcagtatctcgtacattacagggtcgcagcttctcaatctgagacgcctaccaaacatcgccgtagttgatgttacagacgatgagaggagttatgatgggcacacatcgggttctcttcattacgcgagcgacactttctccgaaaacatctcaaagcttgttcaggaagttaaaggcaaaggcaccctcgtcttccactgcgctctaagtcaggttcgcggcccaacttgtgctaggaagttggccaattatcttgcggagaataaggaagatgctggggtaaagaacattatggtcttagaacgcggcttcaatgggtgggaagctcctggtagagctgtttgccgctgcaccaatgttccttgcaaggagagtgagaatgcttaatcaaagacgtctttgtggttgagatggaatcatttaagcatatggtctttcttgttatatgtgaacacatttgtatacaaaaactgncgtaagatcactatggttacatcattatgtaaatcataagtaaactgaataccctgtttctgttnnnnnnatcacttaaataatgtaannnntccttggatggagtttgccaaggatgacaaagatattcattctcttcctgaacttcccgacagtatcacataacataatttgatcannatnnntgnnaaattcggctttggcgg

SEQ ID NO: 8027 - DNA, 331 bp, Zea mays
  Peptide Sequence Number=SeqID_13340
  Probeset Number=SeqID_22430
atgaaaggcaacttcacaggaagggttccgggtccccgttcaaaagtgtccgttggggatctgacctgccgcctgaagaagcctgcaaagtatgatgatatcaaggctgcagttaaagctgctgcagagggccaaatgaaaggaatcctgcaatacacacaagaccaggttgtctccactgacttcaatggctgcacttattcctccctcttcgctgccgatgctggaattgcattgaatgaacactttgtgaagctggtttcctggtatgataacgaatgcggctacagccaacgtgttgtggatcttatgtctcacatggcatctcagg

SEQ ID NO: 8028 - DNA, 494 bp, Zea mays
  Peptide Sequence Number=SeqID_13341
  Probeset Number=SeqID_22431
gaaagatgaacacagacataactgcatcgacgaaaccagagtacccagtgattgatcggaaccctcctttcaccaaagtcgtcggcaatttcaacaccctcgactatctccgtttcaccaccatcaccggtgtttccgtcactgtcggctacctctccgggattaagcctggaatcaggggtccttcaatggtgactggtggactgattggactcatgggtggcttcatgtatgcttaccaaaactcggcgggtcgactcatgggtttcttccccaacgacgatgaggtagctcgctacaacgagaaatgattcaacttttctctctctttttgaataatatcatatttcccttctgatccttgtcctttgtgattgtgattgtagagggattctgtgactcaatttgggatgaatgttagtagacttatgtattttgtttccggattctagggcaatagtgttttaatcgaatctatcactctctttgaatga

SEQ ID NO: 8029 - DNA, 483 bp, Zea mays
  Peptide Sequence Number=SeqID_13342
  Probeset Number=SeqID_22432
aacccctctttcgacgccgcctgtccagaaggcccgatgaagagcccactcagacacgcggacagatggcgctctacgcacgcttcctcgccgtcgccctctcccacctatgcctgccatagacctacacccacaggcctcaccaggccccgcacctgcacctgcactccacctacctccgggctgatggcctctcgctgggcgccttctcagactatgcgtctgaagcggacctacccgctgaggaggtgatggctgtcgaggaggaggcggaggaagatgcgctgtctggaatcgcgctgcgaaagtatgtgaagcacacgctgacgaccggtttctcggcgcaccggatcaccgccacgggccgtcgcaagacggccatcgcccgcgtcgtgctccatgagggcaccggcctggtcttcatcaacttccgcgacgctaatgagtatctgcaaggaaatccaatgtggatggagtactgca

SEQ ID NO: 8030 - DNA, 737 bp, Zea mays
  Peptide Sequence Number=SeqID_13343
  Probeset Number=SeqID_22433
gtcctttctcaagttcggagtctaggccgccgcccagaccgcctccccttccccgcctgcggcgcccaaggccaggtcaactgatttgaggtggaaatggtggaccacgctaaccaacccactgaccatcataagctaagaggccagctccacctgagctccagcttctctgaaggcgtacgggcccgtaacatctgcccttctttctcacctcatgaaaggagatatgccacaaggaactacatgacccaaagcctatggggcccttcaatgcactgatagagggggcatcaatgttccagcgatgccgactccgctttttgccaatgctccagccgagaaaggtggaaaaaacatcatgattgatttcatgatgggcagcgtttcagctagctgcttccaagactgcaactgctcccattgaacgagtgaagctgcttattcataatcccgatgagatgatcaagacgtggtatggtatcagagaacggacaatggtattgctgattgcttcaaacgtaccatcaaagatgacggtttctcttccttgaggaggaggaacactgctaatgtggattcgatacttacctactcatgatctgaactttgcgattaaagactacttcaacatgttgatcaacttccagaaggacatggacgcatactgtaaaagagaagctggcaacctgccctcatgagatgctgctagcgctgcctcatagtacacatagtactcc

SEQ ID NO: 8031 - DNA, 532 bp, Zea mays
  misc_feature (181)..(182): n is a, c, g, or t
  misc_feature (508)..(514): n is a, c, g, or t
  misc_feature (516)..(516): n is a, c, g, or t
  misc_feature (523)..(524): n is a, c, g, or t
  misc_feature (527)..(528): n is a, c, g, or t
  Peptide Sequence Number=SeqID_13344
  Probeset Number=SeqID_22434
gctggctattccattcgttcgttacccctgcctcgtgccaagctcacagcgccttcgatctcgtaaacatgactaagagaactaataaggctggcattgttggaaaatacggtacccgttatggggctagtctgcggatgcatattaagaagatggaagttagtcttctcagcaaattttnntgcgaattttgtggaaagtatgctgttaagaggaaagctgtaggaatatggggatgcaaggactgcggtaaagtgaaagcaggcggtgcctacactttgaacactgcaagtgccgtgactgtgcggagcaccatcaggaggttgagggaacaaactgagggttgagtttttggttgatgctagttttttataaattagacatgcgatgctagtttatgttcagagaactacattgattgtattcaaagtaaactttcattttaagttttatctgaaatgaccgtcgtaattttaagtgtttggaactttctctgtcagagcataannnnnnntnaaaaaannccnnttaa

SEQ ID NO: 8032 - DNA, 675 bp, Zea mays
  misc_feature (576)..(577): n is a, c, g, or t
  misc_feature (593)..(594): n is a, c, g, or t
  misc_feature (627)..(630): n is a, c, g, or t
  misc_feature (635)..(635): n is a, c, g, or t
  misc_feature (644)..(646): n is a, c, g, or t
  misc_feature (653)..(655): n is a, c, g, or t
  misc_feature (661)..(662): n is a, c, g, or t
  misc_feature (670)..(673): n is a, c, g, or t
  Peptide Sequence Number=SeqID_13345
  Probeset Number=SeqID_22435
ggactgctagtgtgatatttgctttgagcttaaaccctagccgcttcactcttctcttcggaacttggaagacctaaacaatcataatggcattgtgtaataaggttggaaacatcttgaggcagggcgctgctcagagcagacaagcacctgttgcttccatgcttaattatattcgctgcatgtcttcaagcaagctttttgtcggaggcctttcatatggagttgatgaccagtctcttagggatgcctttgcaagctttggagatgtgactgaggcaagggttattactgatagagacactggaagatcaaggggatttggatttgtcaacttctccagtgatgactcagcaagttctgcacaatctgcaatggatggacaggatctaaatgggcgaaacattcgggtgtcctttgcaaatgatagacctgctggacctcgatctcctggcggcagaggttatggtggtgatggttttgcttctggtaggggtggtggttattgatccaatcttttaattccttgtttctttctgcgtatgttttaagttcttatgcttatgtctgaattcnnttaaggttgctgctcnngttatcaatcagtagttagtaaaattttatgannnntgcgnattgcttgnnnatgttannnctgcanngagcattnnnntt

SEQ ID NO: 8033 - DNA, 678 bp, Zea mays
  misc_feature (460)..(460): n is a, c, g, or t
  misc_feature (463)..(463): n is a, c, g, or t
  misc_feature (535)..(536): n is a, c, g, or t
  misc_feature (601)..(603): n is a, c, g, or t
  misc_feature (630)..(631): n is a, c, g, or t
  misc_feature (637)..(637): n is a, c, g, or t
  misc_feature (641)..(646): n is a, c, g, or t
  misc_feature (648)..(648): n is a, c, g, or t
  misc_feature (658)..(660): n is a, c, g, or t
  misc_feature (667)..(667): n is a, c, g, or t
  misc_feature (674)..(677): n is a, c, g, or t
  Peptide Sequence Number=SeqID_13346
  Probeset Number=SeqID_22436
gaaattcgtgtcaaccataaagaaaaaagtaaagtaagaccagcttgattctcctcctcaccacataacaatggcgatggctttcaaaatggctactactgggatgtgggtaacggatgagtgcaagaactctttcatggagatgaagtggaagaaggtgcatagatacatagtgttcaagatcgatgaaaggtcaaggcttgtcaccgttgataaggtgggtggtcctggtgagagctatgatgatcttgcagcttccttgcctaacgatgattgtagatatgctgtcttcgactttgattttgtcacagttgataattgccgcaagagcaagatattcttcattgcatgggcaccaacagcatcaaggataagagcaaagatgctatacgcaacatcaaaagatgggctgagaagagctttggatggaataagctatgaagttcaagcaaccgatccnccngagatgggattcgatataattaaagacagagccaaatagatgccccctttttattaagcccttaattatgtnntagagctaatcaattaatccgtcaatcttactcttattattaataattattataatcaagtaacnnnaatccaatgactgtatgacatgtgctnncttttntggnnnnnntncgatggtttnnngcaccantgtgatnnnng

SEQ ID NO: 8034 - DNA, 655 bp, Zea mays
  Peptide Sequence Number=SeqID_13347
  Probeset Number=SeqID_22437
ccggccgggacctcggcctccctcgcgatatgttaactacataggctaccactctgaacaacatgtgtggtgatggcatggaggcatctgccagcgccacaggaggggtgaacaagcagccgaaaatcacacttttgaggatgtccctcacatgcatggccttcacttcactgcagcacggatgggcgcctgacgtctcacttctcacccgctacgtccaaacactgagaattcctcatgctcttacatcactcatgtggatctgtgaaactattgctgacttacttgtaccaacctgcgccaggctctatagagacaaatgtacttctaaaattgggagacggacgccattcatctttacaggatgaatcatcatctgcatatctgtaataataatcatgtgctccctcacacatgcgttaccctctcgctgacacagaccaaatactgcaatcgcctacacataagaagcagctgcactcggtcttgatcttcgcgatgtcattctggctgctggacttttccaacaacacggagcaaggaccctgactcgctctaatggaggacctcgcaagcattcaccatgcccagcacggtgaacgccatcttcgtgtcgtggatggcgatcgggaacatcctgagctacctcgtcggg

SEQ ID NO: 8035 - DNA, 436 bp, Zea mays
  Peptide Sequence Number=SeqID_13348
  Probeset Number=SeqID_22438
attcgggtcgcggaccaacctaagcaggtgtttgcatggaaaagggggacaaatgggtagggggggatatataggctacgttcccaacgatgctaccgggcccggccctgcaacgcagtcgtaggaggccatgaaggcggatgcatgcgctgggtgcgacaaacagaacatttgcgcctgcgcccacaaggtcccagagcccaatgtggttgctattgatgagaggttgactactgtgaaacacaaattattagttttgaatggaaagggaggtgttggaaagagcacattctcagcccaactctactttgcctgagctgaaatggaccatcaggttggcctttttgacatacatttatgtggccctagcatcccaaaaatgttaggcctcgagggacaagatttttatcagagcaaccttggttggtcacctgtg

SEQ ID NO: 8036 - DNA, 751 bp, Zea mays
  misc_feature (29)..(29): n is a, c, g, or t
  Peptide Sequence Number=SeqID_13349
  Probeset Number=SeqID_22439
ggggctatggggccctcgagggcgcgcgngctccctcgccctccccaagaaaccctagccgcccgccccgaagcggcctcccaggtaagcaggagcgtccaccccgccgccgtcatgaacccgcatccccgcgtcacgagctcccgccgcaagagccgcaaggcgcactttacggccccgccctccccccgccgcgctctcatgtccgccgccctgcccacgcagctcccccaccagcaccccgcgcgctccatcccgatccccaaggacgaccagccgcacgccttgccccgccccctccaagccccccgcggcccacccgcgccgcacccctctccccgcccctgcctccttcccgcccccgtggaccccccccccccacccccccccccctcccccccccccccccaccaaccaccccccccgccaagaaaccctcctcaaacacaaccactccaccttccacacctcacatattcaaccatccccttaccctcctccccttcatcctcctctctcctcccctacctctccccctccctccccccccccctcccccccccccccccccccccctctcccttctctcccccccccccccccccatctccccccccccccccctaccccccctctcccctccccccgccgccgtctcccccacctccccacccccccaccccccccccccccccctccttccccccccccccccccccccctccccccccccggcccccccccccccccc

SEQ ID NO: 8037 - DNA, 336 bp, Zea mays
  Peptide Sequence Number=SeqID_13350
  Probeset Number=SeqID_22440
ccctgccgccaccatctccacccccgccgtctcctcctccaccgtcgccgtctccaccgccgccttcgcctcccccaccatcccctcctccgccatcaccatcccctcccccaccttcgcctcctccaccatctcctccgccaccttcacctcctccgccgtgtcctccacccccgtccccatcccctcctcctccttctcccccaccgccgtgtcctccacccccgtccccttcacctcctcctccttctcccccacagccgtctcctgcacctgcatccccatcacctgcacctgcttctcccccaccggcgtcggcacctccaccatctgcat

SEQ ID NO: 8038 - DNA, 606 bp, Zea mays
  misc_feature (6)..(7): n is a, c, g, or t
  misc_feature (11)..(11): n is a, c, g, or t
  misc_feature (34)..(34): n is a, c, g, or t
  misc_feature (298)..(298): n is a, c, g, or t
  misc_feature (568)..(568): n is a, c, g, or t
  Probeset Number=SeqID_22441
atttcnncacnagggttggggtgctcatggtganctgcagtttatggggcacccaaaaactcaccctgcgcagaaaattttcctcttactccaaacaatccatatggggaaacaaagcgtcgggtggaagatatttgccgggatatctaccgtgcagatcctgagtgggagatcattggacggaggtgcttcaatcctggtggggcgtatcctagggggtatcttggggaggacccacgaggaattcccaacaatcttatgcgctatgtgcagcaaggtgcgggtggtaggaggccanctctaacaggtttaggaaatgactatgcgacaagagagtggactggggtaattctgtggcgtatgatgtgcgtaattgtgtttttttggggtaccattcaaattgagtaatctgaggcgtttgaggctgggtattccaaataaaactgtgtggaattgtctgtgaaaatttaataatcgtgggggggggtaggactaacaagagtgatgagaactgtgatctcttccttaaaaaacttgactagggctgtgtatatgacttgctgcctantgtattgacccgggcttggtaaagttaatctttaacta

SEQ ID NO: 8039 - DNA, 671 bp, Zea mays
  misc_feature (13)..(13): n is a, c, g, or t
  misc_feature (75)..(75): n is a, c, g, or t
  misc_feature (104)..(104): n is a, c, g, or t
  misc_feature (113)..(113): n is a, c, g, or t
  misc_feature (146)..(146): n is a, c, g, or t
  misc_feature (162)..(162): n is a, c, g, or t
  misc_feature (165)..(165): n is a, c, g, or t
  misc_feature (189)..(189): n is a, c, g, or t
  misc_feature (268)..(268): n is a, c, g, or t
  misc_feature (272)..(272): n is a, c, g, or t
  misc_feature (286)..(286): n is a, c, g, or t
  misc_feature (310)..(311): n is a, c, g, or t
  misc_feature (318)..(318): n is a, c, g, or t
  misc_feature (328)..(328): n is a, c, g, or t
  misc_feature (353)..(353): n is a, c, g, or t
  misc_feature (365)..(365): n is a, c, g, or t
  misc_feature (467)..(467): n is a, c, g, or t
  misc_feature (507)..(507): n is a, c, g, or t
  misc_feature (553)..(553): n is a, c, g, or t
  misc_feature (555)..(555): n is a, c, g, or t
  misc_feature (628)..(628): n is a, c, g, or t
  misc_feature (661)..(661): n is a, c, g, or t
  Peptide Sequence Number=SeqID_13351
  Probeset Number=SeqID_22442
cacttggtcgctntcggtctctcgcctgtctttacccttggacggagtttaccgcccgatttgggctgctttccncaccccccgactcgctgacggcgcctcgnggtgcgacngggcccgggccggtcggggctctcaccctcccnggcggggggtgtgccngcnatctcgcgcccggcccgccgctgncgccgcctctcccgactccccttcccgcggcgaggccggccgcctctcacgctggcctggtcccggctcgctcgccgcncctnggggccccctcgcncgcctgctcccctccgcctgtctnntcgcccncccgccgcgnccccccccccgcggccgcgcccccncgggcccccccnccgccccccccccccgccgccgcctcccgcccccccccccccccgccctcctgcgcccgccgccccccctcgcgggcctgctccccccgccccccgcgcccngccccccccccccccccccgtctcccccccccccccccgnccccggtcgccgccccgggcccccccctccggctgcccccccgccncnccccccccccccttcccccccgccccccgcccccggcgcccccccctccccccccctccccctgcccgccccnctcgcagcgtccgtctccccccccccccccccnccgcccccct

SEQ ID NO: 8040 - DNA, 517 bp, Zea mays
  misc_feature (163)..(167): n is a, c, g, or t
  misc_feature (449)..(450): n is a, c, g, or t
  misc_feature (498)..(502): n is a, c, g, or t
  misc_feature (506)..(511): n is a, c, g, or t
  misc_feature (513)..(514): n is a, c, g, or t
  Probeset Number=SeqID_22443
ttagggagcttgagaagaaatttagtgggaaggatgtgatcttgattgccacccggaggatactaaggccaccaaagaaaggttctgctgttcagcgtccccgcagccgtacactcactgctgtgcatgaagcaatgcttgaggatactgtattacctgctgnnnnngttggaaagcgtgttaggtacagaattgatggatccaagatcatgaaggtgtttttggaccccaaggagaggaacaacactgagtacaagttggagacttttgctgcagtatacaggaaactttcaggcaaagatgttgtgtttgagtatcctattactgaggcttaggttctatttgtcagtttttaattttttcatgaattgcatatggtgaatgctggttaaaaattttgttaaaaagtttcctttaatgttggattttctttattgactttaaaaaannaattcttggcctcgtttatcaatttagtatttgatattttttgcttgnnnnnagannnnnngnngaa

SEQ ID NO: 8041 - DNA, 378 bp, Zea mays
  misc_feature (138)..(140): n is a, c, g, or t
  misc_feature (142)..(143): n is a, c, g, or t
  misc_feature (146)..(146): n is a, c, g, or t
  misc_feature (311)..(312): n is a, c, g, or t
  misc_feature (326)..(328): n is a, c, g, or t
  misc_feature (330)..(330): n is a, c, g, or t
  misc_feature (358)..(359): n is a, c, g, or t
  Peptide Sequence Number=SeqID_13352
  Probeset Number=SeqID_22444
ttcctgagtttcagcagtcacagaaactccataaccgaaaatgcctttcaagaggtacgttgagattggtagggttgctttggtcagctatggtaaagagtatgggaggcttgtggtcactgttgatgttattgaccnnncnntanttcttgtcttttcccctgatatggtgaggtcccagatgaatttcaagaggctctcactcactgatattaaggttgatattattagggtccctaagaagaaggatctcattaaagccatggaggctgctgatgttaagaacaagtgggagaagagctcatggggcnnaaaactgattgtgnnnangaaaacggccgccctcaatgattttgannggttcaagattatgttggc

SEQ ID NO: 8042 - DNA, 642 bp, Zea mays
  misc_feature (583)..(583): n is a, c, g, or t
  Peptide Sequence Number=SeqID_13353
  Probeset Number=SeqID_22445
cggggctctgggcctccgccgccgccctaatccactgctgaggcttacattggtctcttcgccggcgacgagcacccagctctgtagaaatggctgatggtgaggacatccagcctcttgtgtgcgacaatggaactggaatggtcaaggctggttctgctggcgatgatgcaccaatggcggcttatcctagcattgttggccatcatcgccacactggtgacatggtagggatggtacaaaaggacgcacatgctggcgatgaggcacaatccaagagaggtattcttacgctcaagtaccctattgagcaaggtcttgagagcacctggaatgacatggacaaaatctggcatcatactttgtacaacgagcttcgtgttaccccaaaggagcaccctgttttgctgaccgaggctcctttgatccccaatgccatcagtgagaatatgacccaaattatgttggagactttcaatgctcctgccatgtatgttgcaatccaagcggcgctctcactctatgctagtgggcatactactgctatcgtactcgactctgatcatgagtgcagccacactgngcccatttacgaacgacatgcccttccttatgccattgttggtttggatcatgctggtc

SEQ ID NO: 8043 - DNA, 504 bp, Zea mays
  Peptide Sequence Number=SeqID_13354
  Probeset Number=SeqID_22446
gggccttctgccgctggccgacatggaggaggtcggctacaaccgcgccacggggtttgtgtggctgcgccaaaagaagtcgcttaagcacacgttccgcccgattgggcgccaggttttgtacgcccccgaggtcaccgcctttgtggaggaccggcggattaggggcatgaccggggtcaaaaccaaggagctccttatttgggtcaccctttccgaaatgtttgtcgacagggacgacccctccaagatcaccttcaaaacgccccccgggcttggcaggacctaccccgtttccgcctttgccaaagaaggggccggttaagacggggcggcggccaagcccaaggattatgcccccgccccggcccccgccggtaaggctgctgccaaccaattaggtggcggcgtttggagcttttaccctgccggagtcgccaaacttgcctcctcaaaaaaggggtttggaccccctctacctgcttcaaattagtgtgctttatg

SEQ ID NO: 8044 - DNA, 873 bp, Zea mays
  Peptide Sequence Number=SeqID_13355
  Probeset Number=SeqID_22447
ctgcaggagttccccgagcaagtgctcaacaagtacttgaggaagggcaaagcagccgagttcgtcgagaagatgctcgtgccgtacgccgatgcgttcctgcgcaccgtccacgccgacttccccgacgacagcgagtggcagccggtgaaccggtggttgaagcggttctcacgcatcgacaacagagactggcgaccgaccgcgatctgggcgctctacaaccacggcgatgacgctgcgttcctcaccaagttcttcgcgaagctcgagacgctcgctgccagcttcctcgtccgaggcacctacacgacgcctcgtatcggccggtaccttgacctgctcaccgagctcaaggaaggacaggggctcgacgcgccttccttcgagctctccgcaggagagatcgcagagacgcggcacgcgatcaacggggacatctacaacatgcagaagaggcgcgcgcgttatgtcctcctgcgccttgacgagatgctgaccaccgatggcgccgtcgaatacaacgagccgctgatccagatcgagcatgtgctgccgcagacaccgactgtcgactactggctcgagcgattcgacgaggaagcccgcgagacgtggaccaaccgtctcggcaacctgctcctgctgaacggccgcaagaacgcgcaggtgaagaactacgacttcgacgtgagggcctcgaagtatttcaagggttccgcgatcttccagctcacctcacaagtgatccaggagaccgactggaacctcgacatcgtgaagcagcgacagcagaagctcaccgagacgctctacgacgcgtgggggttgcagtcctacgtggcggaggccggcgatgtcaccggaagctga

SEQ ID NO: 8045 - DNA, 780 bp, Zea mays
  misc_feature (611)..(620): n is a, c, g, or t
  misc_feature (695)..(701): n is a, c, g, or t
  misc_feature (710)..(710): n is a, c, g, or t
  misc_feature (715)..(721): n is a, c, g, or t
  misc_feature (742)..(742): n is a, c, g, or t
  misc_feature (747)..(747): n is a, c, g, or t
  misc_feature (749)..(750): n is a, c, g, or t
  misc_feature (757)..(761): n is a, c, g, or t
  misc_feature (766)..(771): n is a, c, g, or t
  misc_feature (773)..(775): n is a, c, g, or t
  misc_feature (778)..(780): n is a, c, g, or t
  Peptide Sequence Number=SeqID_13356
  Probeset Number=SeqID_22448
ccctcctctcgaactctccagtcccactgcgccctccccgccgccgccgccatggcgatcaccgcccaggtccccgacatcatgggcgagcgccagtccggccaggacgtccgcacccagaacgtgtcggcgtgccaggcggtggccaacatcgtcaagtcgtcgctcggccccgtcgggctcgacaagatgctggtggatgatattggtgatgtcacgatcaccaacgacggggccaccattttgaggatgctggaggtcgagcatccggccgccaaggttctcgtggagctggccgagctccaggaccgggaggttggagatgggactacctctgtcgtcatcattgctgcagagttgctcaagagagccaatgaacttgtgaggaataaaattcacccgacctctattattagtggctacaggcttgctatgcgtgaagcttgcaagtatgttgaggaaaagctgtctgtcaaggtggatagacttggaaaagactcccttattaactgtgctaaaactagcatgtcctcgaaactgattaccacggatggtaatttctttgcaaatctggttgtagaagcagttcaagctgtgaagactacaaactnnnnnnnnnnagtgaagtatccaatcaagagtattaatattttgaaagctcatggtaaaagtgccaaggaaagttacctgctgannnnnnntgcgctgancactnnnnnnncagctcaaggaatgcctaccngagtnanncctgctnnnnntgctnnnnnngnnntcnnn

SEQ ID NO: 8046 - DNA, 471 bp, Zea mays
  Peptide Sequence Number=SeqID_13357
  Probeset Number=SeqID_22449
gtcacgcctgctggtgctgcgtacgctatacagggggcgacctacgcgtcctgtttttttgggaccgttttcaagggtttcatatatgacattgtgagggttgggctggagtcactgcctgttgcagacaaggtgctcaacaaagatggacatcaagggcacagagaatggtttaccgaggttaactgcctggggcagttgaagcatccaaatatggtgaagttgatcggatattgctgcaaagatgaccatctgctccttgattacgagttcatgtttcgaggaagtgtcgaaaaccacttattacgaaagacagttactccattgccctggggtactaggatgtcaatcgcgcttggagccgtataagggcttgctttgctccacatcgctcagaggcccagcatctacagagatcacaagacattaaacattctgctggacttcgattatactgccaaactgtctgac

SEQ ID NO: 8047 - DNA, 606 bp, Zea mays
  Peptide Sequence Number=SeqID_13358
  Probeset Number=SeqID_22450
aattcggcacgaggctactccttaggtgctccatgtcttaatggtatgctttacctgattcatggactcgtacggagcggcggcctcacatgtgtcatattagtactactatttcggcgattcatgaatacaggtcctagagcaactccgacaggactgctctgcatgatgctgaccgacaagctcgcagctgacggcgctcgccttgctgctgaggaacaccgaggatctgatgatgagccaggcgatcaaatgagattcggcttccattgagtacctgaagacagtgagcgactgctgcactcggacgatgaagcttctagactattccatggcggccacgaccacgtacgagagttcggccggaattatgagcctcgtcccccggcacatggacgactacgtagtctacggcctcaacgcgtgcttgcagaacgtccgcatctgctgcgtgcgcctggacgccatagacaagctgcgggcgcactacgacgccctcgtcgacgccagtcgtcgaccctgacgccaactgataaggcctagccgaggaggcgtgcgattacaaagccatcatgtggcagtactgcttcaaccagcggatcgcct

SEQ ID NO: 8048 - DNA, 647 bp, Zea mays
  Peptide Sequence Number=SeqID_13359
  Probeset Number=SeqID_22451
aattcggcacgaggggcgatcggcgaccgcaagcaggagtagcccttgtaagtcgtcaggaaagcacgcgagaagtcgtcgcgctgctcttcgttgcctatatactccggctccgtcctccggggggctcggttggtaccactctaccactcgccagatctgcctgccttccctgctctccccgtcggctcaccgcgcgcaccatatctccccgtacacgaggggaccctatcatggaatcgcatccgtcctgcgctttgccggcggcgactgcagaagcgaccaaccatggcggcggcctgtgatgcttacaccgacaagaacgccgtcttccgtcggctgaaggccatgcccgagaacaagatgtgcttggactgcaacgcccagatccccacctgggcctccgtcactctacgggatctttctctggctagactgctgcgccgcccaccgcagcctcggggtccacatcaccttcgtgaggtcaacgaacctcgactgatggactccataccagctgaagatgatggcattcggaggcaacatccgggcacatgctttcttcaagcaccatggatggaccgatggcggtaaggtcgaagcaaaatgcacatcaagagccggtgaactttacaggcagatgctta

SEQ ID NO: 8049 - DNA, 636 bp, Zea mays
  Peptide Sequence Number=SeqID_13360
  Probeset Number=SeqID_22452
cgaccccccccatggcaagtacatggcatgctgcctcatgtaccgtggtgatgtggttcccaaggacgtgaacgcttctgtggccacaatcaagaccaagcgccccatccagtttgtgggatggtgcccgactggcttcaaattcggaatcaaataccagcctcccagcgttgttcccggcggtgatctggccaaggttcagcgtgccgtgtgcatgatttccaactcccccagtgttgtggaggtttttttccgcattgaccccaagtttgacctcatgtacgccaagcgggcctttgtgccctggtacgtcggttagggtatggaggaaggcgagtttttccaggcttgtgaggatttggctgcgctcgaaaaagaattccaggaggtcggttctgagttttaccaaggttaggacggcgacaaaggtgttgagtactagacgctttaaaaaaaaagagttgtcgggcctttgtgcccctactatcctgtgatttgccctgagtggctcccatcgtgttatggttctgttgggttttatctatctgtcggtgtgtggtttccaacctacgttgaaaaactttattccccccctttgcaatgggaataataaaataaaagaaaaagttttctttg

SEQ ID NO: 8050 - DNA, 800 bp, Zea mays
  Peptide Sequence Number=SeqID_13361
  Probeset Number=SeqID_22453
cattgggtacctcgaggccggccgggatctctcgttccactctagtgtcggtatctacagagaatacagccactgtttctctccctcgtccatgtgttcttgatctccgcatgagaggaaggagaaggaaacgggggaaaaggctggtgagacacgtaaggtctcgagttggaattgggaccactagactcacaccaggtggatcctagggcagaagacatccagatcggcgtgatcagagcacttgcactctctgttgcatcatatgctgccgttgtcctccgcaacaaagctctcatcacacacttggttttccattcgctacaacagtaacgatctggaatctgatggtgaccttctgcaccctccatgtggcacagattttactcttcttcgagcccgacgaaattgatgcacagacaaccatactctttgggttgctgaatggcacgtcaatggtgattgtcaatctgagcttaggatcctactccatcgaaatctaccagatgacaaaaatggagatcatacctttcactgagctattggagactatcttcctgaagaaaagattcagcgagagtatcaagctgtctcttctggtcttacttcgttgagaacgaattgcttcagctactgatctcaagataaatctggttgggtgcatcatttctgggctcgtcattgacaccacctgtgttggtcatattcgcacaattacgatacataagaggctgtagggatcctcaacgcaacttctgtaccaatctgcggcttaccaccaggtaattctgtttgcatct

SEQ ID NO: 8051 - DNA, 822 bp, Zea mays
  Peptide Sequence Number=SeqID_13362
  Probeset Number=SeqID_22454
gccggtcgggttggggacagaacctatggtcaaaactttgctgcggagcgccagcgcctgctcccgtaccgacgacgagagatagacacagagtctgccgaggaaatcatggacgggaaagatgatgcaccgggcctgctctctcccaagtcctagcatggccctcccctcctcaatgatctgcacgatctccgtgaagacgacgaataagacagtcgcggccaacaacgctgttctactcttcgagacgtcgagtcatcgagcgctacattgaggaccatggcaagagtcccgtcactaatgaggacctcaccatggatgatatccagccggacgagaccaacaagatcgagaatcccaggcctttgcaggctgcaagcattccaggactccttgcgatttttcaaaacgagtgggatgctctcatggtttctaattttgctttggagcaccagcttcacacagtgagactagaacttagtcatgcactctaccagcatgacgctgcctgccgcgctatagccagattatagaaggaaagagatgacgctagagcacttttggctcaaactgagagacagattcctgcgtcagttgcaggagctgctcctgcagctgttgtttccaatggaaaaagagtaattgaagatgaaattggccctgatgggaagaagattcgtcctggtatcaaccccgtcatgattgatgaacttacaaagtgttatgccatgctttccgcccgtgtaagaaaagactggttcctccaactctgggtacgatggatgcactcgaaaaaaacctcagaacttcagccatcccctt

SEQ ID NO: 8052 - DNA, 647 bp, Zea mays
  misc_feature (161)..(165): n is a, c, g, or t
  misc_feature (167)..(168): n is a, c, g, or t
  misc_feature (516)..(516): n is a, c, g, or t
  misc_feature (561)..(561): n is a, c, g, or t
  misc_feature (565)..(565): n is a, c, g, or t
  misc_feature (571)..(571): n is a, c, g, or t
  misc_feature (580)..(583): n is a, c, g, or t
  misc_feature (593)..(594): n is a, c, g, or t
  misc_feature (603)..(603): n is a, c, g, or t
  misc_feature (605)..(606): n is a, c, g, or t
  misc_feature (610)..(611): n is a, c, g, or t
  misc_feature (622)..(624): n is a, c, g, or t
  Peptide Sequence Number=SeqID_13363
  Probeset Number=SeqID_22455
gacactataattggtaaatcagacggagagaaagatagtgtgtgagaaaagtggaaatggcaagttatggagatgcgaaccagaagatagattacgtgttcaaggtggtgctgatcggtgactctgcggttgggaagtcacagatactagcgaggtttgcnnnnntnncgagttcagcttggactcaaagtccaccatcggagttgaatttcaaacacagactttggtcatcgatcataagaccgttaaggctcagatctgggatactgcaggccaagaacgatacagagcagttacaagtgcatactacaggggtgctgttggggcaatgttggtttatgacattactaaacgtcaaacctttgatcatataccccgttggctagaagaactgcgtaaccatgctgacaagaacatagtcatcattctcataggaaacaaatgtgatcttgagagccagcgtgatgtacccactgaagatgcaaaagaatttgctgagaaagaaggcttattttncttagagacctcagcattggaagcaactaatgttgaaacagcctntatnactgtnttgacagannnntacaccattnncaacaagangnncctnnctgctgatgannntcaaggaaatgggaactcatcat

SEQ ID NO: 8053 - DNA, 685 bp, Zea mays
  misc_feature (662)..(663): n is a, c, g, or t
  misc_feature (679)..(682): n is a, c, g, or t
  Peptide Sequence Number=SeqID_13364
  Probeset Number=SeqID_22456
ggatttcaaatatggcagattcaaaatcaggtttgaggaagccagtgtttaccaaggttgatcagcttcgcccaggaaccagtgggcacactttaactgtgaaggtggttaatactaagatggtcatgcaaaaaggccgtcctgatggtcctcaaccccgtcaaatgcggattgctgaatgtttggttggtgatgagactggagtgatcatattcactgcaagaaacgatcaagtggatttgatgaaagagggtaccactgtcatcctgcgtaatgccaaaattgacatgttcaaaggatcaatgagacttgctgtggacaagtggggccgtgttgaagtcatagaacctgcaagtttcactgttaaggaagataataacttgtccctgattgagtatgaactggtgaatgttgttgtggaatgacttgttgggacattctgaaatctgtgctgtgttctaatgatgaataaaaacaaattcagcaaagaaatctaattttgtctatgggacatgtaatcatgcttatcttaattcaccttactaggaatagagatctgtgaagccagtagtaccagcagctgcttcttactgctgcatttgacttgatggatcttgtagcttcaacaactaaatagatggtggctgtaagtggaagaagtnnatagggaactggcttnnnnatc

SEQ ID NO: 8054 - DNA, 465 bp, Zea mays
  Peptide Sequence Number=SeqID_13365
  Probeset Number=SeqID_22457
tgcagagatcattcttatcagtcgctacgccgggcaggtcgatgtgcgccgcgtgacgctggtacagctgctggtggcctcggcctgcgccttcgtgctgatgctgcccaacggcgaatctttacccacgctatcggcgccgctgctgttcagcgcgctgggccttggcgcggccagcgcgctgattcaggtcaccatgaactgggcgcagcgcagagtctcgccgacgcgcgccacagtgatttatgccggcgagccggtgtgggccggtgtggtcggacgcattgccggcgaacggttaccggccgcggcgctgctgggcggcgcactgattgtctgcggggtgattgtcagtgaactgcgcctgcggcgcaaaaaagcggctcccggagcaggcaccgcagaagccttaaggctgcgggcgcgccgccggatgggtcagcgcggcacagcgccgctgcaggc

SEQ ID NO: 8055 - DNA, 688 bp, Zea mays
  misc_feature (645)..(647): n is a, c, g, or t
  Peptide Sequence Number=SeqID_13366
  Probeset Number=SeqID_22458
tgatggtaacattgttgcctctttgttggcacacaaattaggtgtcactcagtgtaccattgctcatgcacttgagaagaccaagtatcctgaatctgacatttactggaagaaattcgaagagaaatatcacttctcatgccaatttacagctgatctctttgctatgaaccacacagattttatcatcaccagtaccttccaagagattgctggaagcaaggatactgttggacaatatgagagtcacactgccttcacccttcccggactctaccgtgtcgtacacggtatcgatgtcttcgatccaaagttcaacattgtctctccaggagctgatcaaaccatttacttcccatacactgaaaccagccgtaggttgacatcattccaccccgaaatcgaagagcttctttacagctccgttgagaatgaagaacacatttgtgtattgaaggaccggaacaagccaattatcttcaccatggcaaggttggaccgtgtgaagaacatcaccggacttgtcgagtggtatggcaagaacgcgaagctcagggagttggtgaaccttgttgttgttgccggagataggaggaaggaatccaaggacttggaagagaaagctgagatgaagaagatgtatgnnntcattgagacctacaagttgaatggccaattcagatggatt

SEQ ID NO: 8056 - DNA, 689 bp, Zea mays
  misc_feature (7)..(9): n is a, c, g, or t
  Peptide Sequence Number=SeqID_13367
  Probeset Number=SeqID_22459
gaaaatnnnggtttgtttgcatagctcgtcacctgcatctttcggaaattgctggtctgtttgcgacaatggcgacccagatgagcaaaaagagaaaatttgttgctgatggtgttttcttcgctgaactgaatgaggttctgacaagagagcttgctgaagatgggtattctggtgtggaagttagggttacaccgatgcgcactgagatcatcatcagagccactcgaacccaagctgttcttggtgagaagggaaggagaattagggagcttacctcagtggtacagaagaggttcaagtttcctgagaacagtgttgagctttatgctgagaaggtcaacaacaggggtctttgtgctattgcccaggctgaatctctccgctacaagctccttggtggtcttgctgttaggagggcctgctatggtgttttgagatttgtcatggaaagtggtgccaagggatgtgaggtcattgttagtggaaaattgagagcccaaagagccaaatccatgaagttcaaggatgggtacatgatttcttctgggcaaccagtcaaggattatattgactctgcagtgagacatgtgctcctcagacagggtgttcttggtatcaaggtgaagatcatgcttgattgggatcctaaagggaaacagggtcctaaaactcccctccctgatatt

SEQ ID NO: 8057 - DNA, 439 bp, Zea mays
  Peptide Sequence Number=SeqID_13368
  Probeset Number=SeqID_22460
caagggcaggacggcggagaaaattgcggaggcggcgaggcaggccctcccggcgctggaaaccctggagcaggcgttcagggagtgctccaaggggaaggccttttttggaggggacagcgtggggcttgttgacgtcgtgctcggcggccttgttgggtggctgtacccccccgaggccattttcggggtgaaggccctttaccccggcaggaccccccttctggcggggtggggggaacggttttgccccctggagggtgtcaaagggctgatcccccccgtggacaggcttttggagtataccaaggccaggcgggccgtatttggccttcccccgctccgtccttagggaaagtggacatgttttttttttttttttttaaaaaaaaattatatgttctatgtttgtttgaaaaaaagaactgttatggtgttt

SEQ ID NO: 8058 - DNA, 545 bp, Zea mays
  Peptide Sequence Number=SeqID_13383
  Probeset Number=SeqID_22461
ggagacgaagatcattgttgaactgggagagagagagatggaggagaaagagaaaggagagagatggagcggagcgatgacaaatctggcagagatgggttcgaatctggagtctcttcagaagcttctcctcactaaagccgtcttcgtcgacgacgacaccttctccaaagcctctctcgccgctgatcaagcccgcaccatcaagcttctcgagcaacgagtccacaccttagaaagagaggtcgatgccgccatcaccgccgccgctcgcgctcgttccgaaaaacgacaagccgaggcagcacagaaagccgctgaatcacgcgctcaagagatcaccaaggagctcgaaaacaccacaaaggtgtttgagttgcacatggaagaactgcgtgctaagcaagaagaatcacgaagcgtgataacgacattaaacttctggaagctattattcaaacacttggaggaaaagaatcgcttcctaaatctatgtaaacacccattgttctaagtattgacaccttaataaatgttattattcc

SEQ ID NO: 8059 - DNA, 534 bp, Zea mays
  misc_feature (165)..(167): n is a, c, g, or t
  misc_feature (406)..(407): n is a, c, g, or t
  misc_feature (442)..(446): n is a, c, g, or t
  misc_feature (491)..(493): n is a, c, g, or t
  misc_feature (498)..(499): n is a, c, g, or t
  misc_feature (526)..(529): n is a, c, g, or t
  Peptide Sequence Number=SeqID_13384
  Probeset Number=SeqID_22462
gtagttgctgtgattgtctgtaggatcagaagaagcggagttaaaatttttttccttgcggagatttatgctctactaggcgttcccctttcatatgtgctttggtacaggcctctctatcgtgctatgaggacggatagtgcactgaagtttggttaggttttnnntgttctacttgctgcatatagcattttgcatctttgctgcaattgcacctccagttgtttttcatggaaaatcattaacaggaatccttgcagccattgatgtcttctcagaccatgtattgagtgggatattctatttggttggatttggcctgttttgctaggagtctcttctaagcttttgggtgcttcagaaaatatacatgtatttccgggggcataagcgagactgttctcannattttgatccattggcttttataatgtcagtcacnnnnntgcgtggcatggtatattctttatttttgtctaatcccctttctnnnccttnnaatatcttcatttgatcttgctcattnnnnccctg

SEQ ID NO: 8060 - DNA, 597 bp, Zea mays
  misc_feature (589)..(592): n is a, c, g, or t
  misc_feature (594)..(595): n is a, c, g, or t
  Peptide Sequence Number=SeqID_13385
  Probeset Number=SeqID_22463
cacagttgactgccaaacccaggcttcttgagcctgtttacctggtggaaatccaggctcctgagcaagctcttggtggtatctacagtgttctgaaccagaaacgtggacatgtctttgaggaaatgcagaggcctggtaccccactttacaacatcaaagcatacctccctgtcattgagtcctttggattctccagcacattgagggctgcaacatcagggcaggctttcccacagtgcgtctttgatcactgggatatgatgtcttcagatccaatggaggctggatcccaagctgcaactcttgttactgacattcgcaagaggaagggtctgaaggagcagatgactccactctctgagtttgaagacaagctttaaattttttaaactgcttttattatgaacttatctaagtgataaaaacttggttaccgtaggttttaaagtccagtatcttgagttttgtttgtggttttatcagtgagttgttgtacttcgtattatttgtcgttgcatcgatgtatttttggtccataggattttgcatcgatgctggtcaaactactatttgcgcccaatttgcnnnntnnaa

SEQ ID NO: 8061 - DNA, 682 bp, Zea mays
  misc_feature (24)..(24): n is a, c, g, or t
  misc_feature (208)..(209): n is a, c, g, or t
  misc_feature (257)..(260): n is a, c, g, or t
  misc_feature (346)..(347): n is a, c, g, or t
  misc_feature (527)..(527): n is a, c, g, or t
  misc_feature (586)..(588): n is a, c, g, or t
  misc_feature (658)..(660): n is a, c, g, or t
  misc_feature (662)..(662): n is a, c, g, or t
  misc_feature (672)..(673): n is a, c, g, or t
  Peptide Sequence Number=SeqID_13386
  Probeset Number=SeqID_22464
gactcttattattaacacgatagnactctgagccccaaattctccgttttctcttctcccatcgattccatttcttactatttttcgtcttccttgattccaaagtcatcaataaagatcgcgattgtggtgttagggtttcttttcgtttgtttaatttgttgtgtgcgatgaagatcgaggaattggaggatgcagagggtaattnngatgaagaagagaattacgagaggcaaattgtgagggttgatgctaannnngcgttggtgggagcaggtgcacggatcctgttttatcctacacttttgtataatgtgcttcgtaacaagattgaaactgagttcanntggtgggatcaaattgacgagtttttattactaggcgcagttccattccccaaggatgttcctcacttgaagaaccttggtgtcggcggtgtaattaccctgaatgaaccttatgaaactttggtgccatcatcattgtatcatgctcatggaattgatcatttggtaattccaacaagngattatctatttgccccctcatttggggatatcagccgagccgtgcagttcattcatcnnnatgcaacttgcggtaaaaccacttatgttcactgtaaagctgggcgggggaggagtactacaattgtgcnnngntatctggtcnnatacaagca

SEQ ID NO: 8062 - DNA, 751 bp, Zea mays
  Peptide Sequence Number=SeqID_13387
  Probeset Number=SeqID_22465
cattgggtccctcgaggccggccggttccttctttctcactcgagtctgctctagggttttttcccagccgccgtcgccgtcgttctgccctcgtatcccctccctcgactccgtgacacccatatgacggctcagaccgcggaggagctcgccacccagatcgagcggcataagctcgaggagcataacaccgaggcagatgaacttgtggtggaggatgaggaggtggatcatgaggaccatgacgatgatgacgagggtgatgatgaactccatggggatgtcagtggaagtcaaagcaatagcaggagtgacaagaagagccgcaaggccatgctgatgcttggcatgaagcccatcactggtgtcagacgcgtctctgcaaagaaaagcaagaatatactctttgtcatctccatgccggatgtgttcctgatgccgaattccgactcgtatgtgatattcggcgaggctaagatcgaggacctcctctcgccgctgcagacccaggcagcagagcagttcaaggctcctgacttgagccagatgatctctaatccttagacttctggtgcggtacaggatgactatgatgtggaggtcgacgaaactgctgttgaggccaagggcattgagctggtgatgagccaggcatctgtttctaggtccgaggatgtcgaggtcctctaggcgtctaatgtggacattgtcactgccatcatggatctgacgacctagggcgatatttct

SEQ ID NO: 8063 - DNA, 721 bp, Zea mays
  misc_feature (503)..(503): n is a, c, g, or t
  Peptide Sequence Number=SeqID_13388
  Probeset Number=SeqID_22466
tctcaggcatggtgacctcgctcccgcccaaggaagcctacctcttcaaaggcatcgtcgaatcctacgagactaagcaatataagaaagggtttatggctgcaaattccatattaaaaaagtttccagagcatggggaaacactatcaatgaaagggttgacgctaaactgcatggacccaacatctgaagcgaacgagcttggtctactaagtctgaagaatgatctgaaaaggcatgactggtgacatgttcatggattgctttatcggtctgatatagaatacagataagctatagaacgttactcacacgcattgaggatcgatccagataacatataaattcttccagacttgacccttctccaggcacagaagaagcacttgactggctactctgagactaagcaacaacttttgatcctatagtcacatcaccgcatgaactggattggtattgcagatgcccatcattcgaattcaaatccttccaatgaccancaagcttggcggctgccaaggaacaccctggagaaggttttccccccaaaaaggagcgtttttgacccctggacctgtttgtttgaacaaaaaactttttttttaaaaaatggggaattctcaaaaaaaccccttttgggaaaaaccaaaaaaaaaatattatccttttttttttccgccccgggatttttccttataaaaaaaaaaaaagccccccc

SEQ ID NO: 8064 - DNA, 681 bp, Zea mays
  misc_feature (145)..(146): n is a, c, g, or t
  misc_feature (167)..(169): n is a, c, g, or t
  misc_feature (571)..(571): n is a, c, g, or t
  misc_feature (601)..(603): n is a, c, g, or t
  Peptide Sequence Number=SeqID_13389
  Probeset Number=SeqID_22467
gagaagcctctttctcttttcttttcccaccgattttgcctcattcccatgttttttttccaggatctcttgccactgctccagcacctcgttggaaaaactcctcaatcctcagaaaaagcatccttctttcaacaatccatgnngggattcaagttagtggaggnnncgagtcagaactgtgtcgagacgagtcagccgcgttcgttctcaagttcgttgccatggcatcaattctcttggcgggcatggccggaatcgccatccctctcgtcggaaaacatcgccggttcctccgtaccgacgggaacgtcttcgtggcagcgaaagctttcgcggcgggggtgattcttgccaccggtttcgtacacatgctctccgatgcatcagaggcgctcgaaagtccttgcttgccggcattcccgtggcacaagttcccgttcgttgggttcttcgctatgatggcggcgcttttcactctcctccttgacttcgtcggaactcagtattacgagcgtaaacaggggatgaatcgtgccgccgacgagctaactcgggtcgggtcgtcagnatccgggaacggagactggtcttccgggannntgtttggtgaagaggaaagtggtggaatgcacatagtggggatgcatgcacacgtggcgcaccatagacataaccacc

SEQ ID NO: 8065 - DNA, 706 bp, Zea mays
  misc_feature (358)..(359): n is a, c, g, or t
  misc_feature (409)..(410): n is a, c, g, or t
  misc_feature (543)..(544): n is a, c, g, or t
  misc_feature (556)..(559): n is a, c, g, or t
  misc_feature (611)..(613): n is a, c, g, or t
  misc_feature (624)..(624): n is a, c, g, or t
  misc_feature (653)..(656): n is a, c, g, or t
  misc_feature (658)..(663): n is a, c, g, or t
  misc_feature (665)..(665): n is a, c, g, or t
  misc_feature (694)..(695): n is a, c, g, or t
  Peptide Sequence Number=SeqID_13390
  Probeset Number=SeqID_22468
gaggtccgcactaacagcactactcactcactcactaaacacccattttcagttacagttcagcttccttcaccgccggcgattgttgataactgttccgaaagggctattgagataaacgatggcaactatgacggcatcttatgtggtgtcaagaagcgcgtgcctcaaccaccatggaaatatgagaacagaggccaaagggaatttgcctcagataactctcaatacccaggcattgacctatgttgggttgagatctctgaacaagttgcacgtgcgaacggcacgtgcacgtgctaccaaaacctcttcttcatcgatggcaagtgataaaactggggggagtgagaagaannttttggggaagatattgtgtgggatgaacgtggtgtttgtgggagctganntaggaccttggagtaaaactggtggacttggtgatgttcttggaggacttccacctgctttggccgcaaatgggcatcgtgttatgtcagtttcaccgcgttacgaccaatacaaggatgcatgggacactannatgctggtcgannnnaaagttggagataaaatagaaactgttcgtttctttcactgctacaagcgannngttgatcgtgnttttgtggatcacccaattttccttgagnnnntnnnnnncnagacgggatcaaaactctatggcccgaannctggacaggat

SEQ ID NO: 8066 - DNA, 591 bp, Zea mays
  misc_feature (572)..(578): n is a, c, g, or t
  misc_feature (580)..(581): n is a, c, g, or t
  Peptide Sequence Number=SeqID_13391
  Probeset Number=SeqID_22469
ggtcaaactgcagtcctcactttcagaagtcaatgagattgttaagggggtaaggtcagatgtttcaaatgttgtcagtgctgacgaatttgagtacaaagatcctgtggatggttccatttcatcacatcagggcatccgatatttgtttgaggatggatcactattggttttccgcctctctggaactggatcagaaggtgcaactattcgactatacattgagcaatatgagaaggatccatcaaagactgggagactttcacatgaagcacttgctcctcttgtggaagttgcattgaaacttcccaagatgcaggaatttaccggtcgatccgctccaacagtcattacataaatgcgtgctattggagatcggttagacctaaagcttcaccaagtcatttcttcttgtcagtccacatttcaatccagtgttagtcttatgagtagccaacctgtattgttggttgtttgcagcccttgctatgggcacatgagtggattttaaattacttttaactaaattttgatgtgctgaataattcgaaactgccgagtgctgatttttnnnnnnnannttatatcttt

SEQ ID NO: 8067 - DNA, 569 bp, Zea mays
  Peptide Sequence Number=SeqID_13392
  Probeset Number=SeqID_22470
tagtgccattatcacgcagttcctcccgccagttacttcaatgggcttcgaacatccatccgtgcaagcttataggctacaactagcgcttgcggcgagcgccttacaacagtcaattgctcaattgcaacatcaatccttggcacatctaaccatacaacccatagcaacgcaacaacaacaacattgtctgccatctctgagccacttagcagtggtgacacttgtcgcctacttgcaacagcacgtgcgtgcatccaagtcacctgttttggcgaccgtagctgcaagccagcagcaacaacagctgcaacagtatatgccagcgttcagtgaattagccatggatgagacctgcagtcttcttcgagcagctttcatctagagcagctctctgtgggcaatgcagcatacagtacgtacaacaacagatgtctgcaacagatctgtacaagctaaaactcatcagttagttatggcaaagagatagggcttgctagccacagttgcttccattaaggcaattgcatggtgtcgagctcagctgcgtacctggccgggcgcccggt

SEQ ID NO: 8068 - DNA, 513 bp, Zea mays
  Peptide Sequence Number=SeqID_13393
  Probeset Number=SeqID_22471
attcaaccagcccggtgcgcacgctgttgaacgcgctcgacgcggtgctggagaacgaatcgctgcatcgggagtggatcgatgccgacgttgacgtcagtttcgcggcgccgcgatggcgcaagctcgtgcggcgctcccacggcgaaggttcaccgaccaatcgccgctatctcgaactctgcgtgctgtcgtacatggcagaggaactgcgtgtcggcgatctgtgcgtgtccggctccgacgcgtacgcggactatcgcgacaacctgctgccgtgggggcaatgcgagcagcaactggtggaatactgcgagaagctcggcatcccaacgaccggccccgaatttgtccgtcatctccggaaatggttggcggacgccgccagcaagctagacgaggaattgccctgcaagcgcgagcatgtcgtgatcgatcgcaacggtgaaccgatcctgcgcaagaccgtcgcgaaggagattccggcgagcgcgatcgcgctgcaggtcgact

SEQ ID NO: 8069 - DNA, 684 bp, Zea mays
  Peptide Sequence Number=SeqID_13394
  Probeset Number=SeqID_22472
ccccctcaaagtgtacattggcactggcaatcatgcgaaggaggtacaggcgcgtacgacacgaggtgttaccatgaggcgcgagaggtacagaagaagatgccacagcgatacattttttctttttagtgagagcagtgtcctgctggcatgttcaggaaccaccgcatggggactggaagccagcagaactctctgctcacaacaagagaggaaagcactgctatgaagacgattgactttggtcgcgcacagtctattacaccaaacgaaaggctcaatgatactgccggaagggcttattatggtgctccagaggatctacacagatcatacaggatggaagcacacattcggaggataggtgttataacatacattctgctctgaggcagaagaacattctgggcaaggacagaatctgggatcttgcgggccgtattgagggctgatcccaatactgacgatgcaccatgggcttcactatcgggtgaggctaaggattttgagaagagatatgctgaacaaagcataccgcaaaagaatgactgctgaccaagcactgactcacccttggttacgagatgaacaaaggcaaattccattggacatactcattttcagattagttaagcagtatctccgtgctactcctcttaaacgttggcattaaaggcactatct

SEQ ID NO: 8070 - DNA, 682 bp, Zea mays
  misc_feature (171)..(173): n is a, c, g, or t
  misc_feature (409)..(410): n is a, c, g, or t
  misc_feature (490)..(491): n is a, c, g, or t
  misc_feature (496)..(496): n is a, c, g, or t
  misc_feature (517)..(518): n is a, c, g, or t
  misc_feature (558)..(559): n is a, c, g, or t
  misc_feature (569)..(570): n is a, c, g, or t
  misc_feature (590)..(591): n is a, c, g, or t
  misc_feature (602)..(602): n is a, c, g, or t
  misc_feature (604)..(605): n is a, c, g, or t
  misc_feature (642)..(642): n is a, c, g, or t
  misc_feature (644)..(645): n is a, c, g, or t
  misc_feature (658)..(662): n is a, c, g, or t
  Peptide Sequence Number=SeqID_13395
  Probeset Number=SeqID_22473
agcctcaaccctttcgcggagaagagaacgcgacgtagccatggggaggagacctgcaaggtgttatcgtcaaattaaaaacaagccataccccaagtcacggttttgccgtggtgttcctgatcccaagatcagaatttatgatgttggtatgaaaaagaaaggtgttgnnnagtttcctctctgtgtccatctggttagttgggagaaggaaaatgtttcaagtgaggcactggaagctgctaggattgcttgcaacaaatatatgtcaaaattcgctggaaaggatgcattccacttgagagtcagggtacatccattccatgttcttaggatcaacaagatgctttcatgtgctggagctgataggctccagactggaatgagaggagcatttggaaagccgcanngtacatgtgctagagtggctattgggcaggtcctcctttcagttcgctgcaaggacagcaacagccatcatgcacaggannccctncgtcgtgccaagtttaagttnnctggtcgtcaaaagatcattgttagcaggaagtggggatnnaccaagtttnnccgtactgattatctgaagnncaagtcacaanannagattatgcctgatggagtacatgcaaagcttcttgngnnccatggaccattnnnnnaccgttaacctggaagagct

SEQ ID NO: 8071 - DNA, 1744 bp, Zea mays
  misc_feature (54)..(54): n is a, c, g, or t
  misc_feature (134)..(134): n is a, c, g, or t
  misc_feature (136)..(136): n is a, c, g, or t
  misc_feature (197)..(197): n is a, c, g, or t
  misc_feature (241)..(241): n is a, c, g, or t
  misc_feature (328)..(328): n is a, c, g, or t
  misc_feature (766)..(766): n is a, c, g, or t
  misc_feature (1115)..(1115): n is a, c, g, or t
  misc_feature (1158)..(1158): n is a, c, g, or t
  misc_feature (1487)..(1488): n is a, c, g, or t
  misc_feature (1536)..(1536): n is a, c, g, or t
  misc_feature (1538)..(1538): n is a, c, g, or t
  misc_feature (1541)..(1542): n is a, c, g, or t
  Peptide Sequence Number=SeqID_13396
  Probeset Number=SeqID_22474
cgcctctccccgtctcgcctctcctctccttcctctctccccacctcccacctntccatctccctctcacctcttctccttccttcaccccgtcgtgctgctccctcatcactattcactctcctccctttctntntctctcacctcagctcttcatcgccagtcaccccctgccacaccacgagtcctcagctccntgtctcttcccgctttcccctctcctcctcctcctctctctcancctctctcccgccccttcacgccactcctcctccccctcatctcctccctcgcccccctcgcctatcttctgctctcccctctctcntctctctctccctcacattctgttctctccctcctccactcgcctttcttcctcaccctcgctccctctccaccctcccctcctcactctctctctcagctctcctctctcatctctctccactctaccttccgcctccgacacacctaccctcccctccacacccccatctcatcctcttcactctccccttctcctcttctccccgtcccactctctcctatcctccccccccccccacctcctcctctccctctctcctctcccttcccctactcccacctatcccctcccccacttcctccttcctcctctcgtcccctctcctcttctccgcctatttgtccccctcccttctctcctgccactcctccactcctatcatcctccccccccccctcccgctctccccccctcctcgtccttaatcctcctcanccccctcccctcttctcgcctccctctccctcctccctccccccctctccactcattccctcccccctctccctctcccctcctcctcctactaccttccacccttcgcctcgcgcaccactccttcccccctctctcctcctcctcccctcctcaccttcctccctcctccctcatgcccctcccgtcccccccctccccttcctttctccccctctcccccctccatcctctctttctccccccctccctccctccctccctcctctactcccccccctccctcccctcccctcccctcctccccctccctcccccactcctttctttctttactccccccctcctnctctccctcccccctcttcctccctccctctcccccctccccnccccccgccctctccctctcttttctctctcctcacttccatattttctttctttttctccccccccactccctcctccctctctccccccccccttcctcctcctccccctcccaccccctccctcctctccttcttccccctccccccccccccctcctcccctccccctcccccccccccctcccctcccccctccccccccctctccccccctccccccctccctctccctccccacccccccccccctcccccccttctctctccccccccccccccaatccccctccccccccctcttttttcccgcacgcaaacaaataatnnccccccccccccccccccctccctcctcccccccccctcctccccctntnctnnccccccccccctcttcttttttgcgcaatattttttttttctccctccctccccccccccttttccccccactcccccttcactctcccccctccccccctctccccccctcctctcaccctccccccccctcccctccccctctccccctcccccccctcccccccccgcccccccccctcccccccctccccctcctctc

SEQ ID NO: 8072 - DNA, 583 bp, Zea mays
  misc_feature (315)..(316): n is a, c, g, or t
  misc_feature (378)..(379): n is a, c, g, or t
  misc_feature (446)..(448): n is a, c, g, or t
  misc_feature (473)..(474): n is a, c, g, or t
  misc_feature (538)..(540): n is a, c, g, or t
  misc_feature (543)..(545): n is a, c, g, or t
  misc_feature (549)..(550): n is a, c, g, or t
  misc_feature (559)..(559): n is a, c, g, or t
  misc_feature (564)..(565): n is a, c, g, or t
  misc_feature (572)..(574): n is a, c, g, or t
  Probeset Number=SeqID_22475
gaatccacaaaaatatattacatagcaaagtaaagttttccaattccattcctctctagcaagaaagaatggctaaagatgttgaggttgcagaacacggtgaatactcagctaaggactaccatgacccacctccagcaccattgattgacccaaaagagcttacaaagtggtctttgtacagagctgtgatagcagagttcatagcaacccttctcttcctttacatcactgtgttgaccattattggttacaaaagacagagtgatacttccattacaggtaacactgagtgtgatggagttggtattttanncatagcttgggcctttggtggcatgatcttcatacttgtttactgcactgccggtatctcannaggacacataaaccctgctgtgacatttgggctgttagtgggacgcaaggtgtcacttgtaagggcnnnactttacatgatagcacagtgcttnngtgcaatctgcggtgctggacttgccaaggggttccaaacttcatactacaacaggtataaagnnnggnnnaacnnagtctcagncgggnntaacaannncacggcttt

SEQ ID NO: 8073 - DNA, 685 bp, Zea mays
  misc_feature (154)..(156): n is a, c, g, or t
  misc_feature (171)..(172): n is a, c, g, or t
  misc_feature (316)..(317): n is a, c, g, or t
  misc_feature (398)..(398): n is a, c, g, or t
  misc_feature (525)..(526): n is a, c, g, or t
  misc_feature (530)..(533): n is a, c, g, or t
  misc_feature (594)..(595): n is a, c, g, or t
  misc_feature (632)..(634): n is a, c, g, or t
  misc_feature (644)..(645): n is a, c, g, or t
  misc_feature (661)..(662): n is a, c, g, or t
  misc_feature (671)..(672): n is a, c, g, or t
  misc_feature (679)..(680): n is a, c, g, or t
  Peptide Sequence Number=SeqID_13397
  Probeset Number=SeqID_22476
ccaaaacataaacacaacacagtgtggttggttgtgaatcgaggcatagaaatggatccagtgagcctgtggggaaatactccattagcgacagttgacccataaatccacgaccttattgagaaggagaagcgtcgccaatgccgaggaatcnnnctcatagcatcggannaacttcacatcgttcgcggtgatagaagctctcggaagcgccctcaccaacaagtactcagagggcatgcccggaaaccgttactacggtggcaacgaattcatcgaccagatcgaaaacctgtgtcgctcacgcgcccttganncctttcacttggaccccaccaagtggggtgttaacgttcaaccttattccggttctccggccaacttcgccgcctacacgncggtgcttcagccacatgaccgcatcatgggtctggatctgccctccggtggccacctcacacatgggtactacacctctggtgggaagaagatctctgccacctcaatctactttgagagtttgcnntatnnnntgaattcaagcactgggtacattgattatgataggttggaggagaaagccttggattttannccaaggttgatcatttgtggtggcagtgcttatcccnnngattgggatnntgctagattcagacannttgctgatnngtgtggnnctctc

SEQ ID NO: 8074 - DNA, 421 bp, Zea mays
  Peptide Sequence Number=SeqID_13398
  Probeset Number=SeqID_22477
gctcgcgccgcctcctatggactttttttgctccctgcacgccacatacctacgtaactgcgtacaataactagttgctgaggtcaataaggcgtctcccaacaaggacctcctcaactaccactataacctctttgagattgctcgcacctactagaagaacagcgcgtcgtgcctgaccatactgaccgacaagaagcacttccagctgagctttgagaacctatagaccgcgcgcagctccggtgtaaactgccctctgctctgcaaggagttcgtcatcaacgcctggcagatctactacgcgcgctcgaaaggcgcggacgcggtcctcctgatcgcggccgtgctgccggacatcgacatcacctactttcttcgcgtctgcaagagccttgggatgacagctctcgtcgaggtt

SEQ ID NO: 8075 - DNA, 765 bp, Zea mays
  Peptide Sequence Number=SeqID_13399
  Probeset Number=SeqID_22478
tgcagggcaagctggtgctcgaagatcgcgcactcaacgagatcacccggctgccggcaccgcacgatgtggcattgacccccgcacagcgcggccagctgatgcaggcgattcaccagcagccggccggaacactgtggctgggcagtcagctggccagctgggttaagttaaaaaatgtcgatgcctggctaatcaacgtgcagagcctgcgccagggattgtcgcaggagctggggcgggtagcgctgtttctgttgggcatgtggctgctgttcgtgctgttactggtgctggcgcatcaggtgattttccgcctggtacggcggctggaggatctctcggcgcgactggcctggcgcgctaattatgacggcctgacgcgcctgcttaatcgcagcgcctttttcgaccagtttatcgcgctggcgcggcgctgcgaacagcagcaacagccgctggcggtgatccagctcgatatcgatcatttcaaaaaggtcaatgatagctggggccatcacgcgggcgatcaggcgctgatgcgcgtggccggcgtcatcaaacatacgctgcgcccttacgacgtggccggacgcatcggcggcgaggagttttgtatcgtgctgccgcacaccacgctggctgaggcgcagggcgtgtcggagcgtatccgcagccggctggcggccaaaaccattctggtcaacgccagcaccacctttagcgttacgttgtcagcaggtgtcagttgcagtactgagcagg

SEQ ID NO: 8076 - DNA, 723 bp, Zea mays
  Peptide Sequence Number=SeqID_13400
  Probeset Number=SeqID_22479
atggtaaagtcctgcaaggcgtgccagctccatgcaaagcggatacacacaccagctcaggctctgcagatgattccgccctcctggccattctccgtatggggggtggatatcctgggaccatttcccacggttgtcggcgggtaccagtacctcttcgtcgccatcgacaagttcaccaagtggccagaggccacccctgtagtcagcagcacccagggtgccgctgtcaccttcctcaaatccatcgtctgtagatgtcggatcttccaggagtattgcgagggcatcggtacccagctctgcttcgcgtacgtggcttatcccaggagcaacggtcaagtggaaagggcaaatgcacagatcttcataggactcaagacatgcacctatgactgcttgaagaagcatggagcaaattgggtcagtgagcttccgtccgtgctatgggggaaccggacaacacccagccgagctaccggggagaccccgtactccctggtgtacagggctgaagcctgccttcccccggaaatccttttggactccccacgggtccaatcttttgatggatctatgcaggaactgctacagcgcgaggacgtggaccctatcaacgaacgcagatggcaggcggcgaccagaaatgcacatggcagccaggcgctcaggcgttaccaccaatggtccgtgcatagtagggagccccgggtcgggacctag

SEQ ID NO: 8077 - DNA, 825 bp, Zea mays
  misc_feature (221)..(221): n is a, c, g, or t
  Peptide Sequence Number=SeqID_13401
  Probeset Number=SeqID_22480
tttgcattcagtgagtctcatacagagaggatggtgattttgacgttggggtctcttcctgtttacttcacagcagcttttgttcagtagctccgtaaggttgagatgccaagcttgtggatatctctcaccttggtatacatggaatcgtgcatcacgcacgtctcctattctaactgtggagttcacatttgagccattctcctttaaatctttttcanctttcaccttcatcacatatacatctcattccacttcatcatactctccatctatacacaattcatcatacacgccatctatacacaccgctccttgtaactgtggaagtccgcttttgcggcattccacgttttcacacttttacactttttcgcacttaaagtcattacaccctcattctggtggatattactcatgtcgtacatcaagaatttcggttgttgtgacttccgcatcttgcattgttgatacaggcacttgcatcattggaggaagccctccaagtagtatcattgacacaggctctcatggaactcgtttcatttgtatctcttttccttcaatctctggaacatgcgattactggagaatccgacttacattgatatggggcttcattggatggtggggaactgttgagaggagcttttggtacaatcagtatttgcagtagcatttcagggtttgatcatcacatgatcctttttcaggcaatttgaagtgtcctatagtctctagtaatatttatgatggatacttccttttatttaatgttgttgtttcaaaaaatttcttgatcttaaataagatttagtagtcctt

SEQ ID NO: 8078 - DNA, 741 bp, Zea mays
  Peptide Sequence Number=SeqID_13402
  Probeset Number=SeqID_22481
actcaacccttccccgtggcccgggctcgccttctgcctgtctccttccagctacggctctcctgatttacccatcggatcagcacgccgcaagacgaaccctgactccaattctctcgtgcgagtgacatctagtgttccaaactccttcgagtgagtacaggccaaggtacagtgcgacatggattgatcaccaacaggcggacaagaacgaagaggtccccgagcttgctccttttgacccaaccatcaacaggaataaaaacagtgtgttaataccatagtcatcagatgacgtggatatacttgtgagagaagacagacagcttgactggaaacgagtctatagagccaagctttgcggcgtgaaaaaaaagaagaagaaacatgtgggacttgattcttctcttatggagatcggagacgattatgtcacaggtgacgatcgagttatagaggatggtgaaggagaagggattgtgctcgctggtgccgctgccaccagatacccttgggaaggaactgacttagactataagtatgaagatctgcttgactgagtattcgacattttgcgtgagaacaacccagatcttgatggtgatagaagaacaactgttatgacgccccctctagtactcccggtgatagaacaaagaagacagcttttgtgaacttcatggcacttgtgccaaacactgcataggcaccagagcatgtggatgatgttcttgcttgctg

SEQ ID NO: 8079 - DNA, 850 bp, Zea mays
  misc_feature (10)..(10): n is a, c, g, or t
  Peptide Sequence Number=SeqID_13403
  Probeset Number=SeqID_22482
gccggccggngtttcgaagagagagtcctcactgcagtgatttttgcatctacgatgcttgcaagatgtctgttgccgtttccttatcatatcatagtcgtcaaattggtttcttagttcccgaccgttagtcgccagaccggaacacgacagttgttcgtttgcacccgcttctctacctgtatgctagctccacgcctgaggctatcaggacgattcgactcgctgatcccgtctctggccgccgcgctcgatgggatgcgagcggcagctatggatccataacaccaacgacccgagtaatgaaagataatgcggcttctggaccataaaatccagcgccgccgtgtggaagaactactatggcgtctacgtcttaaagggagggctcatcatgcttgaggattatcatctagtgctagatctagctgagatccacatacaatggatgccttgaagcgttgagtatgagtgccgaaactgcgcctacgcattcttttacgtcgctcatgatgtctatcacattaaatgcgctgactctctccgcgcgcgtgggcgcaagacatctggtattgggcgtttctctacagctgagcatgacagaggaggcgctgagacctttggtgatccacgggcgtttgctgtcaagttctacacaagagagggtgactttcgatatcgcgtgtaacaacatgcctgtgtttttcatacgagatgtgatgaaattccctgacatgctgcacgctttcaagccgaatccaaagaccaatttgtaggagaactggagaatagtagatttcttctcttcacatccagagagcctacacatgttcaccttcctctttgacga

SEQ ID NO: 8080 - DNA, 581 bp, Zea mays
  Peptide Sequence Number=SeqID_13404
  Probeset Number=SeqID_22483
ggcaagctaactgtgtgactcagaccacttcagcttcttgagtacagtgggtttgaagatggtcagatctgctggctttaaactgtgacgggtcacataaccgtgaagacaaaaattaaaactataagaaaaaggaaaaaaaaaaaaaaagggggggccgtttaaaaatgtcctggggggggccaaaattaaccctgccccatttttttggaaaaagggggcccttttagggggagttttaaaaatttgggccgggcctcttttttaaaagccttggacacgggaaaaaagatgagaaaattaaaggcttcatatgggatctcattactccaactgaagacgggcagacacgagagttacagaatcatctaggcctgtcatccccggtaccgagaggtagaaaagggaagaaagtaaagactcaaacaagctcatttgatatacaaaaagcagaatggcttcgaaaatacaatcctgagcaactacttcaagatgaatgctacaaaaaacatataaaacaccactgtaataaagttttgcttcgtgtaaggatgctgtattatctaaagcaagaagtcatt

SEQ ID NO: 8081 - DNA, 667 bp, Zea mays
  Peptide Sequence Number=SeqID_13405
  Probeset Number=SeqID_22484
ccggccgggccatcccatccccgctcgcctctcctctcctcgccccgctctagacgatcgatggccgcgacggcggcggaggagatggataggatggtgcaggcggagtgccaggaggggaaacaagggatgaggaagaggaagcgccacgggctggcggagtaccgggcgctgccggcttacctgcgggacaaccagtacatccaccgccactaccgctgcgagagctcgctcccccaagttctgctctccgccttctccatccacaactagaccctcaacagcgctggacgtcgatcttataggatttttcctctttctcgctctgaccatatacacagcaacacgagctccaaatgcaatagatatccggagcttgcagcatttgccagatcgcactgagaaacgctcgatattcataagattcaagcagagcttgtgtcatgtcttccgaccgtacctcacttttctcatctacaaaagctgcaggatgagctgcatacctcttggaattctatggagggacatccatctctgtcccggtggcatctcctggagttactcgcacattgtctgccacacagatttacccatccccatgaaacaagtatgtctgttcttcaaagcatgaaggcagatctagcaagcctgattgcccgcaactgat

SEQ ID NO: 8082 - DNA, 2303 bp, Zea mays
  misc_feature (385)..(385): n is a, c, g, or t
  misc_feature (393)..(393): n is a, c, g, or t
  misc_feature (442)..(442): n is a, c, g, or t
  misc_feature (523)..(523): n is a, c, g, or t
  misc_feature (538)..(538): n is a, c, g, or t
  misc_feature (560)..(560): n is a, c, g, or t
  misc_feature (596)..(596): n is a, c, g, or t
  misc_feature (618)..(618): n is a, c, g, or t
  misc_feature (686)..(686): n is a, c, g, or t
  misc_feature (814)..(814): n is a, c, g, or t
  misc_feature (845)..(845): n is a, c, g, or t
  misc_feature (871)..(871): n is a, c, g, or t
  misc_feature (944)..(944): n is a, c, g, or t
  misc_feature (955)..(955): n is a, c, g, or t
  misc_feature (962)..(962): n is a, c, g, or t
  misc_feature (979)..(979): n is a, c, g, or t
  misc_feature (986)..(986): n is a, c, g, or t
  misc_feature (1010)..(1010): n is a, c, g, or t
  misc_feature (1018)..(1018): n is a, c, g, or t
  misc_feature (1027)..(1027): n is a, c, g, or t
  misc_feature (1036)..(1036): n is a, c, g, or t
  misc_feature (1041)..(1041): n is a, c, g, or t
  misc_feature (1071)..(1071): n is a, c, g, or t
  misc_feature (1091)..(1091): n is a, c, g, or t
  misc_feature (1103)..(1103): n is a, c, g, or t
  misc_feature (1116)..(1116): n is a, c, g, or t
  misc_feature (1132)..(1132): n is a, c, g, or t
  misc_feature (1138)..(1138): n is a, c, g, or t
  misc_feature (1149)..(1149): n is a, c, g, or t
  misc_feature (1178)..(1180): n is a, c, g, or t
  misc_feature (1195)..(1195): n is a, c, g, or t
  misc_feature (1232)..(1232): n is a, c, g, or t
  misc_feature (1244)..(1244): n is a, c, g, or t
  misc_feature (1247)..(1247): n is a, c, g, or t
  misc_feature (1292)..(1292): n is a, c, g, or t
  misc_feature (1310)..(1310): n is a, c, g, or t
  misc_feature (1350)..(1351): n is a, c, g, or t
  misc_feature (1367)..(1368): n is a, c, g, or t
  misc_feature (1380)..(1380): n is a, c, g, or t
  misc_feature (1385)..(1385): n is a, c, g, or t
  misc_feature (1387)..(1387): n is a, c, g, or t
  misc_feature (1390)..(1390): n is a, c, g, or t
  misc_feature (1408)..(1408): n is a, c, g, or t
  misc_feature (1411)..(1411): n is a, c, g, or t
  misc_feature (1416)..(1416): n is a, c, g, or t
  misc_feature (1434)..(1434): n is a, c, g, or t
  misc_feature (1438)..(1439): n is a, c, g, or t
  misc_feature (1442)..(1442): n is a, c, g, or t
  misc_feature (1464)..(1464): n is a, c, g, or t
  misc_feature (1468)..(1468): n is a, c, g, or t
  misc_feature (1488)..(1488): n is a, c, g, or t
  misc_feature (1491)..(1491): n is a, c, g, or t
  misc_feature (1494)..(1494): n is a, c, g, or t
  misc_feature (1504)..(1504): n is a, c, g, or t
  misc_feature (1511)..(1512): n is a, c, g, or t
  misc_feature (1527)..(1527): n is a, c, g, or t
  misc_feature (1543)..(1543): n is a, c, g, or t
  misc_feature (1569)..(1569): n is a, c, g, or t
  misc_feature (1575)..(1575): n is a, c, g, or t
  misc_feature (1595)..(1595): n is a, c, g, or t
  misc_feature (1611)..(1611): n is a, c, g, or t
  misc_feature (1614)..(1614): n is a, c, g, or t
  misc_feature (1627)..(1627): n is a, c, g, or t
  misc_feature (1630)..(1630): n is a, c, g, or t
  misc_feature (1633)..(1633): n is a, c, g, or t
  misc_feature (1638)..(1638): n is a, c, g, or t
  misc_feature (1643)..(1643): n is a, c, g, or t
  misc_feature (1650)..(1650): n is a, c, g, or t
  misc_feature (1655)..(1655): n is a, c, g, or t
  misc_feature (1662)..(1662): n is a, c, g, or t
  misc_feature (1679)..(1679): n is a, c, g, or t
  misc_feature (1697)..(1697): n is a, c, g, or t
  misc_feature (1710)..(1710): n is a, c, g, or t
  misc_feature (1731)..(1731): n is a, c, g, or t
  misc_feature (1736)..(1737): n is a, c, g, or t
  misc_feature (1745)..(1745): n is a, c, g, or t
  misc_feature (1750)..(1750): n is a, c, g, or t
  misc_feature (1755)..(1755): n is a, c, g, or t
  misc_feature (1761)..(1762): n is a, c, g, or t
  misc_feature (1768)..(1768): n is a, c, g, or t
  misc_feature (1773)..(1773): n is a, c, g, or t
  misc_feature (1782)..(1782): n is a, c, g, or t
  misc_feature (1794)..(1794): n is a, c, g, or t
  misc_feature (1796)..(1798): n is a, c, g, or t
  misc_feature (1807)..(1807): n is a, c, g, or t
  misc_feature (1821)..(1821): n is a, c, g, or t
  misc_feature (1834)..(1834): n is a, c, g, or t
  misc_feature (1840)..(1840): n is a, c, g, or t
  misc_feature (1851)..(1851): n is a, c, g, or t
  misc_feature (1854)..(1854): n is a, c, g, or t
  misc_feature (1864)..(1864): n is a, c, g, or t
  misc_feature (1870)..(1870): n is a, c, g, or t
  misc_feature (1880)..(1880): n is a, c, g, or t
  misc_feature (1894)..(1895): n is a, c, g, or t
  misc_feature (1908)..(1908): n is a, c, g, or t
  misc_feature (1917)..(1918): n is a, c, g, or t
  misc_feature (1923)..(1925): n is a, c, g, or t
  misc_feature (1934)..(1934): n is a, c, g, or t
  misc_feature (1945)..(1946): n is a, c, g, or t
  misc_feature (1951)..(1951): n is a, c, g, or t
  misc_feature (1959)..(1960): n is a, c, g, or t
  misc_feature (1973)..(1973): n is a, c, g, or t
  misc_feature (1982)..(1982): n is a, c, g, or t
  misc_feature (2015)..(2015): n is a, c, g, or t
  misc_feature (2024)..(2024): n is a, c, g, or t
  misc_feature (2027)..(2027): n is a, c, g, or t
  misc_feature (2042)..(2042): n is a, c, g, or t
  misc_feature (2053)..(2053): n is a, c, g, or t
  misc_feature (2068)..(2068): n is a, c, g, or t
  misc_feature (2076)..(2077): n is a, c, g, or t
  misc_feature (2080)..(2080): n is a, c, g, or t
  misc_feature (2085)..(2086): n is a, c, g, or t
  misc_feature (2089)..(2089): n is a, c, g, or t
  misc_feature (2116)..(2116): n is a, c, g, or t
  misc_feature (2119)..(2119): n is a, c, g, or t
  misc_feature (2123)..(2123): n is a, c, g, or t
  misc_feature (2127)..(2127): n is a, c, g, or t
  misc_feature (2131)..(2131): n is a, c, g, or t
  misc_feature (2134)..(2134): n is a, c, g, or t
  misc_feature (2140)..(2140): n is a, c, g, or t
  misc_feature (2143)..(2143): n is a, c, g, or t
  misc_feature (2146)..(2146): n is a, c, g, or t
  misc_feature (2152)..(2152): n is a, c, g, or t
  misc_feature (2171)..(2172): n is a, c, g, or t
  misc_feature (2181)..(2181): n is a, c, g, or t
  misc_feature (2184)..(2186): n is a, c, g, or t
  misc_feature (2192)..(2192): n is a, c, g, or t
  misc_feature (2207)..(2207): n is a, c, g, or t
  misc_feature (2210)..(2210): n is a, c, g, or t
  misc_feature (2222)..(2224): n is a, c, g, or t
  misc_feature (2227)..(2228): n is a, c, g, or t
  misc_feature (2233)..(2233): n is a, c, g, or t
  misc_feature (2236)..(2237): n is a, c, g, or t
  misc_feature (2242)..(2242): n is a, c, g, or t
  misc_feature (2245)..(2245): n is a, c, g, or t
  misc_feature (2254)..(2254): n is a, c, g, or t
  misc_feature (2272)..(2272): n is a, c, g, or t
  misc_feature (2277)..(2277): n is a, c, g, or t
  misc_feature (2280)..(2280): n is a, c, g, or t
  misc_feature (2287)..(2287): n is a, c, g, or t
  misc_feature (2291)..(2292): n is a, c, g, or t
  misc_feature (2300)..(2300): n is a, c, g, or t
  Peptide Sequence Number=SeqID_13406
  Probeset Number=SeqID_22485
atagatgtgttggatggtatgattgtgagtgttgtagtgttgatagatagtgtgctgcggatgatgatgatgtgctcgctacatgaatatgtgtgtgatgtatgtgtgttgtagtgttgttgtgtattcgtgagatgtggtggtgatgtgttgttgtgtgttgtgtgttgttttgttatttgatactatggttctgagtgtaggtgtagtggtgtgttgtgtcggtgtgttatgtgtgtgtgtgttatgtgagaggagttgtgtatgatgttgtagtgtgtgtgtgtgtctgtgtatgtgattgttgattgtgttgttgtgtgtgttgtggtgttgttggtgtgtgtgtgtgtgtggtgttgtgtttatggtgtgtgtggtgtgntgtggtgntgtggtagtggtgtgtgtgtgtgatggatatgtgatgggttgtgtatgntgtttgtggtagtagtgtgtgttgatgaggagaaggtgtgatgatgtgtgtgtgagtagagtgtgtgcgtgtgtgtgttgntggtgtgtgtgttgntgtgtgtgagtgtgtgtgtggntgtgtgtgtgatgtgtgttttgttatgtgtgtgtgnatgttgtttgtgtgtggtgtgnttgtgtgtgtgattgcgtggattgtgtgtgtgtagtgtgtgttgtgtatgatgtgtgtgtgatgtgtngtgttgtgttgtgtgatgtgtgctgtgtgtgtgtgtgtgtgtgtggtggtgtgtgttgtgtagagtgtgtgaggtgatgtgtgtgtgttgtatgtgtgtgtgtggtgagagatgtgtgtgtggtgtgntgtggtgtgttgtggtgttgtgtttgtgtgntgtgtgtggatggtgtgtttgtgtgntgtgtgcgtgcgtgtggttgtgatggtgtgatgttgttgtgttgtgtattgtgtgatttgtgtgtgtttgtgnggtgtagtggnagtgtgnatgttggtgtggtgtgntgattgntgtgtatgtttgtgtgtgtgatgntagtgtgntgtgtgtgntggtggagntgtgntgtgtgtttgtgtgttgttgtgagtggtgntgtgttgtgtgtgtgtgtgnttgtgtgtgtgntgtgtgtgtgtgnttgtgtgtggttgtgntgaggnttgtgtgttgntgtgtgcttgatcgtgtgtgtatgtgtgnnntgtgtgtggtgttgntgtgtgtgtatatgtttgtgtgtgagtgtgtggtggnatgtgtgtgtgntgnttgattgtgatgtggtgtgtgtggtgtgtggttatgtgtgtgtgntgtggtgtgtgtgtgtgntatgtgtagatgtggtgtgtgtgttatttgtgtgttgtgnntgtgatgtgtgtgtgnnatgttgatgtgntatgnantgntggtaggatgagtgtggnagntggtnatagttagatgtgtgtgntggnntgntgagtatgtgtgatgagtgtgntgtntgtgtgtgtgtgtgtgttgnagntgntgtgtgatgntgtgtgnntgtgctgagtgttgntgtgtgatgttgatgntgtgtgtgtgcatgatgtgtttttgnagttgntgtggtgatgtgtgtggtgntgtgtggagtgtgtgntgntgtgtgtgagtgnatntgntgtgntgtgntgattgntgagntgtgtgntgtagatgagtgtgtgntagtggtgatggtgttgnagagctagtgtgntggtgatagcgagctgggtgntgtgnntgtgtggnagagntgtgnatttgnntgtatntgtgntgttgttgntgtgatgttgtnannnatgtgtagntgtatagtgagagnagtgtgagtgagntgatgntgtaatgtgtntgntgatggtggntaggangtgatggtgnttgtgttgtgttgnnttggtgttgttgntgtggtgtnntgtgnnntgtgtgtgntgtgagtgtgnntgtgntaggtggnnatgtgtgtagtgntcatgttgntgtgatgtgtgtcgttatttgctcttgtgttgntgagtgtgntgntgtgtgtgtgtgtgntggtgtgttgntgatgatcgtgttgntgatgtgnntgntgcgnntgnatgttggtgtgtgtctgtgtgatatgntgnttgntgtngatntgnagttgnatntgntgtgantgttggttgcgatgtgagnnatttaatgntgnnntgatgntgtgtgtgtgagatnatntgtgctgtgtgnnntgnncttgntgnntgtgntgntgtgtgtgntgtgtgtgatgatgatgnagtgnagntgtgtgntttnntgtgatantgc

SEQ ID NO: 8083 - DNA, 546 bp, Zea mays
  Probeset Number=SeqID_22486
cccctcttccctggaggggcggactcaaaaggagaagaaagctgcccgtgctcgttccaaagggaaaaactccgacgaagaagcccccaaggccgcccagaagaagttaaaacttgtgcgcacaagccctgagtatgggatgccctcagtgacctttggcagtgtccacccctctgatgtgttggatatgcctgtggatcccaacgaacccacctattgcctttgtcaccaggtctcctacggggagatgattggctgtgacaaccctgacgtaagaaccggtttgcctcagggcggggggctctgggggacaggaagggagttgggtaccagaagggggtaagggccgaagagtgggacctcaggacaggaggaagggagttggaggtggttggccttggacccttcaagaatcctcccacaggatggaataagggaatgctcctgaggactctcaggtgtggggggttcttttctttccttggccccaccctgctgcctgccctctgctcctccaccgtcttccttttccagtgctccattgag

SEQ ID NO: 8084 - DNA, 595 bp, Zea mays
  misc_feature (181)..(181): n is a, c, g, or t
  misc_feature (506)..(506): n is a, c, g, or t
  misc_feature (514)..(514): n is a, c, g, or t
  misc_feature (533)..(533): n is a, c, g, or t
  Peptide Sequence Number=SeqID_13407
  Probeset Number=SeqID_22487
ggcgacccacgcgggcgttgcaatacccatgatgacacacagaagatcggggagaagtattccaactccaacattgaaattcatactttcaatcagagccagtatcctcgcattgggaccgaggacttcttgccacttccaagcaaagggaaatctgggaaggaggggggggatcctccangccatggggatgtgtgcccctctttgagtaacaggggaaaactcgacatcttattgggtcaggggaagggaggtgtcttcgttgctaactcagacaactggggggcgataggcgacatcagtatccaaataggacgatcagatttgcgtaatttctttcctgtgttaatacttttcctgtgtgctttgaattgaaaattgtgtccttaatcaggacagagatcctgagaccatctgatcaataaccagaatgagtactgcgtgggggtgactccaaaaacattgggtgaggtgaaagggcgggctctcatctcttacggaggagngaagtcancttttggggattgcgcaantgcctgaggagcatgtgaatgagtttaaatcaatcgagaggtgtaagatattcaacactaac

SEQ ID NO: 8085 - DNA, 442 bp, Zea mays
  misc_feature (333)..(333): n is a, c, g, or t
  Peptide Sequence Number=SeqID_13408
  Probeset Number=SeqID_22488
ttgcagcaacaaacatctactccattcagccagatagtttgtgcttactttcagcagcaacaattttttccatttaaccaattcgccgcattgaaccccctttgttttttccagcagcaaatactactaccatttggccagttagttacaacaagccccgcttcttttttgacacaacaacaattgcttccgttttaccagcagtttgtggctaaccccgcaacccttttacaactgcaacagttgttgccctttgtccaacttgctttgacaaacccagcagccttttaccaacaacacatcattggcggtgcttcttttagattgcttatnagttgtcattcaataatgaagttttttggctgatgtatgtggccttcctagaaataagaagttatatttccaaattccaaaaaaaaaaaaaaaaaaaagggagagaaaa

SEQ ID NO: 8086 - DNA, 509 bp, Zea mays
  Peptide Sequence Number=SeqID_13409
  Probeset Number=SeqID_22489
ccccccccccttccaaccccctgctacctcccctcccccccccccccaccccccccccacccccccccccccgacccacccccccccccccgcgcccccacccgcccccgcccccccccacccgcccccggcccgcccgcccccgcgccgccccccccccccccgcgcgcacaccacaccacccgcgccccaggcccgccacccccccccccccgcgcgccccgcccccgccgcccccccccccccccagcctcccggccccagccccctccccccctccccccccgccacccccaccgccggcaacgccaggcagcccccaggccagccccccccggctgccccccgtgcgcgtccggcgcgtgccccccccccaccagagctgtcagcactcccgcggtcatgtctaatatgtgctagctgtgtgccttgccaatgaataagctgctgctctctcttttgcatagtttacatctaccattctgtagtcgctataattgttttgtttg

SEQ ID NO: 8087 - DNA, 714 bp, Zea mays
  Probeset Number=SeqID_22490
ttgggaccctcgaggccggccggggagtgatgtttatatgcaaccccgcccgatggatctttctcgctccgccgactccctcggctccgatagcgcagaccgaggccaccgatcgaaccttccctagcggaggggcataccaacctcaatgagcgatggatctgtctgcgacgctacggatgtctcttagcgccgcgttgtttgagatgctgacgcccgtgattgacgtcatcatgaagaacatgaagcctgtttccgacattcctatcctaggaaaggatgtcgccatctgcacgaatccaagtgatctgagtcttgccatgggaagcctgtcgattgtggcacttgtggtaactgccatcgtaaggcatgttgccatcttctttccatactcgaccaagtcagttcctcgtggagcgctgtttcaaagaaccagcttgacagtgttctttgttgttgctgagcttgtctcaaccctgtatcttgcaatgtcgctgctggcaactatcaccgaggaacttcaacgtatcaagaacatccaccacgacatgcactaccaatgtcctactgccaataccgacctgtacggctgcgccgctatcctcacccttgacgctgctctcatgtgacttggttgccagatgctgcccctcaatgcaaatgctgactacccttgacgaggatggcggcaagggagaatatggccagaattat

SEQ ID NO: 8088 - DNA, 993 bp, Zea mays
  Peptide Sequence Number=SeqID_13410
  Probeset Number=SeqID_22491
cagamgctcctggacgcgctgagggcgtycwgaaggaggggcgcagagggcggaggcggcggcggccgcggacccgggagtattgcacyybtkggtacagggcccggggaccccgagctgctcacgctcaaggcggtccgggctatcgaggcggcggaccttgtgctctacgacaggyttktktctaacgacgtgttggacttggtcggggagggctccaggctgcgctatgtcggcaagabsgsgggataccacagccgcacccaggaggagadtcacgagcygctgcygaacyttgcggaggctggttccaatdttgttcgccttaaaggtggcgatcctcttgtttttkgaaggggtggagaagakatggatttcttacagcaacagggaatcaaagttgaaattatcccaggaattacctcttcttyaggaattgcagcagaactaggcattccgctaacccatcgaggtgttgcyaccagtttcagatttttwtyttgacactccagaaatkgtgggacadawccactatatgtagcyggaaawgcagccgahcctbacactacyttggttgtgtacatgggtktgtcaacacttccatcactggcaccaaagttaatgaagcacggkctgccaccagaaaccccttctgttgcagtagarcccgggactacacctcaacaacgaatggkgttcgcgttgttaaaggatcttgttgattaggtcaagtcagccgatcttgtttctccaactctaataattatcgggaaarttgtawccttktcaccattttgggttgagtyatcttaacatgatgcccttaaaattgagawctcgtattcaakttaagccagaagataatacgttttyatgattttagtgatcggacaatacatacttkagtatkcaatatcccagatatkagcagttcgagttggggtcatttatgrhatgcaacmcaggttcgacctggtgtacacaamattcagg

SEQ ID NO: 8089 - DNA, 546 bp, Zea mays
  Peptide Sequence Number=SeqID_13411
  Probeset Number=SeqID_22492
ccatccgagctcttcgtttaccctgcgctgtcacccaccacgcaatactcgctacgagcgctgctggtatgggccgatatcgcgcctgcgctccccaagactgaatgtacgaaactatgtgacgccgccgacgaactcgcgtccttcctcatgcccgccaacgcgtgggccgacctactcagtttcctgtacaagtccatagattccacgtcctccccgccgggattgcaggagtcggcgctcaacatcctggcccggctggcctcccacctcgcggccagcttccccaacctccacgggctcctccacgccgctctctcccacccttcttccgccgatgtgcgcgtcgcggggctcaatgcggccatcagcctcatccagtcccttccttctgccgcggcccgcgaccaatttcaggacctcctcccggccatgatgcgcgctctcgccgagtcactcaactgcgggaacgaaggctcaacccagaaggctctgcaaataatgaacgagctcgctggcgcacatccgcggctcctgcgtccgcag

SEQ ID NO: 8090 - DNA, 614 bp, Zea mays
  Peptide Sequence Number=SeqID_13412
  Probeset Number=SeqID_22493
gctttttttcttgacaaaagaatctgccattattgctgtttctttgaagagttgaagaatgccattgaagatttttgacaccacagtagccacctttgatggggtctttgagaaattccgatcagaggctacacaaaacaaggccaacctcattctcttcttggcttataaagacccttccacctctctcagttggtgccctgattgtgttagagctgagcctgtgatctacaagaagctggaggcttcacctggtgatattgcacttttgagagcttatgttggagacagaccaacatggaggaaccctcagcatccatggagggtggaacctaggttcaagctcacaggggtaccaactttgatccgttgggggaatgatgcagtcaaaggtcgcctagaggaccatgaagctcacctcgaacacaaaattgaggctcttgttgctgacaaatgattgccagtgcatcttagatagttggtaataacatgtggtttaaacagtttatggtgtactctttccagcatttggtccctgatgctaggtttatagctttgatatcaaaacatataataaatattgaatactgataaagcagacagcggttggttct

SEQ ID NO: 8091 - DNA, 699 bp, Zea mays
  misc_feature (28)..(31): n is a, c, g, or t
  misc_feature (592)..(592): n is a, c, g, or t
  misc_feature (694)..(695): n is a, c, g, or t
  misc_feature (697)..(697): n is a, c, g, or t
  Peptide Sequence Number=SeqID_13413
  Probeset Number=SeqID_22494
ggttactcactgcaactgaaaatggcgnnnnaggtgaatggtagtagcgtctacgtggaggtcacagaagaagaagtgaagttgaagcagagaaagggaaaggtaaaagagaccttgcctgaggttcttaaccgtttcgcttcagccattctgtcaccggaacattccttatggtggttctttacttcgccggatcaaggtctccgtcgccgacaacgctcctctccttccagaagcttctagaaactccgttaaaaacgttatcgtctggactcgccaaggcagtcccctccgcgccatacttgtcatatccgttggggcggttacttctgttgccttgacaggaatgcttgtgtttatgcttttctttctggctgcgaccataaatgctattgtcatatcactgctgatgtctttggcagcagctggaggattcttggctcttttctttgcttttgctactgctatatacattggagcattgtcagtggccatatttgtgatttccgttaccacattttggacaattgtggctattctgataaccacaggctggattggattcttttatactgtgtggctgataactagnaagagcttcgggtttgctaaacactcattgtgcgtgactggctctgcaatttcaacttacaccacagctcgacatgcccgccacctaaagcataaagattcnnanta

SEQ ID NO: 8092 - DNA, 1008 bp, Zea mays
  misc_feature (4)..(4): n is a, c, g, or t
  misc_feature (21)..(22): n is a, c, g, or t
  misc_feature (27)..(27): n is a, c, g, or t
  misc_feature (33)..(34): n is a, c, g, or t
  misc_feature (37)..(37): n is a, c, g, or t
  misc_feature (43)..(45): n is a, c, g, or t
  misc_feature (53)..(54): n is a, c, g, or t
  misc_feature (61)..(61): n is a, c, g, or t
  misc_feature (63)..(64): n is a, c, g, or t
  misc_feature (72)..(72): n is a, c, g, or t
  misc_feature (77)..(82): n is a, c, g, or t
  misc_feature (88)..(91): n is a, c, g, or t
  misc_feature (96)..(96): n is a, c, g, or t
  misc_feature (98)..(98): n is a, c, g, or t
  misc_feature (101)..(101): n is a, c, g, or t
  misc_feature (103)..(103): n is a, c, g, or t
  misc_feature (105)..(105): n is a, c, g, or t
  misc_feature (108)..(108): n is a, c, g, or t
  misc_feature (110)..(110): n is a, c, g, or t
  misc_feature (112)..(112): n is a, c, g, or t
  misc_feature (114)..(114): n is a, c, g, or t
  misc_feature (116)..(117): n is a, c, g, or t
  misc_feature (119)..(120): n is a, c, g, or t
  misc_feature (122)..(122): n is a, c, g, or t
  misc_feature (126)..(126): n is a, c, g, or t
  misc_feature (128)..(128): n is a, c, g, or t
  misc_feature (136)..(136): n is a, c, g, or t
  misc_feature (148)..(148): n is a, c, g, or t
  misc_feature (155)..(156): n is a, c, g, or t
  misc_feature (161)..(161): n is a, c, g, or t
  misc_feature (171)..(171): n is a, c, g, or t
  misc_feature (174)..(174): n is a, c, g, or t
  misc_feature (177)..(177): n is a, c, g, or t
  misc_feature (186)..(186): n is a, c, g, or t
  misc_feature (190)..(190): n is a, c, g, or t
  misc_feature (192)..(192): n is a, c, g, or t
  misc_feature (201)..(201): n is a, c, g, or t
  misc_feature (203)..(203): n is a, c, g, or t
  misc_feature (211)..(211): n is a, c, g, or t
  misc_feature (219)..(219): n is a, c, g, or t
  misc_feature (221)..(221): n is a, c, g, or t
  misc_feature (242)..(242): n is a, c, g, or t
  misc_feature (266)..(267): n is a, c, g, or t
  misc_feature (297)..(297): n is a, c, g, or t
  misc_feature (362)..(362): n is a, c, g, or t
  misc_feature (860)..(860): n is a, c, g, or t
  misc_feature (863)..(863): n is a, c, g, or t
  misc_feature (872)..(872): n is a, c, g, or t
  misc_feature (874)..(874): n is a, c, g, or t
  misc_feature (885)..(885): n is a, c, g, or t
  misc_feature (900)..(902): n is a, c, g, or t
  misc_feature (907)..(916): n is a, c, g, or t
  misc_feature (918)..(918): n is a, c, g, or t
  misc_feature (920)..(922): n is a, c, g, or t
  misc_feature (924)..(929): n is a, c, g, or t
  misc_feature (931)..(936): n is a, c, g, or t
  misc_feature (938)..(942): n is a, c, g, or t
  misc_feature (944)..(947): n is a, c, g, or t
  misc_feature (949)..(949): n is a, c, g, or t
  misc_feature (954)..(955): n is a, c, g, or t
  misc_feature (957)..(978): n is a, c, g, or t
  misc_feature (980)..(981): n is a, c, g, or t
  misc_feature (983)..(984): n is a, c, g, or t
  misc_feature (987)..(989): n is a, c, g, or t
  misc_feature (991)..(991): n is a, c, g, or t
  misc_feature (993)..(1007): n is a, c, g, or t
  Peptide Sequence Number=SeqID_13414
  Probeset Number=SeqID_22495
aaanagataaggtataaaaanncgtanaaatanngtngatagnnnaagtatcnnataatancnnaaattaanaagannnnnnttatannnngaacnantgntnanccncncncnanngnnanaagnanaccagaancctggttgaagnttattgnnagtgntatccaaacngtngcngtagcaacnaaantngacaccaancnacgtgcangacacaangntttttcacaaggcgcttgggnaacgcccctgtggaaaagctcaanntgacttcaatacatcaagcaagggcgatgntcgcgttgcacagatccgcattgggatcaatgccttccatatgacttgctccctcgcgtggtccntgcagttcctactggatactcagaacagagaacgacgctgagaatgcctggaacgagctgattgcgagaatgaagtccctcattctgcagtctttcgacttgagggtgacgcagtatgaagacgatatcaaagaacgagactcgcagcggaatttaccagggtggaacttttgcacattcttcattctcaaggagggattggctcagggtttcgagagtgttggccttgtggaagatgcccttgttggctatgacgagctcagcctgggcctggatctggcatgcgcagaacaggcagaatctccgacagcgctggcgcttccgcaatacactgaggaactgaggactgctgccgaaaaggccgcaagggatgcgttcggggacattggcgacaaggaggaaacagtcgacctccaatcgcagcccgtagacagccagctgcaggcgctcgcgatcagcgcaacacgaaaaccctgcagcccgggggatccactagtntanagcggccgncnccgcgtggagnccagctttcacacannnacaannnnnnnnnnantnnnannnnnnannnnnnannnnnannnntnactannannnnnnnnnnnnnnnnnnnnnnannannaannnanannnnnnnnnnnnnnna

SEQ ID NO: 8093 - DNA, 534 bp, Zea mays
  Peptide Sequence Number=SeqID_13415
  Probeset Number=SeqID_22496
tgtgtatcgtagtgggttagccatgccaatgccaagcaaaggaaaggccgtgcaggcagagttcaacctggccactgctaccatctgtataacagccttcgggttagccatgccaatgccaagcaaaggaaaggccgtgcaggcagagttcaacctggccactgctaccatctgtataacagccttcgggatagtcttttggatgactatcaattaccagaaattgtgaggatgccattggaggaactttgcctccagatcaagattttaaagcttggtggcattggctcttttctgagtaaattaatggatatcccagctagagaggcaatatgtctggcaattaaccatcttatggaattgaatgctctagataatcatgaagaattgacccctttggggtttcacttggcacgattaccagtagaaccacacattggcaagatgatcttgtttggagctcttttctgttgtctagatccagttctcaccattgcagcaagcctcagttttaaagatccctttctcttttcc

SEQ ID NO: 8094 - DNA, 564 bp, Zea mays
  misc_feature (257)..(258): n is a, c, g, or t
  misc_feature (385)..(386): n is a, c, g, or t
  misc_feature (398)..(401): n is a, c, g, or t
  misc_feature (442)..(443): n is a, c, g, or t
  misc_feature (468)..(468): n is a, c, g, or t
  misc_feature (491)..(494): n is a, c, g, or t
  misc_feature (509)..(510): n is a, c, g, or t
  misc_feature (519)..(519): n is a, c, g, or t
  misc_feature (523)..(524): n is a, c, g, or t
  misc_feature (532)..(533): n is a, c, g, or t
  Peptide Sequence Number=SeqID_13416
  Probeset Number=SeqID_22497
cgtaactggacgggttcatctagctaacgttatgacaagaggagttgggacatcaactatttgatattgttttacacaagtccgggcctacggaatgttcgtgcaccaaatagacgggggaatggagagatattgggaaaggtgacaaaaccgtatacttttcatttcaaaactagtaagcctgaaatggatggattattttgcgaaaaaatttttgggcctataaaaagtgggatttgcccttgtggaaattatcnngtaatcggagataaaaaaaacgaaccaaaattttgagaacaatgcggagtgaactttgttgattctcgggtacgtaaatatcaaatgggctatataaaactaccatgtacagtacctcatgagtggnntttgaaacgtcnnnntagtcatatcgcgaatcttttaaataaacctcttaaagaannagaacgtctagtatactgcgatgtntggtttgatcaaacggcttattnnnnagattctgaatgagnnactgccctntcannaaaataanncgggatgcccggcatctggcatatctcttga

SEQ ID NO: 8095 - DNA, 384 bp, Zea mays
  misc_feature (157)..(160): n is a, c, g, or t
  misc_feature (162)..(162): n is a, c, g, or t
  misc_feature (303)..(305): n is a, c, g, or t
  misc_feature (312)..(313): n is a, c, g, or t
  misc_feature (349)..(351): n is a, c, g, or t
  misc_feature (378)..(378): n is a, c, g, or t
  Peptide Sequence Number=SeqID_13417
  Probeset Number=SeqID_22498
tgatgaaaattgataaaacaggaccggattatacatgttgcagaaaaacctaggggatcagatctgaaagcaatgcatgttgacaccactctcctagggttatctccagaagaagcaaagaaacatccttatattgcatccatgggtgtctatgtgnnnngnactgagaccctgctgaaattattaagatggagctgttcttcttgcaatgactttggatctgaaataatcccatctgctgggagagagcacattgtccaggcatatttgttcaatgactactgggaagatattggaacgatnnngtccttnnttgatgcaaatctggccctatcagaacatcctccannntttcaattctatgatccaaagacaccntttctt

SEQ ID NO: 8096 - DNA, 688 bp, Zea mays
  misc_feature (163)..(168): n is a, c, g, or t
  misc_feature (632)..(639): n is a, c, g, or t
  misc_feature (650)..(652): n is a, c, g, or t
  misc_feature (668)..(668): n is a, c, g, or t
  misc_feature (670)..(671): n is a, c, g, or t
  misc_feature (678)..(679): n is a, c, g, or t
  misc_feature (681)..(681): n is a, c, g, or t
  Peptide Sequence Number=SeqID_13418
  Probeset Number=SeqID_22499
gacgctcaaaaagcatgactagttcctcagctgcggctcgcaaggctctgagtaagattgcctgcaatagactccagaaagagctggtggagtggcaggttaatcccccaactggtttcaaacacaaagtcaccgacaatctccagaggtgggttattgaagnnnnnngagctcctgggacactttactccaatgacacctaccagcttcaggtggactttcctgagaattacccaatggaagctccacaggtcatattcttgcatccggctccactgcatccccatatctatagcaacggccatatttgtttagatatattgtatgattcatggtcccctgccatgacagttagttctatctgcattagcattctctcaatgctttcaagctcaactgtaaagcaacgccctgaagataatgaccgctatgtaaagaactgcagaaatggcagatctcccaaggagacaaggtggtggttccatgatgacaaagtataataactggttttctctagtaagtctacaaaactagagtagaggactatccttttgaaagaaatatgaagacttgggaaaaagcattttgagaaaccaggatcccttttaatgaaatggaaaataattctcctnnnnnnnnaaattgcctgnnntttgtaaaggaagagnannctctgtnncntaaacac

SEQ ID NO: 8097 - DNA, 417 bp, Zea mays
  Peptide Sequence Number=SeqID_13419
  Probeset Number=SeqID_22500
tgcagctgcgggtgatcaccgccgatctgcacattgcgctgtttttgtcggagtttaaacagattgagaccaccatcatcggcggccgcatcgacgactccagccagtcgtgcattggtgagcacggccggcgcctgctgcgcagtgtcaatccggacattgcgtttgtcagctgtaactcatggagtattgagcgcggtattaccacgccgacggaagacaaagccgggctgaagatggatctgctggccaacgcgcgccggcgcattctgctggccgacagcagtaaatatggctcatggtcgctgtactgcgcggcaccgattgatagcctgaccgatgtggtgaccgattcccgccttgatgaagcggtatgccgtgatttgcgcgagcgcggcattggcctgcaggtcgact

SEQ ID NO: 8098 - DNA, 583 bp, Zea mays
  misc_feature (579)..(581): n is a, c, g, or t
  Peptide Sequence Number=SeqID_13420
  Probeset Number=SeqID_22501
ggtgaagagagagagaaagctaagaagaggagagagaaacgaggatggcatcgacggcagcgtaccttgcccggcgagcggcgcagaaggagagggtgcggatcttgtaccgccgcgccctcaaagacactctcaactgtgccgtacatcgccacctcttctacgacgacgcttccaacctccgcggaaggttcgagcaaaacagacacgtggaagactttgataccattgataggttgatagaggatgctgaagcaacctacaataagtggcgtcatcctgatccttatattgttccttgggctcctggtggttccaagtttactcgcaacccacctccacctccagggattgagataatttatgattacggccgtgaagataataactgaaacctgattattttttagttttgcccgtcgccataaataaaggtttgcaatcaaattgttctagattactagactgtgaattaaatcacttcatttactcttatgtgatataaattgatacagtttgaatccatgtttatgatgttgaagaaatttgattgccttctgaacacgatggttcctgggnnnaa

SEQ ID NO: 8099 - DNA, 668 bp, Zea mays
  misc_feature (558)..(559): n is a, c, g, or t
  misc_feature (599)..(599): n is a, c, g, or t
  misc_feature (651)..(659): n is a, c, g, or t
  Peptide Sequence Number=SeqID_13421
  Probeset Number=SeqID_22502
gttctattggcatgacatagtgagtggacgcaacccctcttctatggcagttgttccaccacccttgaagaactcaaccacagcctttggtttggtgaacatgattgagaaccctttgacactgggaccccaattgagctccaaattggtgggaaaagctcaagggttctatgcctccacatcacagagtgaggttgacttgctcatggctatgaactttgccatcactgaaggtaagtacaatggtagcaccatcacaattttggggaggaaccctgttttcaacaaggttagggagatgcctgtgattggtggcagtggtctctttagatttgctagaggctatgctcaacttagaacttattggttctcaccccagacaaaggatgctatagtggagtacaatatttatgttttgcattattgattctattggcactatttttcctcttttgaggccataataagcattcactcgcttgtgatgctcagactttactgttttttatagttgggtttgttctcttcatttaacccacctctatatgcgtttctttnnatatatatgctgtatttgtggttgatttgagaatcagatnaataccaaaataatttattattcaaaaaaaacaaatactaacaaaatctatnnnnnnnnnctaatttat

SEQ ID NO: 8100 - DNA, 358 bp, Zea mays
  Peptide Sequence Number=SeqID_13422
  Probeset Number=SeqID_22503
gctcggtacccttgcagcctcagcaaatatgcagaagcatggtcagcgccacatggagcccatccttcctccatcttctcgacgtatagctatggcccacaaaggcaaggcaacgtctgatgtcacctacaacccggaagacaggcccgaagagtatagcaaccccgctgtctacagccacctcagtgagtatactgccatggcacaagaggttcatgggccagattacgatccgaggaccgaggacatcgacagagatgtcctcatgagggtcagaggatgcaagaggcatgagcgatactggattaccgacagggcaattgaatcgtcctgcactcccactctatctcaagtgtga

SEQ ID NO: 8101 - DNA, 855 bp, Zea mays
  misc_feature (1)..(3): n is a, c, g, or t
  misc_feature (28)..(30): n is a, c, g, or t
  misc_feature (714)..(718): n is a, c, g, or t
  misc_feature (727)..(729): n is a, c, g, or t
  misc_feature (745)..(747): n is a, c, g, or t
  misc_feature (759)..(761): n is a, c, g, or t
  misc_feature (797)..(799): n is a, c, g, or t
  misc_feature (801)..(801): n is a, c, g, or t
  misc_feature (811)..(823): n is a, c, g, or t
  misc_feature (831)..(832): n is a, c, g, or t
  misc_feature (840)..(843): n is a, c, g, or t
  misc_feature (848)..(855): n is a, c, g, or t
  Peptide Sequence Number=SeqID_13423
  Probeset Number=SeqID_22504
nnnttgggtaccgggccccccctcgagnnngcgattccgtcttcgttgctgctcatacctctgccggaaagaccgttgttgcagagtacgccatcgctctcgctgctcgacacatgaccaaggcaatctatacctcacccatcaaagccttgagtaatcaaaagttcagggacttccgacagaccttcgacgaagtgggtattctcacgggtgatgtgcaaatcaacccggaagcgagctgtctcatcatgaccacggagattttacgaagcatgttgtacagaggagctgatctgatccgcgatgtcgagtttgtcatttttgatgaggttcactatgtcaacgattttgagcgtggtgttgtttgggaggaggtcatcatcatgttaccacaacatatctcactgatcctattgtctgccactgtaccgaatacctacgagttcgcctcttgggttggcaggacaaaacaaaaggatatctatgtcatttcaacaccgaagagacctgtcccactcgaacactacttgtgggcaggtaaagacacctacaagatcgtcgactcggaaaagaagtttgttgagaagggttggaaggacgctcatcaggctgtcacgaggaaggataccgccaaagccgcagatacaacagtggctacccgcggaggaaacccaagaggcggccagcgcggtggtccacaaaggggtggcccgnnnnngggaggccnnngcgggcaacaacgcgnnngcaaccagcaannngggcgaggaggtcctcctcgcgcgagccacgctccnnntnacatgggtcnnnnnnnnnnnnncggagggnncacatctnnnnctcannnnnnnn

SEQ ID NO: 8102 - DNA, 546 bp, Zea mays
  Peptide Sequence Number=SeqID_13424
  Probeset Number=SeqID_22505
gctctgactcccaggtgccccagcacaacgcttcttagtcctcacttagtgggttacaggctgcccaggtggctcagcggtaaagaatccacccgccaatgcaggagattgggcaagcctggctgaactgagaactgcagaagcaaggcagatggcttgtgatgaactggtcacaaatgaagaagaggagtacagcctctatgaagctgtcaaattcctaatgctgaacagagccattgaactctatgacgataaggagaagggaagggaagtgccgtttttctctgtgcttctctttgctcgggatacgtcaagtgaccctggtcagctgctgcggaaccatctgaaccaggtggggcacactggcggcctggagcaggtcgagatgttcctcctggcctacgctgtgcgccacaccatccaggtgtatcggctctccaagtatggcactgaggagttcgtcacggtctaccccaccgacgccccccgggactggccagtggtgaccctgatcgccgaggacgaccggcactacaatgtccccgt

SEQ ID NO: 8103 - DNA, 474 bp, Zea mays
  Peptide Sequence Number=SeqID_13425
  Probeset Number=SeqID_22506
ccggcggccagcgcactgcttgctgtgctggcggccaatgcactcgtcctctttctgatctgccccgaggccaacggggccgtagctggctgggcgggcgaggcccggatgctggcgccccgttccatgatcgtggtggtcaaccacgtgcgttgctaccaggtgatggcggcaccgaagcccgggccgatggtcgacggcgatcaggttcccgacctgcgcgacgtgcgcggccaggacagcgcctagctggccctggagatcgccgtggccggaggccacaacctgctgttcatcggcccgccggggtcggacaagtcgatgctggctccagcgcctgcccggactcctgccgacgatgtctccggccgagctgctggagacctccatggtgcattcggtggccggcctgatcgacaggggcgccctgacccgctcccgcccgttccgcgccccggaccactcggacagcat

SEQ ID NO: 8104 - DNA, 575 bp, Zea mays
  misc_feature (535)..(535): n is a, c, g, or t
  Peptide Sequence Number=SeqID_13426
  Probeset Number=SeqID_22507
gttctgaattcctatgacgtgctctggctcgcattgaacacactgatggcaagcgatatttcacatgggaccgttccacattcccggatccagaggagatgcagcggaagatagcagataaggggaggaagatggtaactattgtagacccacatatgaagagggacagtgggtaccacatccatgaggaagctactgccaaaggttactatgttaaagatgcaagcgggaaggactacgatgggtggtgctggcctgggtcatcatcatatcctgacatgttgaatcctgaaatacgggactggtgggctgacaagttctcctatcaaaactacaagggatcaactccaacgctgtacatttggaacgacatgaacgagccatcagttttcaacggccctgaggtcaccatgcctagggatgcattacataacggtgatgttgaacatcgagaactgcacaatgcatatgggtactacttccatatggctacatcagatgggcttctcaagcgaggtgagggtaaagacaggcncctttgttttgtcaagggccttcttttgctggaagtcaac

SEQ ID NO: 8105 - protein, 270 aa, Zea mays
  Coding DNA Sequence Number=SeqID_1
  Gene Ontology: Mol. function=unspecific monooxygenase activity
  Homolog annotation: Hit_ID=O04892; Match level="QueryCoverage=95%, HitCoverage=48%, E-value=1e-108, Identity=79%"; Hit description =Cytochrome P450 like_TBP
  Subcellular localization annotation: CTP_CleavageSite=12; ConfidenceScore=5.03e-01
MCRPSQTPHLTMSSARIGPARPGLGAKRRGGAPLPTHGISKITLKVVVFHLRPEAPTYPTPLKSFHKVGLESSSTGSSFPADSAKPVPLAVVSLDSRQDSGISLSIHAVTNKMTRHLATLRESCYSRVYPRLVEFLHFDIQSTKRITLRQHPRDRRNALFKLNSRIPLVRTSSESVVRRPGKAPEGAVPGPSPGRHAAASSRRASSSSIPPAADGFGAGTPEPNPQSQSFSRSYGSVLPTSLAYIVPLARGCSPWRPDAVMSTTGQRPRI

SEQ ID NO: 8106 - protein, 176 aa, Zea mays
  Coding DNA Sequence Number=SeqID_2
KRPHFRICTGPQILPALTIVHSTLLWLGKRYRSADEGREADIDDQSVAGNEGPHPPERGHGGGTAPLCAAGPVPGLIAVLEAPPTAPGQNVAQALDELSHDDAAPAEAAELATDRRGGADPRRPQRPQPPPAWGPERRPPRAHGQRQRGRPRGRRKEQHRSRRWHFAVPKHLARDS

SEQ ID NO: 8107 - protein, 89 aa, Zea mays
  Coding DNA Sequence Number=SeqID_3
KMRYHAQCIWWKSSYGDIDLVVNRLSSYTGNLFLKYTGELRTIGLRRTPKYKNKKTTTPTQPYQIHTHTLKPNLIGGIHLDRVKTLPLA

SEQ ID NO: 8108 - protein, 200 aa, Zea mays
  Coding DNA Sequence Number=SeqID_5
HTRIYIKLNIKLLHTIIYREIIEIAKYHIHMIISTFFVRTCHACLVCLQTCRACHAYASLQTCCAFLACTFLHRKTLSCTYHRDGGHNHHDGPRGDFPLQPPQLLPLQLSIPRLLLQDLDGEDQGNRREDKHQEEVDKLQVDSPAEGNPVEGTLAEGNHAVVDKLPAEEEDKLPVDTHGRDDYDVKRILCLVRDACLYPF

SEQ ID NO: 8109 - protein, 88 aa, Zea mays
  misc_feature (29)..(29): Xaa can be any naturally occurring amino acid
  misc_feature (46)..(46): Xaa can be any naturally occurring amino acid
  Coding DNA Sequence Number=SeqID_7
  Gene Ontology: Cellular component=plasma membrane
  Homolog annotation: Hit_ID=Q7XBT3; Match level="QueryCoverage=69%, HitCoverage=7%, E-value=3e-20, Identity=77%"; Hit description=Early -responsive to dehydration protein, putative, expressed
HSFCRIPKTIGVAIPMKATFFMTYMMVNXWAGIANEIIQVKDMVIXHLSNMFIVKKERDMERVMDVMDAQTYESYEWLLRQTLGGGPT

SEQ ID NO: 8110 - protein, 177 aa, Zea mays
  Coding DNA Sequence Number=SeqID_8
GVPFQQLLQMLWTEPVDNVFLSTFLLAREMDDGSGASREMPATDSDTNHCQKSITVVAKYFLAELISATAAGWSTRATKIAHTGGAERRWSRRQRRAARRGRRWVGGEAVGAGGGGAKSPRAADPKGAWEQASSQRRMADDRSPERAAYCAGLEAGRGRDTARVEGGGGMVAPSREG

SEQ ID NO: 8111 - protein, 76 aa, Zea mays
  Coding DNA Sequence Number=SeqID_9
FLVLAFLYVLYCRPYQHSKRVSEKLHNFRKLQQRICIALHNFRNTLITNKHHSSQISITHYLYQILNRVNRIEIKL

SEQ ID NO: 8112 - protein, 184 aa, Zea mays
  Coding DNA Sequence Number=SeqID_11
  Subcellular localization annotation: CTP_CleavageSite=49; ConfidenceScore=5.40e-01
RRGTQPPGGAGEACGVPGVARARPVRPLTAGGRSPPTPGVAQPRRAGTPAQAPASAQARALGPWLRAQAQSSSPGGHGLRKRLPEARPRRAQQPRRAGARPWQRAGKRSHPGAQAWHPARSHGSTRAGESPAAQAAWAQTHSQFAPGGYSTPMAAQPPQRVPGRSHDAGVFFLLFQAETEELAR

SEQ ID NO: 8113 - protein, 93 aa, Zea mays
  Coding DNA Sequence Number=SeqID_13
VFQDFRLLPTRCLYEEERVLGQMGQRYNVRKKQSCLQTQPAYVGLHGQNSAATKAFLCTNRDETVINDEITRELKEEVITQICLSMVCICPSS

SEQ ID NO: 8114 - protein, 116 aa, Zea mays
  Coding DNA Sequence Number=SeqID_15
NRDIVVCHSRQPCHASYQISCLKIDQQHLIFRRRTEKLSPTAHMAAGLGELAMEETPACRSEGGELELGDAMERGRELGIGSRGTDPTTARRVRRRGLVEEHRARLKEEEAGRAGR

SEQ ID NO: 8115 - protein, 190 aa, Zea mays
  Coding DNA Sequence Number=SeqID_17
  Subcellular localization annotation: CTP_CleavageSite=54; ConfidenceScore=5.30e-01
THISAHSAGRGSEKRATKKPPKGLHNGRFSAHHPLRPRAPGRGRHRSGARSGPRGSAPGPASTAGDPAPGNGAPYPGAGVPAPYRGPGARAHRRPHALRHRAGARRLPDVLPSGAHPGHVALAHRRARHPGQRRRWSPPRLRAGCRRRRHLRLLDDPTMYHFIVSLQLLFHFSPSLPPSVRTLVYPHLLL

SEQ ID NO: 8116 - protein, 142 aa, Zea mays
  Coding DNA Sequence Number=SeqID_154
STHQPEVGGVFPFVPPHQILHSFDLNIPMDEQQENLNDYGVYADVDIVFDQDELSDSEDNEEEHEIQPGRLDHYSSSLQFTGALLVGCCSLLVAAAAAVLGLAAGRLHEAEAGAAGTLEQELHHAQSSGSRSIVFVPLGRLS

SEQ ID NO: 8117 - protein, 166 aa, Zea mays
  Coding DNA Sequence Number=SeqID_156
  Gene Ontology: Mol. function=lipoic acid binding; Cellular component =glycine cleavage complex; Biological process=glycine catabolic process
  Homolog annotation: Hit_ID=P25855; Match level="QueryCoverage=100%, HitCoverage=100%, E-value=1e-69, Identity=80%"; Hit description =Glycine cleavage system H protein 1, mitochondrial precursor
  Pfam annotation: Domain name=GCV_H; Domain location=42-162; Score =259.1; E_value=9.3e-75; Accession=PF01597.9; Description=Glycine cleavage H-protein
  Subcellular localization annotation: CTP_CleavageSite=17; ConfidenceScore=5.35e-01
MALRMWASSTANALKLSSSTSKSHLLPAFSISRCFSSVLEGLKYATSHEWVKHDGSVATIGITDHAQDHLGEVVFVELPEEKSSVSKEKNFGAVESVKATSEILSPISGEVIEVNTKLTDSPGLINSSPYEDGWMIKVKPSNPAELETLMGSKEYTKFCEEEDAAH

SEQ ID NO: 8118 - protein, 111 aa, Zea mays
  Coding DNA Sequence Number=SeqID_157
  Gene Ontology: Mol. function=protein disulfide oxidoreductase activity; Cellular component=cytoplasm; Biological process=cell redox homeostasis
  Homolog annotation: Hit_ID=Q9FNE2; Match level="QueryCoverage=86%, HitCoverage=86%, E-value=2e-40, Identity=82%"; Hit description =Glutaredoxin-C2
  Pfam annotation: Domain name=Glutaredoxin; Domain location=15-77; Score=107.2; E_value=5.1e-29; Accession=PF00462.14; Description =Glutaredoxin
MAMQKAKEIVSGNAVVVFSKSFCPYCVRVKELLQQLGAKFIAVELDKESDGSQVQSALAEWTGQRTVPNVFIGEKHIGGCDSVTNLHRDGKLVPMLTEAGAIAATAGTTSA

SEQ ID NO: 8119 - protein, 119 aa, Zea mays
  Coding DNA Sequence Number=SeqID_158
  Gene Ontology: Mol. function=microtubule binding; Cellular component =cytoplasmic vesicle; Biological process=protein transport
  Homolog annotation: Hit_ID=Q8VYK7; Match level="QueryCoverage=98%, HitCoverage=96%, E-value=2e-57, Identity=94%"; Hit description =Autophagy-related protein 8f precursor
  Pfam annotation: Domain name=APG12; Domain location=30-117; Score= -24.8; E_value=0.033; Accession=PF04110.4; Description=Autophagy protein Apg12
  Pfam annotation: Domain name=MAP1_LC3; Domain location=14-117; Score =272.7; E_value=7.7e-79; Accession=PF02991.6; Description=Microtubule associated protein 1A1B, light chain 3
  Pfam module annotation: Pfam domain module=APG12::MAP1_LC3; Domain location=30-117::14-117
MAKSTFKEEHDLEKRSAEAARIREKYPDRIPVIVEKGEKSDIPTIDKKKYLVPADLTVGQFVYVIRKRIKLSAEKAIFIFVDNVLPPTGALMSAVYEEKKDDDGFLYVTYSGENTFGSP

SEQ ID NO: 8120 - protein, 246 aa, Zea mays
  Coding DNA Sequence Number=SeqID_159
  Gene Ontology: Mol. function=threonine endopeptidase activity; Cellular component=proteasome core complex; Biological process =ubiquitin-dependent protein catabolic process
  Homolog annotation: Hit_ID=Q4TZW3; Match level="QueryCoverage=100%, HitCoverage=100%, E-value=1e-121, Identity=91%"; Hit description =Proteasome subunit beta type
  Pfam annotation: Domain name=Proteasome; Domain location=22-204; Score=233.1; E_value=6.3e-67; Accession=PF00227.16; Description =Proteasome A-type and B-type
MSAASPLMGGPSSADAPTDGEHRMGTTIVGVCYAGGVVLAADSRTSTGMYVANRASDKISQLTDNVYVCRSGSAADTQIISDYVRYFLHQHTIQLGQPATVKVASNLVRLLAYQNKSMLQAGMIVGGWDKYEGGQIYSVPLGGTILRQPFAIGGSGSSYLYGLMDHEWKEGMTQEEAEKFVVKVVSLAIARDGASGGVVRTVTINEEGVKRSFHPGDKLPLWHEEMEPQNSLLDILAAGSSDAMAQ

SEQ ID NO: 8121 - protein, 157 aa, Zea mays
  Coding DNA Sequence Number=SeqID_160
SHGERELEAARRRLAERLRILWRKLPALMLIRLSPPLIGSIKGMGGKSSGALPWKREFLCSLFLPPFQSRFWIDSIVPGVVLSKPLVIGSGRKWSCARGFLAPCYCISAPVRCRSALIVVHELNINSILLCTEINTLRKQHDRRPRSLPTNPASSLV

SEQ ID NO: 8122 - protein, 91 aa, Zea mays
  Coding DNA Sequence Number=SeqID_162
NGRPYLSDCFQFQLEHWGFAGEMKRLLARGKSGCPSRSLVGRIPALPVLCNNVLPGHRVSSPICQSLLLLPHACSLNFKQAQGESRVVQTF

SEQ ID NO: 8123 - protein, 101 aa, Zea mays
  Coding DNA Sequence Number=SeqID_164
  Subcellular localization annotation: CTP_CleavageSite=20; ConfidenceScore=5.03e-01
RRSGLVTGPAIRRHTHSCTRQFLRPDGRTGDTLQFFLTMERLVVSVFASKRADNVLKYTQWQTSRETERMTVVSFLQQELCLYERVSSQGVCPLGIICLTP

SEQ ID NO: 8124 - protein, 112 aa, Zea mays
  Coding DNA Sequence Number=SeqID_166
LSPKSSHCESAMAVAQRLTALELHHCCCPTPRHTSRLDLSSLRAGSPAEFAVEHRRGRLFLPCVVARLRSISELRGINSQASATKRSNSSSSTRLKILSICLVKVTFGAIYA

SEQ ID NO: 8125 - protein, 163 aa, Zea mays
  Coding DNA Sequence Number=SeqID_168
SQITNVPSVLREGGEYKRDAKSKMTSPREQYGSTVHLFIDAGRSPRKITSMSITFVNGLWKSIEDPEVFLSLSRFPLVLSRRSFPAYSFGCLRPSPGSAFVLVVLHIHNSESENTCSYNSLGKHCQIMFLRTFGGRRPPTEANPIGSPSERPLGTPSVGGTLD

SEQ ID NO: 8126 - protein, 105 aa, Zea mays
  Coding DNA Sequence Number=SeqID_170
  Subcellular localization annotation: CTP_CleavageSite=82; ConfidenceScore=5.02e-01
WSRRYESATTPSPRTRREELAKVATSFAMRACMGAGSAAGRVKLSGPLRPALNQSNATTPRRHSSISQERVIRNAPLGHVPRKETGQSSHLFSLDKDGAFTSLFG

SEQ ID NO: 8127 - protein, 68 aa, Zea mays
  Coding DNA Sequence Number=SeqID_1684
ERPETGRNGRPRPLKQAQVARRQHSDGPQYQTERGTPERSSNKTMGTARRWTPNRRSTERPASYNPTT

SEQ ID NO: 8128 - protein, 117 aa, Zea mays
  misc_feature (87)..(87): Xaa can be any naturally occurring amino acid
  Coding DNA Sequence Number=SeqID_1686
  Gene Ontology: Mol. function=iron-sulfur cluster binding; Biological process=electron transport
  Homolog annotation: Hit_ID=A1JMQ2; Match level="QueryCoverage=82%, HitCoverage=26%, E-value=8e-32, Identity=71%"; Hit description =Putative iron-sulfur binding protein
  Pfam annotation: Domain name=MOSC_N; Domain location=1-107; Score =86.6; E_value=8.2e-23; Accession=PF03476.6; Description=MOSC N -terminal beta barrel domain
MITLSRLYIHPVKSMRGLQLSHAQVLESGLAFDRIFMVTEADGTFITARQFPEMVRFTPALRPTGYSSPHDGSQALIRFSDFSASRXTEVWGNQFTAAWPTHQPGLSGFSRARCSAL

SEQ ID NO: 8129 - protein, 106 aa, Zea mays
  Coding DNA Sequence Number=SeqID_1687
  Homolog annotation: Hit_ID=Q2VQ31; Match level="QueryCoverage=61%, HitCoverage=9%, E-value=2e-09, Identity=52%"; Hit description=SPX domain-like protein
CTLITRVQLWIHFMLTSPMQIWVSESSGMSDRTFRCTTSSCAIFLAILGLVELPVIAVVGPFINIMFEDKFVHFSFLSTSSGQALATPHGLTKTAGSKHHLRLRGG

SEQ ID NO: 8130 - protein, 91 aa, Zea mays
  Coding DNA Sequence Number=SeqID_1688
  Gene Ontology: Mol. function=aminopeptidase activity; Biological process=proteolysis
  Homolog annotation: Hit_ID=A1JJS7; Match level="QueryCoverage=84%, HitCoverage=22%, E-value=5e-20, Identity=62%"; Hit description =Peptidase precursor
PHAYYIFVNPFDKAGIPLLDVTAANWALGNKAGEQQRARSPHFPEGTVRHQTGRDNLTYIDHWLPGRIHQRTRDSVRILQPLLTELANPTL

SEQ ID NO: 8131 - protein, 252 aa, Zea mays
  Coding DNA Sequence Number=SeqID_1689
  Gene Ontology: Mol. function=phosphoenolpyruvate carboxylase activity; Cellular component=cytoplasm; Biological process=carbon utilization by fixation of carbon dioxide
  Homolog annotation: Hit_ID=Q1IDV2; Match level="QueryCoverage=98%, HitCoverage=28%, E-value=1e-119, Identity=87%"; Hit description =Phosphoenolpyruvate carboxylase
RDRDIRHSAKADRRSAGEQLSSTLADLADEDLLPVARAFNQFLNLANMAEQYQLIRRRDADQPEPFEARVLPELLARLKQAGHSNDALARQLAKLDIQLVLTAHPTEVARRTLIQKYDAIAGQLATQDHRDLTPAEREQVRERLRRLIAEAWHTEEIRRTRPTPVDEAKWGFAVIEHSLWHAIPSHLRKVDKALLEATGLRLPLEAAPIRFASWMGGDRDGNPNVTAAVTREVLLLARWMAADLFLRDIDAL

SEQ ID NO: 8132 - protein, 102 aa, Zea mays
  Coding DNA Sequence Number=SeqID_1690
MPLATPTFQCSDYCTELLVVYSATEGYVMRCGGAGTEARPAGASATPTFGRSEQAWPGDLLMAAKEMAAGASVGTKAGTTGANGTPTSKRSVRAQPDNLLRK

SEQ ID NO: 8133 - protein, 127 aa, Zea mays
  Coding DNA Sequence Number=SeqID_1692
  Subcellular localization annotation: CTP_CleavageSite=57; ConfidenceScore=5.06e-01
MSPPAGPRFVGPGRTLRRTIKGDVGEAFLPVVSSPRPRPPPLANDSGLHCRSRSLPSHAMVADRLRLALLLSACLCSAWARPRLEPTIRLPSERAAADETDDDALGTRRPETIREENEYYNKRNTPP

SEQ ID NO: 8134 - protein, 143 aa, Zea mays
  misc_feature (5)..(5): Xaa can be any naturally occurring amino acid
  misc_feature (14)..(15): Xaa can be any naturally occurring amino acid
  misc_feature (71)..(71): Xaa can be any naturally occurring amino acid
  Coding DNA Sequence Number=SeqID_1694
  Gene Ontology: Mol. function=oxidoreductase activity; Cellular component=extracellular region; Biological process=hydrogen peroxide catabolic process
  Homolog annotation: Hit_ID=A2Q692; Match level="QueryCoverage=100%, HitCoverage=40%, E-value=1e-47, Identity=68%"; Hit description=Haem peroxidase, plant/fungal/bacterial
  Subcellular localization annotation: CTP_CleavageSite=25; ConfidenceScore=5.28e-01
NVSTXVALSGFHTXXTRKCTFFSVRLFNFSGTQAPDSTIETTMLSELQNLCLQNGDGNTTSVLDQGSVDLXVNHYFKNLLDGKGLLSSDQILFSSENATATTKPLVQFYSVNERVFFVEFAYAMIKMGNINPLTGCEASKRRN

SEQ ID NO: 8135 - protein, 125 aa, Zea mays
  Coding DNA Sequence Number=SeqID_1695
  Gene Ontology: Cellular component=anchored to membrane
  Homolog annotation: Hit_ID=A2WMY9; Match level="QueryCoverage=81%, HitCoverage=24%, E-value=4e-36, Identity=71%"; Hit description =Putative uncharacterized protein
MHEDIVEIEQSDADGGAAAAFHGQKTDAASLVGRALSCFNDRYIYSGCQGALRLGPEGALDVPPGSVDAFCGGPCLAETHLVLRCVDGIVASFRFYNGASAADVRLALARGCGRSGLRGDFDDVL

SEQ ID NO: 8136 - protein, 137 aa, Zea mays
  Coding DNA Sequence Number=SeqID_1696
LHERGLDVPWQAGDRSWPSATAADVEPDKETLEKIGAIPAIKELVFLKLCQTPSNTAAPLPLARRRVSLAQHGPVQPYRAGCWRAATFPLYPQATRPHTSPAAHARAQSSTAPPPATALATPPPPLLHLARRHHRAQ

SEQ ID NO: 8137 - protein, 99 aa, Zea mays
  Coding DNA Sequence Number=SeqID_1698
  Subcellular localization annotation: CTP_CleavageSite=49; ConfidenceScore=5.54e-01
RRRLPPWRSATSPRTAPSQPPLAKLSPPLGSPAPPCGKTPTRCPRTGPPAARSFPADDRFIPPSTVAPFPPPFHSRWRVGPTVMASSPHARAVSHFGPQ

SEQ ID NO: 8138 - protein, 84 aa, Zea mays
  misc_feature (61)..(61): Xaa can be any naturally occurring amino acid
  Coding DNA Sequence Number=SeqID_1700
  Gene Ontology: Mol. function=oxidoreductase activity; Cellular component=extracellular region; Biological process=response to oxidative stress
  Homolog annotation: Hit_ID=A2Q692; Match level="QueryCoverage=85%, HitCoverage=21%, E-value=1e-12, Identity=50%"; Hit description=Haem peroxidase, plant/fungal/bacterial
NNKSDDVYRFSNAYFWLVNFFILACELTPDFYKTTCPDLYRIVRSEGQKALKYEMRMGASXLRLHFHDFFVNGIHPFDLLNEND

SEQ ID NO: 8139 - protein, 76 aa, Zea mays
  Coding DNA Sequence Number=SeqID_1701
  Gene Ontology: Cellular component=extracellular region; Biological process=cell wall organization and biogenesis
  Homolog annotation: Hit_ID=Q6H677; Match level="QueryCoverage=59%, HitCoverage=16%, E-value=1e-12, Identity=75%"; Hit description =Putative expansin-B14 precursor
DGAGTDGGACGYQNAVDQPPFSSMNAAGWFSIYEFGKGCGFCYQVGKLQRIGPPFNQGSLPFDICKVDYLSGCVHR

SEQ ID NO: 8140 - protein, 318 aa, Zea mays
  Coding DNA Sequence Number=SeqID_1702
  Gene Ontology: Mol. function=oxidoreductase activity, acting on the CH-OH group of donors, NAD or NADP as acceptor; Cellular component =cytoplasm; Biological process=metabolic process
  Homolog annotation: Hit_ID=A1FGW0; Match level="QueryCoverage=99%, HitCoverage=99%, E-value=1e-125, Identity=75%"; Hit description=D -isomer specific 2-hydroxyacid dehydrogenase, NAD-binding
  Pfam annotation: Domain name=2-Hacid_dh; Domain location=4-318; Score= 110.1; E_value=6.8e-30; Accession=PF00389.20; Description=D-isomer specific 2-hydroxyacid dehydro
  Pfam annotation: Domain name=2-Hacid_dh_C; Domain location=107-286; Score=282.8; E_value=6.8e-82; Accession=PF02826.9; Description=D -isomer specific 2-hydroxyacid dehydro
  Pfam module annotation: Pfam domain module=2-Hacid_dh::2-Hacid_dh_C; Domain location=4-318::107-286
MQRVVSFGPISSAEVLADLGRRYHFQRFDQPLADRERFLAALATADGLIGSTLPLGAELLDRAPALKAIASVSAGFDNYDLAYLRKRGIRLTNTPDAVTEATADTGFMLLMMAARRAGELAQMVRDGEWTHAIDATRFGRDVHGKTLGIVGLGRIGAAVARRGHFGFGMQVLYSGNSDKPEYEAQFAARRVPLQQLLGEAHFVCVCVPLSPATHHLFGREQFAAMRADAVFVNIARGAVVDEAALVQALVEGQLGAAGLDVFEQEPLPAASPLLALPQVVALPHIGSATVEARALMARTAAAELAAVLEGRAPNHPVL

SEQ ID NO: 8141 - protein, 88 aa, Zea mays
  misc_feature (65)..(65): Xaa can be any naturally occurring amino acid
  Coding DNA Sequence Number=SeqID_1703
  Gene Ontology: Mol. function=hydrogen ion transporting ATP synthase activity, rotational mechanism; Cellular component=proton -transporting ATP synthase complex, catalytic core F(1); Biological process=plasma membrane ...
  Gene Ontology: Biological process=ATP synthesis coupled proton transport
  Homolog annotation: Hit_ID=P69445; Match level="QueryCoverage=98%, HitCoverage=63%, E-value=3e-16, Identity=56%"; Hit description=ATP synthase epsilon chain
  Pfam annotation: Domain name=ATP-synt_DE; Domain location=37-84; Score=20.8; E_value=0.0051; Accession=PF00401.10; Description=ATP synthase, DeltaEpsilon chain, long alpha-helix domain
RIPLQDDRWLTEALGRGFSRFFNTETSPRRRDAELATDIDPKEAQRALVRDRANSSKAVGTKELXKANLALTRPRKPTEAVNRIPPSK

SEQ ID NO: 8142 - protein, 57 aa, Zea mays
  Coding DNA Sequence Number=SeqID_1704
  Subcellular localization annotation: CTP_CleavageSite=29; ConfidenceScore=5.06e-01
ICLLGPLPHFSGLPFKPPHPLFFPLGPHRGGMTASRTGLGENRKTGKEAWDATGAPA

SEQ ID NO: 8143 - protein, 139 aa, Zea mays
  Coding DNA Sequence Number=SeqID_1706
  Gene Ontology: Mol. function=two-component response regulator activity; Cellular component=intracellular; Biological process=two -component signal transduction system (phosphorelay)
  Homolog annotation: Hit_ID=A1FMZ9; Match level="QueryCoverage=100%, HitCoverage=74%, E-value=4e-63, Identity=88%"; Hit description =Response regulator receiver protein
  Pfam annotation: Domain name=Response_reg; Domain location=13-125; Score=80.8; E_value=4.4e-21; Accession=PF00072.14; Description =Response regulator receiver domain
MSEENQVEGEELPHLLLVDDDATFTRVMARAMSRRGFRVSTASSAEEGLILAQQDLPDYATLDLKMDGDSGLVLLPKLLELDPEMRVVILTGYSSIATAVEAVKRGACNYLCKPADTDDVLAALLSEHTDLDTLVPENP

SEQ ID NO: 8144 - protein, 205 aa, Zea mays
  misc_feature (85)..(85): Xaa can be any naturally occurring amino acid
  Coding DNA Sequence Number=SeqID_1707
  Gene Ontology: Cellular component=cytoplasm; Biological process =phosphate transport
  Homolog annotation: Hit_ID=Q9F692; Match level="QueryCoverage=98%, HitCoverage=51%, E-value=4e-09, Identity=29%"; Hit description =Collagen-like surface protein
TQAKHANGERRDPQATEGVILQPPATADPQGPEPTKAGGKPTKRPQTQPGEHPSQTPGRTATPQGAHKTAGKQAGHGPKKDNHEXGKPRGNPTPPPGNTAPQPQQAKKRKGPNRTPGPTEAQPERRKAPDARNTPNATAQKPTPQRGHHQNKPRGSPKGKPTPTPDNTRRHPQTGWTAPRTHQQTSTDRKPEQDATKAPTASTET

SEQ ID NO: 8145 - protein, 127 aa, Zea mays
  Coding DNA Sequence Number=SeqID_1708
  Gene Ontology: Mol. function=transferase activity; Cellular component= CAAX-protein geranylgeranyltransferase complex; Biological process =protein amino acid geranylgeranylation
  Homolog annotation: Hit_ID=A2WKQ0; Match level="QueryCoverage=96%, HitCoverage=57%, E-value=2e-48, Identity=75%"; Hit description =Putative uncharacterized protein
TCTSQVALVSLNVELSLINKDEIAKWVLSFQVHPAANDDIGSGLFYGFCGSRSTQFPLPNVKDPCHNVSHLASTYSALAILKIIGYDLANIDCKALLLSLKMLQQPDGSFMPTHIGAETDLRFVYCA

SEQ ID NO: 8146 - protein, 177 aa, Zea mays
  Coding DNA Sequence Number=SeqID_1709
  Gene Ontology: Mol. function=transferase activity, transferring phosphorus-containing groups; Cellular component=membrane; Biological process=peptidyl-histidine phosphorylation
  Homolog annotation: Hit_ID=Q88PG3; Match level="QueryCoverage=100%, HitCoverage=39%, E-value=5e-71, Identity=77%"; Hit description =Sensor protein
  Pfam annotation: Domain name=HATPase_c; Domain location=69-172; Score= 104.1; E_value=4.2e-28; Accession=PF02518.16; Description=Histidine kinase-, DNA gyrase B-, and HSP90-like ATPase
LQILQDQVKLCKETLQQLVRAAEANRRLAVVEQDVTAWLDEALNRWHLMRPEASYRLQRLRDGQVPRLTPAPDLTQALLNLLNNAADACPDDLEVRLDWDAHDIVISIRDHGPGVPPAIAEAIGKPFITTKGKGFGLGLFLSKASVTRAGGSVKLYSHEQGGTLTELRLPYGKRGDE

SEQ ID NO: 8147 - protein, 83 aa, Zea mays
  misc_feature (27)..(27): Xaa can be any naturally occurring amino acid
  misc_feature (63)..(63): Xaa can be any naturally occurring amino acid
  misc_feature (67)..(67): Xaa can be any naturally occurring amino acid
  Coding DNA Sequence Number=SeqID_1710
  Gene Ontology: Mol. function=hydrolase activity, hydrolyzing O -glycosyl compounds; Cellular component=extracellular region; Biological process=carbohydrate metabolic process
  Homolog annotation: Hit_ID=Q9M159; Match level="QueryCoverage=98%, HitCoverage=19%, E-value=3e-16, Identity=53%"; Hit description =Putative uncharacterized protein AT4g01040
RGDGAIPGRDFVHVLDKFKPSLQWDGXSLEHFFIYSDEGVKHVVFYPTLMSLCVRLYLALNLXRTGXSFWAIVQGLDYFVEIL

SEQ ID NO: 8148 - protein, 138 aa, Zea mays
  misc_feature (49)..(49): Xaa can be any naturally occurring amino acid
  Coding DNA Sequence Number=SeqID_1711
  Gene Ontology: Cellular component=extracellular region; Biological process=sexual reproduction
  Homolog annotation: Hit_ID=Q7XCL0; Match level="QueryCoverage=73%, HitCoverage=39%, E-value=3e-21, Identity=51%"; Hit description =Expansin-like A2 precursor
  Pfam annotation: Domain name=DPBB_1; Domain location=20-91; Score =6.0; E_value=0.0014; Accession=PF03330.8; Description=Rare lipoprotein A (RlpA)-like double-psi
YPDGRDRRPGQFSSTSSERLTRPCSDLIRKCTRSPHCLQVRCRDSELCXVTDQARTSNRTALVLSASAYAAMASAGKAARLRDRRVVDVQYKRVPCGYMKDRNLSIRVEEKSRPPSNLSIRFLYQGGQTDTVAVDIAT

SEQ ID NO: 8149 - protein, 120 aa, Zea mays
  Coding DNA Sequence Number=SeqID_1712
MARRDELSELRVGELDAELMHDTRRNPCPGARQLHGSVSSVLDQADGEVTSATATSKARARAVGRRRGSLGAGQAPTSRTPRGSRETAELARRGERHGDQGARRAAWELERRELGVALGC

SEQ ID NO: 8150 - protein, 79 aa, Zea mays
  Coding DNA Sequence Number=SeqID_1714
  Subcellular localization annotation: CTP_CleavageSite=61; ConfidenceScore=5.23e-01
SALVTHPEQPLGKVPSVQSPIWSEGGAAERKTPSRRRSREMPSACVTGVPTHRRLFCDVTVARQRPPMVRQFWLLSFLH

SEQ ID NO: 8151 - protein, 164 aa, Zea mays
  Coding DNA Sequence Number=SeqID_1716
MYYWPQASLAYMPALAAVCALFWLCLATGLESRRAKWTAAALLVAAACSIEVGAMLVFAVAGLTVAAHVIVPKLRNGWRTSAWLILPLLASAGVLALVAHGRVSNGNEVMGDPAIAHHVRPALHAALVDFAKAIAASGWSGRSRLEIAMAMISKVCAFGAFFGL

SEQ ID NO: 8152 - protein, 140 aa, Zea mays
  misc_feature (85)..(85): Xaa can be any naturally occurring amino acid
  Coding DNA Sequence Number=SeqID_1718
  Gene Ontology: Mol. function=oxidoreductase activity, acting on single donors with incorporation of molecular oxygen, incorporation of two atoms of oxygen; Cellular component=chloroplast; Biological process=fatty acid biosynthetic process
  Homolog annotation: Hit_ID=A1XCI5; Match level="QueryCoverage=98%, HitCoverage=15%, E-value=1e-57, Identity=76%"; Hit description =Lipoxygenase
RVFPNRPAPIRKNIPVKKGGPGQKIKKFLKQPEKTLLDILPPQMQALKVITTLDILFLHSPDKEYMGEFPEPLWLAEPMVKAAFXKFGGRIKEIQGFFYECNNNLGLKNPFGPGIVPYKLLKPFSKPGVPGRGIPNSISL

SEQ ID NO: 8153 - protein, 145 aa, Zea mays
  misc_feature (123)..(123): Xaa can be any naturally occurring amino acid
  misc_feature (130)..(130): Xaa can be any naturally occurring amino acid
  Coding DNA Sequence Number=SeqID_1719
  Gene Ontology: Mol. function=transferase activity, transferring alkyl or aryl (other than methyl) groups; Cellular component=cytoplasm; Biological process=UDP-N-acetylgalactosamine biosynthetic process
  Homolog annotation: Hit_ID=Q39K93; Match level="QueryCoverage=98%, HitCoverage=31%, E-value=2e-67, Identity=91%"; Hit description=UDP-N- acetylglucosamine 1-carboxyvinyltransferase
TVNERDAVQSVATAHPAANGESQGQGMDKLVIEGGRRLSGEIVVSGAKNAALPILCAGLLSAEPVELDNVPNLKDVRTTLKVLNQMGVKSEADGCRVQLDASRVDNLVAPYELVKTMRASILXTRPLLAXFGEAKVSLPGGCATA

SEQ ID NO: 8154 - protein, 164 aa, Zea mays
  misc_feature (35)..(35): Xaa can be any naturally occurring amino acid
  misc_feature (41)..(41): Xaa can be any naturally occurring amino acid
  misc_feature (97)..(97): Xaa can be any naturally occurring amino acid
  misc_feature (102)..(102): Xaa can be any naturally occurring amino acid
  Coding DNA Sequence Number=SeqID_1720
  Gene Ontology: Mol. function=unfolded protein binding; Cellular component=plasma membrane; Biological process=response to stress
  Homolog annotation: Hit_ID=A8G9K8; Match level="QueryCoverage=91%, HitCoverage=23%, E-value=9e-27, Identity=49%"; Hit description =Chaperone protein dnaK
SFLLCIRLKFNLQYISRDVQGREHVPIKVTRAKLXHRYKIXVVRSIEPLKVAVLIPYQSVSDIIVVILLYGHTLKPLVQLKADVLFGKQPGTHVKPXEAGLXMDAAVQGSVMGGQVKLFRLPDVTHLSVAVQNMSRVVEPLISKRPTIPRQDREVLSTVKAHCL

SEQ ID NO: 8155 - protein, 95 aa, Zea mays
  misc_feature (41)..(41): Xaa can be any naturally occurring amino acid
  misc_feature (51)..(51): Xaa can be any naturally occurring amino acid
  Coding DNA Sequence Number=SeqID_1721
  Gene Ontology: Mol. function=structural constituent of ribosome; Cellular component=ribonucleoprotein complex; Biological process =translation
  Homolog annotation: Hit_ID=P40978; Match level="QueryCoverage=91%, HitCoverage=67%, E-value=1e-25, Identity=62%"; Hit description=40S ribosomal protein S19
  Pfam annotation: Domain name=Ribosomal_S19e; Domain location=8-94; Score=37.6; E_value=7.5e-11; Accession=PF01090.9; Description =Ribosomal protein S19e
MSQQTNTVDSHQSLNQTQAQHKFRGEMDLPEWLDIVKSARXPPYDQSMPRXIYLRQGIGVDGFQKIYGGRQRNGSRPPHFCKSSGAVSRGILQRS

SEQ ID NO: 8156 - protein, 262 aa, Zea mays
  misc_feature (25)..(25): Xaa can be any naturally occurring amino acid
  misc_feature (35)..(35): Xaa can be any naturally occurring amino acid
  misc_feature (72)..(72): Xaa can be any naturally occurring amino acid
  Coding DNA Sequence Number=SeqID_1722
  Gene Ontology: Cellular component=viral envelope
  Homolog annotation: Hit_ID=Q84VI1; Match level="QueryCoverage=99%, HitCoverage=37%, E-value=1e-131, Identity=92%"; Hit description =Envelope-like protein
LVREFMSTIPSDISNRKSDDYQRVXVRGKCVTFSXPAVINKYLGRPTDGVIDIAVSEHQIAKEITAKQVQHXPKKGKLSAGKLSVKYAILHRIGAANWVPTNHTSTIATGLGKFLYAVGTKSKFNFGNYIFDQTVKHSESFAVKLPIAFPTILSGIMLSQHPNMLNYTDSVMKRESPLSLHYKLFEGTHVPDIVSTSVSTSGKAADSGAVSKDALIAELKDTCKVLEATIKATTEKKMELERLIERLTESGIDDGEAAEEPE

SEQ ID NO: 8157 - protein, 87 aa, Zea mays
  Coding DNA Sequence Number=SeqID_1723
  Gene Ontology: Mol. function=DNA binding; Cellular component=nucleus
  Homolog annotation: Hit_ID=Q9SM17; Match level="QueryCoverage=96%, HitCoverage=18%, E-value=3e-16, Identity=56%"; Hit description=SBP -domain protein 3
  Subcellular localization annotation: CTP_CleavageSite=56; ConfidenceScore=5.06e-01
TPESLLQPSSGPRAGHHHHQEQHFITSLQVHNNDGCGGGNSSSSNNNIILSCSSVCSSALPSANGEVSDQNNGNAGGMHNLFEVDFM

SEQ ID NO: 8158 - protein, 77 aa, Zea mays
  Coding DNA Sequence Number=SeqID_1724
MGEKQGKSRLGKMPGRGTRHHRRALGHAGRAGSAAAMGDGGQAGAERAQRRDQEEVRESFGQKDARLLAGEGAEAGA

SEQ ID NO: 8159 - protein, 67 aa, Zea mays
  Coding DNA Sequence Number=SeqID_1726
MELSARAKPGDFPGPSGGTTRASTSAGVAGPKGEDHWAASGGMHLPRRARLIPPNGRMESHDGEEHV

SEQ ID NO: 8160 - protein, 70 aa, Zea mays
  Coding DNA Sequence Number=SeqID_1728
  Gene Ontology: Mol. function=tetrahydrofolylpolyglutamate synthase activity; Cellular component=cytoplasm; Biological process=folic acid and derivative biosynthetic process
  Homolog annotation: Hit_ID=A7MH53; Match level="QueryCoverage=100%, HitCoverage=16%, E-value=2e-20, Identity=68%"; Hit description =Putative uncharacterized protein
VVTSIALFLTGWLGPDRASIVREKAGVFRGGKPAVVGEADMPDTIAQVSSEKGAQLLQINRDWQWQREGD

SEQ ID NO: 8161 - protein, 67 aa, Zea mays
  Coding DNA Sequence Number=SeqID_1729
  Gene Ontology: Mol. function=catalytic activity; Cellular component =Golgi apparatus; Biological process=cellular metabolic process
  Homolog annotation: Hit_ID=Q39077; Match level="QueryCoverage=92%, HitCoverage=13%, E-value=3e-15, Identity=62%"; Hit description =Homolog of dTDP-glucose 4-6-dehydratases
TYSTRTPDDPHMRKPNTTKAKQLLLWEPKASLREGLPLMVKDFRQRISDELVSGTPAALTTAKPEAP

SEQ ID NO: 8162 - protein, 46 aa, Zea mays
  Coding DNA Sequence Number=SeqID_1730
FISTHGNHTVSCRASNHSRRCTLQWVRCLINTSFLNTCLMSYTTHN

SEQ ID NO: 8163 - protein, 114 aa, Zea mays
  Coding DNA Sequence Number=SeqID_1732
  Gene Ontology: Mol. function=mannose-6-phosphate isomerase activity; Cellular component=cytoplasm; Biological process=carbohydrate metabolic process
  Homolog annotation: Hit_ID=A5CPR7; Match level="QueryCoverage=77%, HitCoverage=22%, E-value=9e-27, Identity=63%"; Hit description =Putative mannose-6-phosphate isomerase
MVAPKANASRSGTVPRDSGQARAMFLGITNTPRDYAWGSVTAIPELLGRTVTGAPQAELWLGAHPGSPSVVVNPAMVGGADTLRDWIEAEPETALGADRTGLPFLLKVLAAAVT

SEQ ID NO: 8164 - protein, 77 aa, Zea mays
  Coding DNA Sequence Number=SeqID_1733
  Homolog annotation: Hit_ID=Q2R820; Match level="QueryCoverage=63%, HitCoverage=8%, E-value=3e-08, Identity=63%"; Hit description =Expressed protein
RSSWGDPEIKLFEFYKVEDPEHLFGEDQGWASGISAPAVQGLLEVLGEGGADNVSQGFLEATPYGSTELGRVLLQES

SEQ ID NO: 8165 - protein, 77 aa, Zea mays; identical to SEQ ID NO: 8164
  Coding DNA Sequence Number=SeqID_1734
  Homolog annotation: Hit_ID=Q2R820; Match level="QueryCoverage=63%, HitCoverage=8%, E-value=3e-08, Identity=63%"; Hit description =Expressed protein

SEQ ID NO: 8166 - protein, 69 aa, Zea mays
  Coding DNA Sequence Number=SeqID_1735
KAELAIIRLDERTRGRPSQDATGADTPHTARKRGTHLLRARRVTPYPDLVAAYEPRICPEWTEGDTLQF

SEQ ID NO: 8167 - protein, 71 aa, Zea mays
  Coding DNA Sequence Number=SeqID_1737
  Gene Ontology: Mol. function=binding; Cellular component=nucleus
  Homolog annotation: Hit_ID=A2YJA8; Match level="QueryCoverage=98%, HitCoverage=7%, E-value=7e-20, Identity=74%"; Hit description =Putative uncharacterized protein
RQVFPEALFHQLLLTMIHPDHEARVAAHRIFAIVLVPSSVSPSIQASPSSRPKKHDMQRTLSRAVSVFSSS

SEQ ID NO: 8168 - protein, 131 aa, Zea mays
  Coding DNA Sequence Number=SeqID_1738
  Gene Ontology: Mol. function=sugar:hydrogen symporter activity; Cellular component=integral to membrane; Biological process =carbohydrate transport
  Homolog annotation: Hit_ID=Q10PW9; Match level="QueryCoverage=96%, HitCoverage=24%, E-value=2e-59, Identity=88%"; Hit description=Sugar carrier protein C, putative, expressed
TDAMQVVPLFLSEIAPTRIRGGLNILFQLNITVGILFANVVNYGTSNIHPWGWRLSLALAGIPAVLLTLCALFVTDTPSSLIERGRMEEGKAVLKKIRGTDNVEPEFNEIVEASRVAQEVKHPFRNLLQAC

SEQ ID NO: 8169 - protein, 71 aa, Zea mays
  Coding DNA Sequence Number=SeqID_1739
  Gene Ontology: Mol. function=hydrogen ion transporting ATP synthase activity, rotational mechanism; Cellular component=proton -transporting two-sector ATPase complex; Biological process=energy coupled proton transport, ...
  Gene Ontology: Biological process=against electrochemical gradient
  Homolog annotation: Hit_ID=Q43433; Match level="QueryCoverage=67%, HitCoverage=12%, E-value=4e-20, Identity=97%"; Hit description =Vacuolar ATP synthase subunit B 2
AAREEVPGRRGYPGYMYTDLATIYERAGRIEGRTGSITQIPILTMPNDGRVLLPVDSREPNPCNEGGCPNA

SEQ ID NO: 8170 - protein, 185 aa, Zea mays
  Coding DNA Sequence Number=SeqID_1740
  Gene Ontology: Mol. function=transferase activity
  Homolog annotation: Hit_ID=A2Z3N2; Match level="QueryCoverage=98%, HitCoverage=39%, E-value=1e-41, Identity=53%"; Hit description =Putative uncharacterized protein
  Subcellular localization annotation: CTP_CleavageSite=70; ConfidenceScore=5.33e-01
MVGFPANHAVAVGRATSSFLVAWGRTMRGFPIGLPPPPLRRHAGLFPPRDPPRFEFELRGVEFRARPTPPASSSSPSHLVTAPGESTLRHDIVIHKAHFTGEFIAALRAKASEGRGHPFSRFETIVGHVWRAMTRARGLRDPCQASAIRISVDGRPRLGVPQEYFGNQINITFPRTTVGSLLTQS

SEQ ID NO: 8171 - protein, 167 aa, Zea mays
  misc_feature (19)..(19): Xaa can be any naturally occurring amino acid
  misc_feature (119)..(119): Xaa can be any naturally occurring amino acid
  misc_feature (145)..(145): Xaa can be any naturally occurring amino acid
  Coding DNA Sequence Number=SeqID_1741
  Homolog annotation: Hit_ID=Q8W0Y1; Match level="QueryCoverage=94%, HitCoverage=21%, E-value=1e-67, Identity=77%"; Hit description =Putative transposase
GLQEFGTSNSILGLLWREXHFPGLVEYAGVTGPAYTFDHYAVALDEVDRDGRESNNKAERVKQELWDFFRCEAGYEARVDVVATMSCKKLVMDMHYEARIQAIVSYHDPVLREKVTKHXARIMSFIRDQYLQTIPYWCATHPHCXEQMVDRWCSVEWDEAHNASRDV

SEQ ID NO: 8172 - protein, 203 aa, Zea mays
  misc_feature (69)..(69): Xaa can be any naturally occurring amino acid
  misc_feature (106)..(106): Xaa can be any naturally occurring amino acid
  misc_feature (120)..(120): Xaa can be any naturally occurring amino acid
  Coding DNA Sequence Number=SeqID_1742
  Gene Ontology: Mol. function=RNA-directed DNA polymerase activity; Biological process=RNA-dependent DNA replication
  Homolog annotation: Hit_ID=O48967; Match level="QueryCoverage=98%, HitCoverage=42%, E-value=5e-70, Identity=68%"; Hit description =Putative uncharacterized protein
  Pfam annotation: Domain name=Retrotrans_gag; Domain location=58-151; Score=21.5; E_value=0.00044; Accession=PF03732.7; Description =Retrotransposon gag protein
AYVGLSCVTDHLRTVAWSSKFRPHLLEKYGDTSNMLEFLQVYITAIIVAGGNGAVMASYFHLALIGPPXTSLENLTPGSIYSWEELCTWFIVNFANAYQQHGVEAXHPHVVRKESREMLXAFISCFTKVRGTIPCISDPFIIITFRQGVRDEKMLGKLSTHDVESVTTLFTLAEKCARATEGRAWHSPAQAGATQMGGPGVPS

SEQ ID NO: 8173 - protein, 70 aa, Zea mays
  Coding DNA Sequence Number=SeqID_1743
NYHYTNLLCPSLFFQGPDNPDAMRVFLYQWWLSLYHPHVRWSPGYITTTVTTGRLPNQLLEAHLALHWGF

SEQ ID NO: 8174 - protein, 91 aa, Zea mays
  misc_feature (35)..(35): Xaa can be any naturally occurring amino acid
  misc_feature (50)..(50): Xaa can be any naturally occurring amino acid
  Coding DNA Sequence Number=SeqID_1745
  Gene Ontology: Mol. function=peptidyl-prolyl cis-trans isomerase activity; Cellular component=spliceosome; Biological process=protein folding
  Homolog annotation: Hit_ID=A2Y8V7; Match level="QueryCoverage=96%, HitCoverage=56%, E-value=2e-28, Identity=68%"; Hit description =Peptidyl-prolyl cis-trans isomerase
  Pfam annotation: Domain name=Pro_isomerase; Domain location=3-92; Score=-39.0; E_value=7.4e-05; Accession=PF00160.11; Description =Cyclophilin type peptidyl-prolyl cis-tr
VVQVPRTAENFLALCASGYYDSTVFHRNIKGFMVXGGDPIGSGNAGPPSXGTKFADEFRESQGSTLCSAGANSRPNANGSRFFITYAKQPF

SEQ ID NO: 8175 - protein, 129 aa, Zea mays
  misc_feature (12)..(12): Xaa can be any naturally occurring amino acid
  Coding DNA Sequence Number=SeqID_1746
  Gene Ontology: Mol. function=heat shock protein binding
HRIYERYVVRQXRAEGKKALKDILLYGKSLPHLQVKDGSTGSFANSHAIPRFKTFRKGPQTHWSSNSWQGVHNHRKRLSSPASQGREGFPRPLAHPPPLPLSLAAAVASSPSCSQKSAAPPPRAPSADT

SEQ ID NO: 8176 - protein, 62 aa, Zea mays
  Coding DNA Sequence Number=SeqID_1747
SLHACSPSGFWRSQQRVRIFRWQWNGHRKSLPKGSLWYILQGITFAKLECENSGLFEAAGRL

SEQ ID NO: 8177 - protein, 185 aa, Zea mays
  Coding DNA Sequence Number=SeqID_1749
  Gene Ontology: Mol. function=sugar binding; Cellular component =integral to membrane; Biological process=recognition or rejection of self pollen
  Homolog annotation: Hit_ID=A7P183; Match level="QueryCoverage=98%, HitCoverage=23%, E-value=9e-49, Identity=48%"; Hit description =Chromosome chr19 scaffold_4, whole genome shotgun sequence
  Pfam annotation: Domain name=B_lectin; Domain location=19-132; Score =163.2; E_value=7.1e-46; Accession=PF01453.15; Description=D-mannose binding lectin
GSSSSPNLYVGIWYKNIPIRTVVWVANRDNPIKDNSSKLSINTKGYLVLINQNNTVIWSTNTTTKASLVVAQMLDSGNLVLRDQKDTNPENYLWQSFDYPSDTFLPGMKLGWDLKKGLNRVLTAWKNWDDPSPGDFTLTILHTNNPEVVMWKGTTQYYGSGPWDGTVFSGSPSVTSDSNVNYAIV

SEQ ID NO: 8178 - protein, 66 aa, Zea mays
  Coding DNA Sequence Number=SeqID_1750
  Gene Ontology: Mol. function=sequence-specific DNA binding; Cellular component=nucleus; Biological process=regulation of transcription, DNA-dependent
  Homolog annotation: Hit_ID=Q2QM96; Match level="QueryCoverage=100%, HitCoverage=7%, E-value=2e-28, Identity=89%"; Hit description=Class III HD-Zip protein 4, putative, expressed
VAEILKDRASWYRDCRHVDVLHVIPTGNGGTIELIYMQTYALTTLAEPRDFWTLRYTSGLDDGSLV

SEQ ID NO: 8179 - protein, 81 aa, Zea mays
  Coding DNA Sequence Number=SeqID_1751
  Homolog annotation: Hit_ID=Q6YWB8; Match level="QueryCoverage=100%, HitCoverage=23%, E-value=3e-10, Identity=45%"; Hit description =Putative uncharacterized protein P0501E09.13-1
MAGILGWVPYVVGGAGDIEDEQQVDARAAASAAMTPAQRLRAADLDARAASLRRAIQDLRLRVPPPHVAQRLPHLHADSLA

SEQ ID NO: 8180 - protein, 80 aa, Zea mays
  misc_feature (40)..(40): Xaa can be any naturally occurring amino acid
  misc_feature (49)..(49): Xaa can be any naturally occurring amino acid
  Coding DNA Sequence Number=SeqID_1752
  Homolog annotation: Hit_ID=A2ZAC0; Match level="QueryCoverage=93%, HitCoverage=1%, E-value=3e-22, Identity=70%"; Hit description =Putative uncharacterized protein
LQLILNTFDDTMSNYFMGLVPKSYDVVVKLNDNQTNSEKXVSKTNMEGXPALTLDVSFSRPIIVMPPETDSTNFMKIDIA

SEQ ID NO: 8181 - protein, 74 aa, Zea mays
  Coding DNA Sequence Number=SeqID_1753
MDSELEDMAVRELEQHAAWTELEGAARREGSSAAARARAGDSDQDAQGQARAQQRSQGRAPAMECGALAERLPE

SEQ ID NO: 8182 - protein, 83 aa, Zea mays
  Coding DNA Sequence Number=SeqID_1755
  Gene Ontology: Mol. function=acyltransferase activity; Cellular component=chloroplast stroma; Biological process=metabolic process
  Homolog annotation: Hit_ID=A7Q7E8; Match level="QueryCoverage=80%, HitCoverage=15%, E-value=3e-24, Identity=83%"; Hit description =Chromosome chr18 scaffold_59, whole genome shotgun sequence
  Pfam annotation: Domain name=2-oxoacid_dh; Domain location=3-77; Score=-157.3; E_value=0.034; Accession=PF00198.13; Description=2 -oxoacid dehydrogenases acyltransferase (catalytic domain)
CRDGKSFTYKNSINIAIAVAIDGGLITSVLQDAGKLDIYSLSRKQKELVDKALAKQLQPHEYNSDIFLPHTLPLIFLRLFFGL

SEQ ID NO: 8183 - protein, 123 aa, Zea mays
  Coding DNA Sequence Number=SeqID_1756
  Subcellular localization annotation: CTP_CleavageSite=46; ConfidenceScore=5.04e-01
MADSHTSERSILVILLPYPSQGPVNPILQFGKCRLSPRTAARSLARSESEQGRGAVDVLVHDAFLARWRVLPACMPFFTHPYAAVHVDVVYAHAWAGRTEPPLVSKEAVELPRFAGRAPAGEP

SEQ ID NO: 8184 - protein, 116 aa, Zea mays
  Coding DNA Sequence Number=SeqID_1758
PLTGQVTATLTAARVRVVVSLELLPTPPGQSPNYNIRAQLNNQQPEQSHCAPLPTQYPGQPLTSSPSAIAQQRPASSPGSLGPPQGSALDLAGDSRPVRASSRSYLPPPDGVCSCR

SEQ ID NO: 8185 - protein, 508 aa, Zea mays
  misc_feature (419)..(419): Xaa can be any naturally occurring amino acid
  misc_feature (461)..(461): Xaa can be any naturally occurring amino acid
  misc_feature (483)..(483): Xaa can be any naturally occurring amino acid
  Coding DNA Sequence Number=SeqID_1760
  Gene Ontology: Mol. function=nucleoside-triphosphatase activity
  Homolog annotation: Hit_ID=A2ZRF0; Match level="QueryCoverage=99%, HitCoverage=52%, E-value=1e-157, Identity=54%"; Hit description =Putative uncharacterized protein
  Pfam annotation: Domain name=zf-CCCH; Domain location=317-343; Score =18.2; E_value=0.0054; Accession=PF00642.15; Description=Zinc finger C-x8-C-x5-C-x3-H type (and similar)
CSLREQVLMVCCAEPRSISDPSSLLQRVLNPPDPDAIEEALESLVQIHALEKTASGRYEPTFYGCLLNSLPLSFDSSVLALKFCELGAIHEGILISIMLDIQPLPILHTFGYRELCQKYIDNYFKGNGSVQIGKKEATTIGNLCAFQFWERVFKDKHRLEYLKYVAKTQEPEESHTFLTKPEEEWCAVHNLLPAAFKNISEIYDVVVMQLHRFRPSFLVKINPPKFLQPSEFNHTCLHREILDLEEDVDSLSLETENAHSDSQKRCAATPYVSPTDFETSTIVEMLKTLVKMKTQHAENKISYKGRLGSNVKPTFGNSGPVCKFYLTLQGCRNGRSCPYSHDSGSLVSAPVTSGICSQESRATSLCDTRLLPADGDGHILVVNDKTHQFYIKHSQFCDPGKIAVVPTGHEYAESNSVPXGLHILETLSVPSILISGLEQALPEPWANLNRALWLDPFGNCXSATEQALLQKFFPSLAVNNLSXRLSYLHVILGLKHPRYIQLQVSPIP

SEQ ID NO: 8186 - protein, 160 aa, Zea mays
  misc_feature (108)..(108): Xaa can be any naturally occurring amino acid
  Coding DNA Sequence Number=SeqID_1761
  Gene Ontology: Mol. function=tetracycline:hydrogen antiporter activity; Cellular component=integral to membrane; Biological process=response to antibiotic
  Homolog annotation: Hit_ID=A6T9D6; Match level="QueryCoverage=100%, HitCoverage=30%, E-value=5e-69, Identity=79%"; Hit description =Multidrug resistance; probably membrane translocase
LTPLFLSQVRGFSALETGLAIFSTGVFQILSIPLYAWLANRVDLRILLAAGLICFALSMHFFVPITHDWGAKELLFPQAFRGMAQQFAVAPTVTLTLGSLPPARLKLXSGLFNLMRNLGGAIGIALCGTVLNDRTNLHFNRLADHLNSASLTLGEFCRHA

SEQ ID NO: 8187 - protein, 96 aa, Zea mays
  Coding DNA Sequence Number=SeqID_1762
  Homolog annotation: Hit_ID=A2WE64; Match level="QueryCoverage=100%, HitCoverage=6%, E-value=1e-20, Identity=58%"; Hit description=Large exoprotein involved in heme utilization or adhesion
RSDTVSYAGTISVIGALRQTGTGTTILVGVIRYTGGTAIAGGALAVGDASHPLATSGSGDVAVASGASLGGYGQIAGSVHNVGTLAPANALPVFSA

SEQ ID NO: 8188 - protein, 102 aa, Zea mays
  Coding DNA Sequence Number=SeqID_1763
  Subcellular localization annotation: CTP_CleavageSite=91; ConfidenceScore=5.50e-01
QQRRASSSSCRMLHVWWPSASQARSSHRASSCISSHQLQQPLARPYPSTTLATTSPASHQRVAHPASVGTSFPLRDEDPKPFLPLMSSSLSANRRRRPTLSR

SEQ ID NO: 8189 - protein, 123 aa, Zea mays
  Coding DNA Sequence Number=SeqID_1765
  Gene Ontology: Mol. function=DNA binding; Cellular component=nucleus; Biological process=regulation of transcription, DNA-dependent
  Homolog annotation: Hit_ID=A7PEW6; Match level="QueryCoverage=40%, HitCoverage=6%, E-value=2e-14, Identity=77%"; Hit description =Chromosome chr11 scaffold_13, whole genome shotgun sequence
  Subcellular localization annotation: CTP_CleavageSite=76; ConfidenceScore=5.00e-01
MQMQQILLQRAQQQQQHQQQQQQQQQQPQQQQQQQQQQPQQQHQQHQQQQQPQQQGRDRAHLLNGGTNGLVGNPSTANALATKMYEERLKLPLQRDSLEDAAMKRFGDQILDPNHASILKSSA

SEQ ID NO: 8190 - protein, 129 aa, Zea mays
  Coding DNA Sequence Number=SeqID_1766
  Gene Ontology: Mol. function=oxidoreductase activity, acting on NADH or NADPH; Cellular component=plasma membrane; Biological process =mitochondrial electron transport, NADH to ubiquinone
  Homolog annotation: Hit_ID=Q9PGJ0; Match level="QueryCoverage=89%, HitCoverage=26%, E-value=1e-46, Identity=68%"; Hit description=NADH -ubiquinone oxidoreductase, NQO1 subunit
MPAELGSGLGSGAVIVMDETTCMVKACHRIARFYKAESCGQCTPCREGTGWMYRVLTRIVEGKGTQDDLHRLKAIAGQIEGHTICAFGEAAAWPVQGFLAKFWNEFEYYVQHGRSMTEDRLAANRGVAA

SEQ ID NO: 8191 - protein, 105 aa, Zea mays
  Coding DNA Sequence Number=SeqID_1767
  Gene Ontology: Mol. function=urocanate hydratase activity; Cellular component=cytoplasm; Biological process=histidine catabolic process
  Homolog annotation: Hit_ID=A1V618; Match level="QueryCoverage=100%, HitCoverage=18%, E-value=2e-47, Identity=88%"; Hit description =Urocanate hydratase
RIDFRLKTRYVDKKARRLDEALGMIEEAKRDGKPVSVGLLGNAAYVFAELVKRGITPDCVTDQTSAHDPINGYLPQGWTVAQWREAQKVDPQSIVKVAKQSMAVQ

SEQ ID NO: 8192 - protein, 71 aa, Zea mays
  Coding DNA Sequence Number=SeqID_1768
  Gene Ontology: Mol. function=orotidine-5'-phosphate decarboxylase activity; Biological process='de novo' pyrimidine base biosynthetic process
  Homolog annotation: Hit_ID=Q9LKI4; Match level="QueryCoverage=91%, HitCoverage=13%, E-value=8e-13, Identity=61%"; Hit description=UMP synthase
KVGAYDFITSFELLMLVGRVGPQICMLKTHVDILSDFTPDFGSKLRSVSSNFPFCPFLIHSSKTHGNTRAA

SEQ ID NO: 8193 - protein, 123 aa, Zea mays
  misc_feature (75)..(75): Xaa can be any naturally occurring amino acid
  misc_feature (103)..(103): Xaa can be any naturally occurring amino acid
  Coding DNA Sequence Number=SeqID_1770
  Homolog annotation: Hit_ID=Q5KQH6; Match level="QueryCoverage=96%, HitCoverage=37%, E-value=8e-39, Identity=70%"; Hit description =Putative uncharacterized protein OSJNBa0095J22.14
WHLHEEFDTHDPKDNTLLLPYLRKRPNIIEIGAARDIVFALSPIGVCAAFSRDTNQRICFLNGSLHEVIRYFFHXKTNDSFKTASVFGSEIFSALRCSITRIXTFAEDQTNPDAGFPLFDSPC

SEQ ID NO: 8194 - protein, 178 aa, Zea mays
  Coding DNA Sequence Number=SeqID_1771
  Gene Ontology: Mol. function=oxidoreductase activity, acting on NADH or NADPH; Cellular component=membrane; Biological process=ATP synthesis coupled electron transport
  Homolog annotation: Hit_ID=Q5GXT8; Match level="QueryCoverage=94%, HitCoverage=21%, E-value=4e-63, Identity=68%"; Hit description=NADH -quinone oxidoreductase
  Pfam annotation: Domain name=Fer2; Domain location=17-85; Score=40.6; E_value=5.7e-09; Accession=PF00111.17; Description=2Fe-2S iron-sulfur cluster binding domain
RCMSAQPTSTAPDLVNIEIDGKPTQVRKGAMIIEAADAIGVAIPRFCYHRKLPIAANCRMCLVDVEMGGRPMPKPQPACATPVGEGMKVTTRSDKALKFQKDVMEFLLMNHPLDCPICDQGGECDLQDQSMAFGADRGRFTEMKRSVVDKNLGPLVKTVMTRCIQCTRCDAILFSNCR

SEQ ID NO: 8195 - protein, 88 aa, Zea mays
  Coding DNA Sequence Number=SeqID_1772
  Gene Ontology: Mol. function=transferase activity, transferring glycosyl groups; Cellular component=chloroplast; Biological process =biosynthetic process
  Homolog annotation: Hit_ID=Q6DW76; Match level="QueryCoverage=100%, HitCoverage=11%, E-value=5e-46, Identity=90%"; Hit description =Digalactosyldiacylglycerol synthase 1, chloroplast precursor
WYHHGKRWTDKFNHVIGVVHTNYLEYIKREKNGAIQSFLVKHINNWVTRAYCHKVLRLSAATQDLPRSVVCNVHGVNPKFLNVGEKIA

SEQ ID NO: 8196 - protein, 64 aa, Zea mays
  misc_feature (20)..(20): Xaa can be any naturally occurring amino acid
  Coding DNA Sequence Number=SeqID_1773
  Gene Ontology: Mol. function=hydrogen ion transporting ATPase activity, rotational mechanism; Cellular component=proton -transporting two-sector ATPase complex; Biological process=proton transport
  Homolog annotation: Hit_ID=Q9SWE7; Match level="QueryCoverage=90%, HitCoverage=25%, E-value=1e-11, Identity=64%"; Hit description =Vacuolar proton pump subunit E
QVIGIKKKIDYSMQLKAPEXSLQAQDDLVTDMLESARKELLCISRDHLIYKKLLKTLIVQVSRT

SEQ ID NO: 8197 - protein, 203 aa, Zea mays
  Coding DNA Sequence Number=SeqID_1774
  Gene Ontology: Mol. function=DNA-directed RNA polymerase activity; Cellular component=mitochondrion; Biological process=transcription
  Homolog annotation: Hit_ID=P10581; Match level="QueryCoverage=100%, HitCoverage=18%, E-value=1e-102, Identity=92%"; Hit description =Probable DNA-directed RNA polymerase
  Pfam annotation: Domain name=RNA_pol; Domain location=1-204; Score= -117.9; E_value=1.3e-06; Accession=PF00940.10; Description=DNA -dependent RNA polymerase
SCLSLKTSADTGDLSVLRYTPVSQDASASAYQMMSYFLLDIDYGIHTNLLKTPNTDGRYIRDIYEFMRDCLINYLIAEEKIELVIKLLTRNEKDQESVLAKIVSIFDRNVVKKMFMPMMYGKTDYTLKKDVEDLLKGKSDSEGINLISKHISTYWKENFGKMKDLMDLINYVSWFGAGQDKPVVYSTPYWVTLQTYKRGKRVK

SEQ ID NO: 8198 - protein, 77 aa, Zea mays
  misc_feature (70)..(70): Xaa can be any naturally occurring amino acid
  Coding DNA Sequence Number=SeqID_1775
  Homolog annotation: Hit_ID=UPI00006D9A46; Match level="QueryCoverage =100%, HitCoverage=17%, E-value=2e-30, Identity=87%"; Hit description= COG5001: Predicted signal transduction protein containing a membrane domain, an EAL and a GGDEF domain
PLRRGADEAHAQANATGGNALAFHAPVDEPADAERHKLEADLNDGVRNGEFSLHFQPITRSQSGAVVGVXALIRWRH

SEQ ID NO: 8199 - protein, 230 aa, Zea mays
  misc_feature (153)..(153): Xaa can be any naturally occurring amino acid
  misc_feature (220)..(220): Xaa can be any naturally occurring amino acid
  Coding DNA Sequence Number=SeqID_1776
  Gene Ontology: Mol. function=lipid transporter activity; Cellular component=extracellular region; Biological process=lipid transport
  Homolog annotation: Hit_ID=Q0ZUC7; Match level="QueryCoverage=84%, HitCoverage=10%, E-value=1e-61, Identity=62%"; Hit description =Vitellogenin
PLQVDTQAENLIKSRINNKPSHGSVNGVYKTMEDSVTGECEVMYDISPLAQYQLQSRPELAPMPQLRGDGQLIDIVKTKNFSHCEQRPGYHFGINGLTDVEPASSKMGEFMARSSVSRVVLSGSLQRYTIQSSVTTNKVLLSPVLYNNQNGMXVVSRMNLTLDSVHAASGSPQGPANPRKIKDLVYDYNDPSRLKNADMSDDSSSSSSSSSSSSSYSSSXSSSESSEEQG

SEQ ID NO: 8200 - protein, 95 aa, Zea mays
  Coding DNA Sequence Number=SeqID_1777
GGREMTDEAIRKNKKESHDTQEEAKRAEEVAERTRRIAGLSPPPEPYNPKANPAMKEALETIRIANEAVEEDVLIRHNRFSIINWWGYRRVRGLQ

SEQ ID NO: 8201 - protein, 116 aa, Zea mays
  Coding DNA Sequence Number=SeqID_1779
  Gene Ontology: Mol. function=acetylesterase activity; Biological process=xylan catabolic process
  Homolog annotation: Hit_ID=Q83V97; Match level="QueryCoverage=96%, HitCoverage=34%, E-value=2e-31, Identity=55%"; Hit description =Pectin acetylesterase precursor
MVLLYPVISMRAGLAHESSRTRLLGAWPDQKSIDAYSLETRVHGQTPPTLLIHAADDETVSVNNSMVFFSALREHKVPAEIHFYQKGGHGFGIRGVADLPLASWPMLVTEWLRAKT

SEQ ID NO: 8202 - protein, 98 aa, Zea mays
  misc_feature (15)..(15): Xaa can be any naturally occurring amino acid
  Coding DNA Sequence Number=SeqID_1780
  Gene Ontology: Mol. function=transferase activity, transferring glycosyl groups; Biological process=enterobacterial common antigen biosynthetic process
  Homolog annotation: Hit_ID=Q7MYM6; Match level="QueryCoverage=100%, HitCoverage=40%, E-value=6e-31, Identity=67%"; Hit description =Probable UDP-N-acetyl-D-mannosaminuronic acid transferase
MALNDIRKYRIRGLXLRGFQGIAHFLDHLFQDGQGKTGTLIAINAQKGLTAEKDKALNTLLDETEYFYADCINIVRAIQRKYPDAQVSPIAGADLWEA

SEQ ID NO: 8203 - protein, 66 aa, Zea mays
  misc_feature (22)..(22): Xaa can be any naturally occurring amino acid
  misc_feature (33)..(33): Xaa can be any naturally occurring amino acid
  Coding DNA Sequence Number=SeqID_1781
  Gene Ontology: Mol. function=identical protein binding; Biological process=negative regulation of catalytic activity
  Homolog annotation: Hit_ID=Q6WNU4; Match level="QueryCoverage=95%, HitCoverage=8%, E-value=9e-25, Identity=90%"; Hit description =Subtilisin-like protease
MFINVLPASHINLTDGSAVFNXYINSTKFPVAXITHPKNQLDSKPAPFMAAFSSKGPNTMVPEILK

SEQ ID NO: 8204 - protein, 106 aa, Zea mays
  Coding DNA Sequence Number=SeqID_1782
  Gene Ontology: Mol. function=protein serine/threonine kinase activity; Cellular component=nucleus; Biological process=protein amino acid phosphorylation
  Homolog annotation: Hit_ID=Q60DG4; Match level="QueryCoverage=100%, HitCoverage=11%, E-value=2e-56, Identity=98%"; Hit description =Serine/threonine-protein kinase Nek4
  Pfam annotation: Domain name=Pkinase; Domain location=1-106; Score= -89.5; E_value=0.003; Accession=PF00069.15; Description=Protein kinase domain
  Pfam annotation: Domain name=Pkinase_Tyr; Domain location=1-106; Score=-165.3; E_value=0.027; Accession=PF07714.7; Description =Protein tyrosine kinase
  Pfam module annotation: Pfam domain module=Pkinase::Pkinase_Tyr; Domain location=1-106::1-106
LQHPYIVEFKEAWVEKGCYVCIVTGYCEGGDMDELMKKSNGTYFPEEVLLKWFAQLVLAVDYLHSNYVLHRDLKCSNIFLTKDQDIRLGDFGLAKTLKEDDLTSSV

SEQ ID NO: 8205 - protein, 97 aa, Zea mays
  Coding DNA Sequence Number=SeqID_1783
  Gene Ontology: Mol. function=catalytic activity; Cellular component =cytoplasm; Biological process=positive regulation of fibroblast proliferation
  Homolog annotation: Hit_ID=A7PIU4; Match level="QueryCoverage=98%, HitCoverage=34%, E-value=1e-34, Identity=69%"; Hit description =Chromosome chr13 scaffold_17, whole genome shotgun sequence
  Pfam annotation: Domain name=Prenyltrans; Domain location=1-32; Score= 28.8; E_value=2e-05; Accession=PF00432.11; Description=Prenyltransfera se and squalene oxidase re
  Pfam annotation: Domain name=Prenyltrans; Domain location=48-91; Score=45.3; E_value=2.1e-10; Accession=PF00432.11; Description =Prenyltransferase and squalene oxidase re
  Pfam module annotation: Pfam domain module=Prenyltrans::Prenyltrans; Domain location=1-32::48-91
MQSYDGGFGMVPGSESHGGGTFCAVAALHLMGFIQVDLASDLRDSTSIDTCMLLEWCLQRQVTDGGFQGRRNKLSDTCYAFWVGGVLKILGAFHLID

SEQ ID NO: 8206 - protein, 160 aa, Zea mays
  Coding DNA Sequence Number=SeqID_1784
PVSSPAPHGQVFAHPLGSLGLNPYLVVDPCCAHDVLVDFDDLISNFVLFMLTIGTPCRTRPCKPPSRRHSVRQREISRVGKTEPAAWYPPSTRQKALTSCATQVRFVKMIQSRKRSSAIDYRRKEGPWVTSSGTRSRACDYRVELVRVSKFVTRVSGWFD

SEQ ID NO: 8207 - protein, 132 aa, Zea mays
  Coding DNA Sequence Number=SeqID_1786
  Gene Ontology: Mol. function=aspartic-type endopeptidase activity; Biological process=DNA integration
  Homolog annotation: Hit_ID=Q2QSG2; Match level="QueryCoverage=83%, HitCoverage=7%, E-value=3e-15, Identity=39%"; Hit description =Retrotransposon protein, putative, Ty1-copia subclass
GALEAQFLGNHQTQILYLETAFRQLAQGGLSVDEYCHQMKTMVNTLHTLRAPITDENLVLNLLHCLNPRFDHVTPILTRMSKNNLLLEELRLSTTATTAPATMLYSVPQAAPSDSGGILLHRTSTPPPFGAL

SEQ ID NO: 8208 - protein, 124 aa, Zea mays
  Coding DNA Sequence Number=SeqID_1787
MQLPVDERQDHGRAPRRRNGGHQSETGGARAHTAGPGTHSNLLSHQAALCHEDCDRALGARRASRQPPATPLRKWPNGGDTAHAPPGAAPVQRSDTHGAPGNGPATTGGGWAWLARPRPGAGGP

SEQ ID NO: 8209 - protein, 116 aa, Zea mays
  Coding DNA Sequence Number=SeqID_1789
  Gene Ontology: Mol. function=hydrolase activity; Biological process =metabolic process
  Homolog annotation: Hit_ID=A7MNX8; Match level="QueryCoverage=84%, HitCoverage=44%, E-value=2e-34, Identity=75%"; Hit description =Putative uncharacterized protein
TGLAFALASASPLAMLERVLEMFNLRLYFSALASAEALPYSKPHPQVYLDAAAKLGVDPLNCVALEDSFNGMIASKAARMRSIVVPAAEHRHDARWALANMQLENLTQLRAEHLFN

SEQ ID NO: 8210 - protein, 127 aa, Zea mays
  Coding DNA Sequence Number=SeqID_1790
VPGPPLEFFFFFFFFFFFFFFFFFLFFFYLPFLFFCLHHEQPLLFDWGHIDDDRLSNQTLGFFNGATSLANQKHKEWVCFFFTLFYCAPIGHGKHPYALNGCPALLHEKRGFAGVLPPVLVEHSSCF

SEQ ID NO: 8211 - protein, 185 aa, Zea mays
  Coding DNA Sequence Number=SeqID_1792
PFLADDIKMIAAFWSPMLNQSFPSLLASFEDMAFLPPGLPRNRALLCLFASSSHQPPATITDGRHGATHRQRNGNAWLMAPQLGLRDPLDMPTRRPSRSTDMGARTALGNLLASTSLDQCSWTTKVHKCPLRHVAVAGRQRSSRQDVIRLHHPFPPDGRSTASTGARWPATSNRMDGAPALACPT

SEQ ID NO: 8212 - protein, 108 aa, Zea mays
  misc_feature (56)..(56): Xaa can be any naturally occurring amino acid
  Coding DNA Sequence Number=SeqID_1794
  Gene Ontology: Mol. function=phosphoenolpyruvate carboxylase activity; Cellular component=cytoplasm; Biological process=carbon utilization by fixation of carbon dioxide
  Homolog annotation: Hit_ID=A7P310; Match level="QueryCoverage=75%, HitCoverage=7%, E-value=4e-25, Identity=75%"; Hit description =Phosphoenolpyruvate carboxylase
LIADPDDSHSTLAPPTFANPGPLFETVKDLQAAGSTIRKLLSIDWYREHIPSSTTXHNGHQEVTVATPDSGKDAGRFTAAWEQCKANKAQEDVVAACNESGISEMDKK

SEQ ID NO: 8213 - protein, 106 aa, Zea mays
  Coding DNA Sequence Number=SeqID_1795
  Gene Ontology: Mol. function=hydrolase activity; Cellular component =integral to membrane
  Homolog annotation: Hit_ID=P64481; Match level="QueryCoverage=98%, HitCoverage=52%, E-value=1e-36, Identity=68%"; Hit description=Inner membrane protein ydjM precursor
  Pfam annotation: Domain name=DUF457; Domain location=40-106; Score =36.4; E_value=1.1e-07; Accession=PF04307.5; Description=Predicted membrane-bound metal-dependent hydrolase (DUF457)
MTAEGHIIFAIASAIFAKRAELTPVMASADWWHLVPAALLTCLLPDIDHPKSVLGQRLKWLSQPIARAFGHRGFTHSLLAVTVSLWLFQINVPADWFLPADVLQSR

SEQ ID NO: 8214 - protein, 255 aa, Zea mays
  misc_feature (235)..(235): Xaa can be any naturally occurring amino acid
  Coding DNA Sequence Number=SeqID_1796
  Gene Ontology: Mol. function=DNA topoisomerase (ATP-hydrolyzing) activity; Cellular component=chromosome; Biological process=DNA topological change
  Homolog annotation: Hit_ID=Q9HUJ8; Match level="QueryCoverage=97%, HitCoverage=39%, E-value=1e-126, Identity=88%"; Hit description=DNA topoisomerase 4 subunit B
  Pfam annotation: Domain name=HATPase_c; Domain location=29-174; Score= 97.2; E_value=5.1e-26; Accession=PF02518.16; Description=Histidine kinase-, DNA gyrase B-, and HSP90-like ATPase
MAQQNAYTAEAIEVLSGLDPVRKRPGMYTDTTRPNHLAQEVIDNSVDEALAGHARSVQVILHEDNSLEVIDDGRGMPVDIHPEEGVPGVELILTKLHAGGKFSNKNYQFSGGLHGVGISVVNALSTQVEVRVKRDANEYRMTFADGFKASDLEVIGSVGRRNTGTTVRIWPDPKYFDSPKFSVSRLKHVLKAKAVLCPGLLVTFEDKSSGERVEWHCEDGLRSHLADSVSELPRXKEEPLCGTLAGSKETVDWAL

SEQ ID NO: 8215 - protein, 110 aa, Zea mays
  Coding DNA Sequence Number=SeqID_1797
  Gene Ontology: Mol. function=xylulokinase activity; Biological process=carbohydrate metabolic process
  Homolog annotation: Hit_ID=A4AK18; Match level="QueryCoverage=99%, HitCoverage=23%, E-value=6e-37, Identity=68%"; Hit description =Xylulose kinase
RENLARAAIEGMLCGLGAGLDAVRAVGVREKRLLLIGGAAQNEAVQRVAAQVFDAPVAVPTPGEYVADGAAVQAAWVLTGSRPQWHVAIVAEPAADHRPVIREQYARFAG

SEQ ID NO: 8216 - protein, 203 aa, Zea mays
  Coding DNA Sequence Number=SeqID_1798
  Gene Ontology: Mol. function=cAMP-dependent protein kinase regulator activity; Cellular component=membrane; Biological process=protein amino acid phosphorylation
  Homolog annotation: Hit_ID=Q6D2H7; Match level="QueryCoverage=100%, HitCoverage=23%, E-value=6e-74, Identity=72%"; Hit description =Putative mechanosensitive ion channel protein
  Pfam annotation: Domain name=MS_channel; Domain location=1-180; Score= 110.6; E_value=4.9e-30; Accession=PF00924.9; Description =Mechanosensitive ion channel
QWNKLAWIVSALSVGIGFGLQEIVKNFISGLILLTERPVKVGDLVSISGIEGDIRRINVRATEIQLGDKSTVIVPNSQLISQNVRNATMGNAQGVVTIQLTFPLDIDPVQVRELLLDVYRENERILETPEPSVSFKDLTPAGIVLSVTGNVASQRQISGAKSDLLFDILTRLRKEGIVLSTPQTMIIERRALPATQNEGEALP

SEQ ID NO: 8217 - protein, 178 aa, Zea mays
  Coding DNA Sequence Number=SeqID_1799
  Homolog annotation: Hit_ID=A8GB99; Match level="QueryCoverage=100%, HitCoverage=16%, E-value=2e-26, Identity=39%"; Hit description=Hpt sensor hybrid histidine kinase precursor
GSARGFGIDLLNALSQSTGLRFTPRWVNNPQQAASLLQQQQVMLNLLQPLYGDDANRTALPVWRAIWGIYTLSDRQPMDWSALHAQRVGVLRGDLAQRLLPAEIAPQLFDDRAQLWQALNTGQIDAVVDNVLSARWRMASHEGNRVHLAFVASDIAWPLAPQVSAQQPQLSALLDHAL

SEQ ID NO: 8218 - protein, 146 aa, Zea mays
  Coding DNA Sequence Number=SeqID_1800
  Gene Ontology: Mol. function=electron carrier activity; Biological process=electron transport
  Homolog annotation: Hit_ID=A2YII1; Match level="QueryCoverage=79%, HitCoverage=68%, E-value=4e-13, Identity=36%"; Hit description =Putative uncharacterized protein
  Pfam annotation: Domain name=Cu_bind_like; Domain location=36-116; Score=40.5; E_value=3.5e-09; Accession=PF02298.8; Description =Plastocyanin-like domain
MASKQVLLLLAAVACLASLASATPWTVGDAGGWRAKFNETGWANGKTFVVGDTLLFVYPKENHTVVKVGKDAFAACDLSANLHVGNLVSATDIEQLGHPGMEWLMCHEPDQSLVGMDLAFYVVEASTSREAMATIPASKQLCPYDA

SEQ ID NO: 8219 - protein, 161 aa, Zea mays
  misc_feature (8)..(8): Xaa can be any naturally occurring amino acid
  Coding DNA Sequence Number=SeqID_1801
  Gene Ontology: Mol. function=nucleoside-triphosphatase activity; Cellular component=intracellular; Biological process=regulation of transcription, DNA-dependent
  Homolog annotation: Hit_ID=Q88IC4; Match level="QueryCoverage=97%, HitCoverage=32%, E-value=6e-72, Identity=87%"; Hit description=Sigma- 54 dependent transcriptional regulator
  Pfam annotation: Domain name=HTH_8; Domain location=115-155; Score =54.0; E_value=5.1e-13; Accession=PF02954.9; Description=Bacterial regulatory protein, Fis family
  Pfam annotation: Domain name=Sigma54_activat; Domain location=1-72; Score=-99.6; E_value=2.2e-08; Accession=PF00158.16; Description =Sigma-54 interaction domain
  Pfam module annotation: Pfam domain module=HTH_8::Sigma54_activat; Domain location=115-155::1-72
QAAIARGXFRADLYYRLNVLPIEVPPLRQRLEDLPALCEAILGELGSQYELEAEAQQLLARHAWPGNIRELFNVLERATLLADQPRLGVEDLRAALGPLSPVAGEPMRQTYREACEAFERELIAGALAEHAGNVPQAAQALGLGRSTLYKKMVALGISSPT

SEQ ID NO: 8220 - protein, 110 aa, Zea mays
  misc_feature (36)..(36): Xaa can be any naturally occurring amino acid
  Coding DNA Sequence Number=SeqID_1802
  Gene Ontology: Mol. function=glycolipid transporter activity; Cellular component=cytoplasm; Biological process=glycolipid transport
  Homolog annotation: Hit_ID=O22797; Match level="QueryCoverage=91%, HitCoverage=46%, E-value=6e-16, Identity=48%"; Hit description =Expressed protein
ILFSRLCSFLQEESESSIRPGPARPVGGDRWLPTEXMDDLLVTLFHNLAQHPETGTGTCRPQACGDAYSRTLKRWHGWLVQSQLAMNMKLAPDRTNKFMEIISVVQAHQR

SEQ ID NO: 8221 - protein, 189 aa, Zea mays
  Coding DNA Sequence Number=SeqID_1803
  Gene Ontology: Mol. function=DNA-directed DNA polymerase activity; Biological process=metabolic process
  Homolog annotation: Hit_ID=A0T934; Match level="QueryCoverage=52%, HitCoverage=46%, E-value=1e-50, Identity=92%"; Hit description=Phage SPO1 DNA polymerase-related protein precursor
  Pfam annotation: Domain name=UDG; Domain location=104-189; Score= -13.9; E_value=0.0079; Accession=PF03167.9; Description=Uracil DNA glycosylase superfamily
  Subcellular localization annotation: CTP_CleavageSite=46; ConfidenceScore=5.36e-01
MGAVDACTADVPARRGLRSACRTCRVHAGAPRLTRPRGRAAGMRGRCSMTRATHAPPSQPSTSSTPSKRAKPATAAPEPDDDAPATLDACRRCSLWEHATQPVPGAGPTNARIMLVGEQPGDQEDRTGIPFVGAAGRMLDRALDEAGIDRKHVYLTNAVKHFKWEPRGKNRLHKTPAQREVAACRYWLQ

SEQ ID NO: 8222 - protein, 68 aa, Zea mays
  Coding DNA Sequence Number=SeqID_1804
MSAWRHRSRRRRRDPKVVVIIIIIIIIIIIIIVRDCCALSLKLVKSGILGLSINHWSRCRHRSSGAGR

SEQ ID NO: 8223 - protein, 150 aa, Zea mays
  misc_feature (134)..(134): Xaa can be any naturally occurring amino acid
  misc_feature (144)..(144): Xaa can be any naturally occurring amino acid
  Coding DNA Sequence Number=SeqID_1806
  Gene Ontology: Mol. function=transporter activity; Cellular component= membrane; Biological process=oligopeptide transport
  Homolog annotation: Hit_ID=A3A0M3; Match level="QueryCoverage=93%, HitCoverage=52%, E-value=6e-44, Identity=67%"; Hit description =Putative uncharacterized protein
QGIQIESLLDDKDEEASSSPTSQCAEVEEYRSFLDKAAVEMADDKKRRRLASAWRLCTVKQVEEHKCVLRLQPVWARDIVFAAAYTQMTTTFVLQGDTLDPHVGGGFRVPAAALSVFDTLSVMLWVPLYDRLVXKMARRATGHXRGFTQG

SEQ ID NO: 8224 - protein, 87 aa, Zea mays
  misc_feature (63)..(63): Xaa can be any naturally occurring amino acid
  Coding DNA Sequence Number=SeqID_1807
  Gene Ontology: Mol. function=polyribonucleotide nucleotidyltransferase activity; Cellular component=cytoplasm; Biological process=mRNA catabolic process
  Homolog annotation: Hit_ID=P41121; Match level="QueryCoverage=100%, HitCoverage=12%, E-value=9e-36, Identity=88%"; Hit description =Polyribonucleotide nucleotidyltransferase
DIGHGRLAKRGVLALMPSINEFPYTERVVSEITESNGSSSMASVCGASLALMDAGVPIKAAVXGIAIGLVKEGENFVVLSDIPGDEN

SEQ ID NO: 8225 - protein, 72 aa, Zea mays
  Coding DNA Sequence Number=SeqID_1808
TGSAPGTTLGGSQGHDGCDAPSGEPGALTATPPTTKPLTIQHKDQRWRFSTRKRPMKEKRTKNISKLNSEGD

SEQ ID NO: 8226 - protein, 144 aa, Zea mays
  misc_feature (5)..(5): Xaa can be any naturally occurring amino acid
  misc_feature (43)..(43): Xaa can be any naturally occurring amino acid
  Coding DNA Sequence Number=SeqID_1810
  Gene Ontology: Mol. function=protein kinase activity; Biological process=protein amino acid phosphorylation
  Homolog annotation: Hit_ID=A5W748; Match level="QueryCoverage=77%, HitCoverage=6%, E-value=2e-28, Identity=58%"; Hit description=YD repeat protein
ASYTXYGERQDDNGMHCLLAFNGELREEATGCYLLGSGYRAYXPEHGFNSPDSMPPEEVGINPYLYALGNPVKWGDPTGHKAQPLADSGVAEYEASPSMVVSPLAWVGMGVQAIGLGAQVAGKVLEKKDPKLSDILTVTGVVLG

SEQ ID NO: 8227 - protein, 107 aa, Zea mays
  Coding DNA Sequence Number=SeqID_1811
  Gene Ontology: Cellular component=flagellum; Biological process =flagellum biogenesis
  Homolog annotation: Hit_ID=A8GG34; Match level="QueryCoverage=97%, HitCoverage=71%, E-value=2e-20, Identity=49%"; Hit description=FlgN family protein
  Pfam annotation: Domain name=FlgN; Domain location=1-103; Score=9.8; E_value=9.1e-05; Accession=PF05130.3; Description=FlgN protein
ACLQRITEDKSALLTTLNYLDEMRRKTELSLGTKAPYRGHSDIARRWHSIQQHTQRLRDANQHNGMLLQHQMTFTEQALSVLKPHQTQSFYGPDGRGLGQSTLSRKG

SEQ ID NO: 8228 - protein, 107 aa, Zea mays
  Coding DNA Sequence Number=SeqID_1812
  Subcellular localization annotation: CTP_CleavageSite=37; ConfidenceScore=5.09e-01
PTTKKAPGGRGRNRGSPRTQPSRSHAGGDTQRGRKARQTAGGEGQQTQAEQPRQGQEEDTKADQRERSADTHPPQHREPGSARKKQLGRRAGGQPRDTWAESGDGET

SEQ ID NO: 8229 - protein, 65 aa, Zea mays
  misc_feature (43)..(43): Xaa can be any naturally occurring amino acid
  Coding DNA Sequence Number=SeqID_1814
  Gene Ontology: Mol. function=transferase activity, transferring glycosyl groups; Biological process=carbohydrate metabolic process
  Homolog annotation: Hit_ID=Q40077; Match level="QueryCoverage=98%, HitCoverage=8%, E-value=2e-19, Identity=71%"; Hit description=Seed imbibition protein
VEYHDTMRAIGDCPIYVSDKPGNHNFELLRKPILPDSSVPCAXLSDRPTHECLFSNPARDDMSLL

SEQ ID NO: 8230 - protein, 77 aa, Zea mays
  misc_feature (58)..(58): Xaa can be any naturally occurring amino acid
  Coding DNA Sequence Number=SeqID_1815
  Gene Ontology: Mol. function=transporter activity; Cellular component= integral to membrane; Biological process=transport
  Homolog annotation: Hit_ID=A6T920; Match level="QueryCoverage=80%, HitCoverage=14%, E-value=2e-14, Identity=62%"; Hit description =Putative tranport protein
MALVMSVTTVLLVSFGHVSWLVAIDVALWGLAFGSMPTGWSTWLSRAVTDDTESGGGXLLVATIQLAITAGAAAGGW

SEQ ID NO: 8231 - protein, 86 aa, Zea mays
  Coding DNA Sequence Number=SeqID_1816
KGGNHAGCITDGFFYNQRLTPQVLLVLSINIIKDLPAKPYRFWAERYKIGGQLNQLKLAWGSRCKFIQKPCFQPRSENSQAAKGSF

SEQ ID NO: 8232 - protein, 165 aa, Zea mays
  Coding DNA Sequence Number=SeqID_1818
  Gene Ontology: Mol. function=transporter activity; Cellular component= integral to membrane; Biological process=transport
  Homolog annotation: Hit_ID=A0G279; Match level="QueryCoverage=86%, HitCoverage=46%, E-value=4e-52, Identity=72%"; Hit description =Binding-protein-dependent transport systems inner membrane component
MIATLVIVVNLCVDLLYGVLNPHIQNAAPQSVTPPSGRALALREFWSNFSRNRGAVAAGVIVLVLAIVALFAPLIAPHSPIEQYRDYVKIPPAWLDGGNWKFVLGTDEAGRDILSRLMFGARMSFLIGCVSVVLALLPGIVLGLCAAFFGWADTPIMRSMDVLLA

SEQ ID NO: 8233 - protein, 99 aa, Zea mays
  Coding DNA Sequence Number=SeqID_1819
LSKLLQRANSKPGSRGSGATDDEGRASQSQLPLDRFLNCPSSLEVDRRISLGPGPRHDAPGDGIWSLLVKGRMLDSDPQDKRQPHAQDFGEDFDPSDRS

SEQ ID NO: 8234 - protein, 58 aa, Zea mays
  Coding DNA Sequence Number=SeqID_1821
  Gene Ontology: Mol. function=transcription regulator activity; Cellular component=nucleus; Biological process=regulation of transcription
  Homolog annotation: Hit_ID=UPI0000162EED; Match level="QueryCoverage =74%, HitCoverage=9%, E-value=3e-13, Identity=86%"; Hit description =ethylene-responsive protein -related
TGLTHALCSVSSYGRELGDRIAALQQLVSPFGKTDTASVLMEAIGYIKFLQDQVEVIN

SEQ ID NO: 8235 - protein, 81 aa, Zea mays
  misc_feature (31)..(31): Xaa can be any naturally occurring amino acid
  misc_feature (76)..(76): Xaa can be any naturally occurring amino acid
  Coding DNA Sequence Number=SeqID_1822
  Gene Ontology: Mol. function=cytokinin dehydrogenase activity; Cellular component=vacuole; Biological process=cytokinin metabolic process
  Homolog annotation: Hit_ID=A2ZI62; Match level="QueryCoverage=100%, HitCoverage=14%, E-value=1e-22, Identity=69%"; Hit description =Putative uncharacterized protein
RVTGGARGAGHSIHGQAQAPDGIVVKTRSLXPGEMEFHHFRGEGKGRASYANVGGGVLWIELLKRSLKLGLAPRSXTDYLY

SEQ ID NO: 8236 - protein, 74 aa, Zea mays
  Coding DNA Sequence Number=SeqID_1823
VSATLDTRHRENRTTEECGRGGLTFTAVEAAWSQIGGVHWNGSAEEEKPLLQHGDPDPSLEHPEFTAPLYEGRG

SEQ ID NO: 8237 - protein, 73 aa, Zea mays
  misc_feature (28)..(28): Xaa can be any naturally occurring amino acid
  Coding DNA Sequence Number=SeqID_1825
  Homolog annotation: Hit_ID=Q65XL2; Match level="QueryCoverage=97%, HitCoverage=40%, E-value=6e-19, Identity=74%"; Hit description =Putative uncharacterized protein OJ1735_C10.6
QILCASAPGTAKVHYGTSLSNVDWLHGXAESLPTLTNLFIVLGLRGALRKLEEEGTYKSISEASQDSVEKSSI

SEQ ID NO: 8238 - protein, 279 aa, Zea mays
  misc_feature (19)..(19): Xaa can be any naturally occurring amino acid
  Coding DNA Sequence Number=SeqID_1826
  Gene Ontology: Mol. function=oxidoreductase activity; Cellular component=cytoplasm; Biological process=metabolic process
  Homolog annotation: Hit_ID=A1SI01; Match level="QueryCoverage=99%, HitCoverage=70%, E-value=1e-113, Identity=70%"; Hit description =Alcohol dehydrogenase GroES domain protein
  Pfam annotation: Domain name=ADH_N; Domain location=2-74; Score= -10.5; E_value=0.011; Accession=PF08240.2; Description=Alcohol dehydrogenase GroES-like doma
  Pfam annotation: Domain name=ADH_zinc_N; Domain location=104-277; Score=60.7; E_value=4.9e-15; Accession=PF00107.16; Description=Zinc -binding dehydrogenase
  Pfam module annotation: Pfam domain module=ADH_N::ADH_zinc_N; Domain location=2-74::104-277
DLQPGDRVVVPFTSACGSXWMCDRGLFSQCETTQNRDSGTGASLFGYSKLYGQVPGGQAELLRVPFADTLPIKVPHGPVDDRFLFLSDVLPTAWQAVEYADVEDGGTLAVIGAGPIGDMAARIAMHRGLKVIVVDSVRERLARVHGRGAETVDHTEVDGVGDRIRELTDGRGADAVIDAVGMEAHGSPVAETAQKALALLPKKVQEKMMLNAGSDRLAALMSAIDSVRRGGTISISGVYGAPTDPLPMFQLFDKQVQIRMGQANVRRWSDDIPDLLQAC

SEQ ID NO: 8239 - protein, 121 aa, Zea mays
  Coding DNA Sequence Number=SeqID_1827
GGCLGIWGFGHLVACCCAVRLGGATIGGLCGVAGCARPGRRGQVLQQRLRPRVGARGAGPGAGAPPFRERSAASSPTCSCSPCQRSRPSRATPRAPAARSRWRTTLSPCAPPAGSSSSPHG

SEQ ID NO: 8240 - protein, 131 aa, Zea mays
  Coding DNA Sequence Number=SeqID_1829
LWTFGTLDFRNSDRGTDYGGKTHQRRNSSGEVVHHAGQVAMVTSMCGSASRMAGVGWTLCAGGGARRRLGFQPNHGGIAQSSELGSFMAARSTCGGGRPKSSEVTLASPARQGLGSSLGKLDSFSGKQSKG

SEQ ID NO: 8241 - protein, 114 aa, Zea mays
  misc_feature (102)..(102): Xaa can be any naturally occurring amino acid
  Coding DNA Sequence Number=SeqID_1831
MGRNHPGGTILSKRKKARKGRANHWVRKGLAGTTGQDFLAIRFYKAGFLVKYLASGRRVEGWPAGAMKRDRSLGSFLAFNGKAIGQEMVWFKNKIPWPVVKXGNGFKAGGPEGF

SEQ ID NO: 8242 - protein, 265 aa, Zea mays
  Coding DNA Sequence Number=SeqID_1833
  Gene Ontology: Mol. function=nucleoside-triphosphatase activity; Cellular component=plasma membrane; Biological process=peptide transport
  Homolog annotation: Hit_ID=A2WIY3; Match level="QueryCoverage=100%, HitCoverage=75%, E-value=1e-125, Identity=63%"; Hit description=ABC transporter
  Pfam annotation: Domain name=ABC_tran; Domain location=106-264; Score= 108.6; E_value=1.9e-29; Accession=PF00005.17; Description=ABC transporter
  Pfam annotation: Domain name=oligo_HPY; Domain location=30-80; Score =7.2; E_value=0.00017; Accession=PF08352.2; Description =Oligopeptidedipeptide transporter, C-
  Pfam module annotation: Pfam domain module=ABC_tran::oligo_HPY; Domain location=106-264::30-80
MSAVYVSHDLAVVAQMADRIVVLSDGVIRETGDTEQILHAPAHPYTQSLIAAVTPNGVQRDEKPAPAEPAPLLDVRGAVAGYGGRTAKGRPAKLILHEVDLRIARGQTVGVIGESGSGKTTLAKVIAGLVPATAGQILFDGEPLALDIGKRTKEQHRRVQIVFQNADTALNPVHTVERTLARPLAFYHGIKGARARQRVAELLELVRLPQAVAARRTGELSGGQKQRVNLARALAAEPDLILCDEVTSALDTVVGAAIMDLLRDL

SEQ ID NO: 8243 - protein, 130 aa, Zea mays
  Coding DNA Sequence Number=SeqID_1834
PLRAASRPPRPAPPRPARRGINPLEGVLREDLADTRLPACLPRPGRVWFIDHNWAPRRRGWRLDGWLAGWLAGAGFPAGSGQLKALPVLKALSPKKQRRTIRCGEPGGEIAPVRGAAPHAARPRRVMRGH

SEQ ID NO: 8244 - protein, 123 aa, Zea mays
  Coding DNA Sequence Number=SeqID_1836
  Gene Ontology: Mol. function=nucleotide binding; Cellular component =myosin complex; Biological process=signal transduction
  Homolog annotation: Hit_ID=A2WUE3; Match level="QueryCoverage=98%, HitCoverage=6%, E-value=7e-60, Identity=92%"; Hit description =Putative uncharacterized protein
DPNSATVSRDGLAKQIYSQLFDWLVNRLNASIGHDTSSDRLIGVLDIYGFESFKTNSFEQLCINFTNEKLQQHFNQNVFKMEQEEYNREQIDWSYIEFVDNQDVLDLIEKKPGGIIALLDEAW

SEQ ID NO: 8245 - protein, 173 aa, Zea mays
  misc_feature (16)..(16): Xaa can be any naturally occurring amino acid
  misc_feature (83)..(83): Xaa can be any naturally occurring amino acid
  misc_feature (103)..(103): Xaa can be any naturally occurring amino acid
  misc_feature (122)..(122): Xaa can be any naturally occurring amino acid
  Coding DNA Sequence Number=SeqID_1837
  Gene Ontology: Mol. function=nucleotide binding; Biological process =defense response
  Homolog annotation: Hit_ID=Q9XEQ9; Match level="QueryCoverage=95%, HitCoverage=12%, E-value=5e-31, Identity=53%"; Hit description =Disease resistance protein RPM1 homolog
EKNNGCPPWEGRLLAXSATEPSLEISSAAASTIRLLLSLAQHNSGLGNRTATCKAGGHAQPDAVRASDGGLLGPHRTPQARAXNETSKSTDPKSPRLNIENPXGNGLVGEKLGKRTDHEPTXVRRFEGTGRTLFRLVEIPDQLLLVATLCHQLFSSSPLLYHVRVTSVSGHRQ

SEQ ID NO: 8246 - protein, 120 aa, Zea mays
  Coding DNA Sequence Number=SeqID_1838
PCDTQGIRARVHVLDDATPDRADTHSIDQGAVLTNTSEDHASEMDDVRRAVRAAATRSGAAMGLLGALVQAPVGAEEKTNQACGCELTCPVPACPAPCRPAPRRAKAYAPYAADHPGWTD

SEQ ID NO: 8247 - protein, 207 aa, Zea mays
  Coding DNA Sequence Number=SeqID_1840
  Homolog annotation: Hit_ID=B0KIE2; Match level="QueryCoverage=77%, HitCoverage=100%, E-value=9e-70, Identity=83%"; Hit description =Water Stress and Hypersensitive response domain protein precursor
MGSGTASRRSYRGLFNEKQYLSYGRRLSTSTHICHTAHSLTLARSYPMAARLHRYARLFLVLLLACGPGACALFQARDPVNISVIGIEPLPGQELELRMAVKMRVQNPNEAPIDYNGIALNLEVNGQPLAAGVSDQQGHIGRYGEAVVVVPVSITAFSFLRQAYGLGRVDSLQGLPYVLRGKLAGGLLGTVRFTDEGKLDLPKGAYW

SEQ ID NO: 8248 - protein, 268 aa, Zea mays
  misc_feature (10)..(10): Xaa can be any naturally occurring amino acid
  Coding DNA Sequence Number=SeqID_1841
  Gene Ontology: Mol. function=transporter activity; Cellular component= integral to membrane; Biological process=transport
  Homolog annotation: Hit_ID=Q398J2; Match level="QueryCoverage=94%, HitCoverage=24%, E-value=1e-133, Identity=95%"; Hit description =Hydrophobe/amphiphile efflux pump, HAE1 family
ACLQGVDPDXAAVRVQNRVSQALSRLPDEVRQYGVTTQKQSPTPLMYVSLYSPDNSRDSLYLRNYLTLNVKDELSRLTGIGDVGVYGSGDYAMRLWLDPNRLASRGLTASDVIAAVREQNVQVSAGQLGAEPTPKKNDFLVSINVRGRLRTVQEFGDIVLRNGDDGQVVKLSDVARIELGAGDYTLRSYFNDKHSAVVGIFLSPGANALDVAKAVYAKLDELSKRFPPGVAYRPVWDPTVFVRESIRAVQHTLIEAVVLVVLVVILFL

SEQ ID NO: 8249 - protein, 204 aa, Zea mays
  Coding DNA Sequence Number=SeqID_1842
RLTEKLAAAEAEENLRRQLAAERKDANRACAEAQAAQAKAKLARVEANLARQSAEEKETSLCDLLNRLDKVEASTRTEVERTHAQLVDAYRELGARTAAFEVFGQEVGLRFLEWLQEELGVLPTIVTGLMSFASLVTCEGAVNALSREGCGHFEVVDQSDEGFERKIFKVEDPVLKQSAGALFDRMWGPYGRETVREQSDREID

SEQ ID NO: 8250 - protein, 78 aa, Zea mays
  Coding DNA Sequence Number=SeqID_1844
  Gene Ontology: Cellular component=integral to membrane; Biological process=plant-type hypersensitive response
  Homolog annotation: Hit_ID=A0B1P8; Match level="QueryCoverage=100%, HitCoverage=34%, E-value=1e-26, Identity=83%"; Hit description=Yop virulence translocation R precursor
  Pfam annotation: Domain name=FliP; Domain location=13-78; Score= -73.2; E_value=7.7e-07; Accession=PF00813.10; Description=FliP family
MGNLPNPVALIAVIAALGIAPFAALMVTSYTKLVVVLGLLRSALGIQQVPPNLVLNGIALILSLFIMAPVGMSIRDAL

SEQ ID NO: 8251 - protein, 306 aa, Zea mays
  misc_feature (134)..(134): Xaa can be any naturally occurring amino acid
  misc_feature (221)..(221): Xaa can be any naturally occurring amino acid
  misc_feature (279)..(279): Xaa can be any naturally occurring amino acid
  Coding DNA Sequence Number=SeqID_1845
  Gene Ontology: Mol. function=sugar binding; Cellular component =cellular_component; Biological process=defense response
  Homolog annotation: Hit_ID=A0FDH4; Match level="QueryCoverage=100%, HitCoverage=100%, E-value=1e-150, Identity=88%"; Hit description =Beta-glucosidase aggregating factor 1
  Pfam annotation: Domain name=Dirigent; Domain location=3-152; Score =26.5; E_value=2.9e-08; Accession=PF03018.5; Description=Dirigent -like protein
  Pfam annotation: Domain name=Jacalin; Domain location=171-305; Score =46.3; E_value=1.1e-10; Accession=PF01419.7; Description=Jacalin-like lectin domain
  Pfam module annotation: Pfam domain module=Dirigent::Jacalin; Domain location=3-152::171-305
MASLQVTPTSAFTQWNELKFEGLYLFHKYQGSGANQTQGGGDKAPIGIGATVVNNWTVCDGPGPNAKLVARAQGLHIQAGNWVNSFSLVFVDQRFSGSTLEVTGIVVESGEWAIVGGTGQFAMANGVISKKLHXKTSEGDIIQLTIHAFSPVLGPTKRSATKVGPWGGSGGSPMDITAEPQRLKSIPVATGIPVTSIAFSYVDSAGQTQICCFWGGSGGKXNPVIQLGDSKVLPELSGTIGNVYGPPVITSIKFVPSLKTFGPFGAWGDGSDPPFAIPXQQRRAIVGFFARTGVFLHALGVYGRSL

SEQ ID NO: 8252 - protein, 69 aa, Zea mays
  Coding DNA Sequence Number=SeqID_1846
  Gene Ontology: Mol. function=nucleotide binding; Cellular component =myosin complex
  Homolog annotation: Hit_ID=Q6UAL5; Match level="QueryCoverage=98%, HitCoverage=5%, E-value=8e-23, Identity=77%"; Hit description=Myosin heavy chain class VIII A1 protein
FQVTYDTAGFLEKNRDPLHSESIQLLSSCTCELSKHFASVMVADSQNKSSLSWHSVKDTHKQSVVMEFK

SEQ ID NO: 8253 - protein, 240 aa, Zea mays
  Coding DNA Sequence Number=SeqID_1847
  Gene Ontology: Mol. function=binding; Cellular component=outer membrane; Biological process=cellulose biosynthetic process
  Homolog annotation: Hit_ID=A8G821; Match level="QueryCoverage=95%, HitCoverage=19%, E-value=1e-71, Identity=57%"; Hit description =Cellulose synthase operon C domain protein precursor
  Pfam annotation: Domain name=BCSC_C; Domain location=1-239; Score =141.6; E_value=2.2e-39; Accession=PF05420.2; Description=Cellulose synthase operon protein C C-terminus (BCSC_C)
QAETPLADGRSFVRVDHVQVFAGTFSTTDGSHSEQFGSCNDANAGGCRRDFTQRDEGTALGVGWHNDRWSADIGTTPLGFTVTNWVGGVSWKTDIDDLGVTFTASRRPISSSLLAYAGARDPATNGGKNWGGVVATGGGIGLSYDRGGAHGMWADLSAHQISGENVADNSRERLMAGYYYKLINSDNQRATIGLNSMLWHYQKDLSDYTFGQSGYYSPQRYFSLAVPADPASAHRKTGPY

SEQ ID NO: 8254 - protein, 72 aa, Zea mays
  Coding DNA Sequence Number=SeqID_1848
FYPFSIDGLGVSRGPLACCSGSVTLFASSAASFEELDVRSLAVPASGLLLLAVASSRHLGGLVCVTAQSCFR

SEQ ID NO: 8255 - protein, 70 aa, Zea mays
  Coding DNA Sequence Number=SeqID_171
  Gene Ontology: Mol. function=molecular_function; Cellular component =integral to membrane; Biological process=biological_process
  Homolog annotation: Hit_ID=Q6AVD3; Match level="QueryCoverage=100%, HitCoverage=100%, E-value=2e-32, Identity=92%"; Hit description =Putative uncharacterized protein OJ1171_H02.10
  Pfam annotation: Domain name=DUF1242; Domain location=2-71; Score =132.0; E_value=1.7e-36; Accession=PF06842.2; Description=Protein of unknown function (DUF1242)
MSALFNFNSFLTVVLLVICTCSYIKMQFPAILNDRTGFRGFFWKAARIGERLSPWVSVGCLAMGISTIFF

SEQ ID NO: 8256 - protein, 134 aa, Zea mays
  Coding DNA Sequence Number=SeqID_172
  Subcellular localization annotation: CTP_CleavageSite=53; ConfidenceScore=5.32e-01
QHVKQRQGSTCRLFVTMIKKEGTHELPVPSVPSYSSVSNQQTTNSCSPSACLVARTTVSRLPTCFDRTQVRVWLAVPPSASLHARIQLKLIFTVQPARVGMWKTSFARGPGQREAGALEISNQTYGMCFLAPTT

SEQ ID NO: 8257 - protein, 141 aa, Zea mays
  Coding DNA Sequence Number=SeqID_174
  Subcellular localization annotation: CTP_CleavageSite=41; ConfidenceScore=5.62e-01
FPRPNPAIQKHAVNLATKAAGFYKSKLIKRSSSSQVSRAVPAARGGEPPAKPAAAAARGPRAPATSATGCKKSTRWPREQPRCQSATPAARGGRGGESGRRRGWSAEGGASVTPVTRKNQEAEAEAAQSFFSFFPRGAGVE

SEQ ID NO: 8258 - protein, 95 aa, Zea mays
  Coding DNA Sequence Number=SeqID_176
VPTNLSLSLFRSVVEGHPTQSSMVDGKCDGTSQVIRPTYSWPCLTDIRHPVDVPKSLDKFGIFPYLTRNVSPVLQTLQNIGDKDMRKRLHKLHLF

SEQ ID NO: 8259 - protein, 313 aa, Zea mays
  Coding DNA Sequence Number=SeqID_178
  Gene Ontology: Mol. function=transcription regulator activity; Cellular component=nucleus; Biological process=regulation of transcription
  Homolog annotation: Hit_ID=A2Y1S9; Match level="QueryCoverage=79%, HitCoverage=96%, E-value=5e-43, Identity=43%"; Hit description =Putative uncharacterized protein
HHLQIFSGLPLPLPPEVLNDSSATSDLHDGRESSMPESWSQLLLGGLVGDHERYNAATALLSKGLEERPAAYNCYDPGHGGGEEIQTSGTNIRSHQVSQALLASSSPRSCITTSLGSNMLDFSNTTVPPAPDLKNHHSDNSSEGNSAGSGSAPKKARVQTSSSAQSTLKVRKERLGDRITALHQIVSPFGKETIGYIRFLLSQIEALSFPYLGHDNGDSMQQHNTNNLLLNHSTSDAMVQVQGPPMTNQEGEVYGNGIEEGSRKDLRSRGLCLVPVSCTSHLADDNGPSDFWAVSAAPSPPPPPPPFAGIIWR

SEQ ID NO: 8260 - protein, 274 aa, Zea mays
  Coding DNA Sequence Number=SeqID_179
  Gene Ontology: Mol. function=copper uptake transmembrane transporter activity; Cellular component=chloroplast inner membrane; Biological process=protein import into chloroplast stroma
  Homolog annotation: Hit_ID=A2X1S8; Match level="QueryCoverage=68%, HitCoverage=69%, E-value=3e-73, Identity=76%"; Hit description =Putative uncharacterized protein
  Pfam annotation: Domain name=Voltage_CLC; Domain location=1-247; Score=-185.1; E_value=0.097; Accession=PF00654.10; Description =Voltage gated chloride channel
  Subcellular localization annotation: CTP_CleavageSite=56; ConfidenceScore=5.62e-01
MQALLLPARAAPPPPAILRQRAVSASTCASQGCRLLLGASGCLSCGVRYRLRLTVVAAASSSSEPLYPTPLPTEEEVERVKLEQVMRRLEKTARYFKNLGTLGFWSQLVCTIVSAGILAFSTVVTGKVTAPFTFYATAAGIAAAFISSFWSFGYIRLSERLRRTSKEPAKAPPRANVVNSLKNGIVLNILGMGAAVLGMQATVGALVAKALTTSAVPYYQAAAPGQSPVLALDVFLVQASANTILSHFLGLASSLELLRSVSLPPAEAAAHARA

SEQ ID NO: 8261 - protein, 420 aa, Zea mays
  Coding DNA Sequence Number=SeqID_180
  Homolog annotation: Hit_ID=Q5NAA7; Match level="QueryCoverage=89%, HitCoverage=73%, E-value=1e-26, Identity=29%"; Hit description =Putative uncharacterized protein B1008C01.13
  Pfam annotation: Domain name=DUF1618; Domain location=211-357; Score=- 1.2; E_value=2.9e-05; Accession=PF07762.4; Description=Protein of unknown function (DUF1618)
MSATSSFTAGESSRAGEQPERDEVVEFLDCPWVALSSAIVVIGANDERARMLAPGASDIFLDLQPPLVGASYLVLPERIVAHYRYSGYQPCVLSACSNCLLFLAIQAEGVSNPAFFLGNARARTVVRLPDVPAHLGVNIIRRQSIGLIADQRHDGHYMVAQLHPTWTTLHKTLLCYSTVTDQWTARPLASAEEHPRWGAHGVLAHGGLLWWIDVSYGMLVCDPFAADDNLHLRFIPLPVGSMLMAQPELMAHGLRFISRSGLMAHQRFIRPSQGKLRYVEIQGAPSGMLTTNYQPPSNPQVRMFTLVSQEGQHHWVHEYTATFLDIWSYRSYADAGLPRGVVPSLALIDPNNANIIYFFQGTTLFAVDRYARKVLHHLQYLVDVVDSTYADLTLQNSRYVSAWELPPGVFVNGHGPNGGS

SEQ ID NO: 8262 - protein, 261 aa, Zea mays
  Coding DNA Sequence Number=SeqID_181
  Gene Ontology: Mol. function=caffeoyl-CoA O-methyltransferase activity; Cellular component=integral to membrane; Biological process=lignin biosynthetic process
  Homolog annotation: Hit_ID=Q9XGD5; Match level="QueryCoverage=93%, HitCoverage=92%, E-value=1e-139, Identity=99%"; Hit description =Caffeoyl-CoA O-methyltransferase 2
  Pfam annotation: Domain name=Methyltransf_3; Domain location=48-260; Score=486.5; E_value=3.3e-143; Accession=PF01596.8; Description=O -methyltransferase
MATTATKTTAPAQEQQANGNGNGEQKTRHSEVGHKSLLKSDDLYQYILDTSVYPREPESMKELREITAKHPWNLMTTSADEGQFLNMLIKLIGAKKTMEIGVYTGYSLLATALALPEDGTILAMDINRENYELGLPCINKAGVGHKIDFREGPALPVLDDLVADKEQHGSFDFAFVDADKDNYLSYHERLLKLVRPGGLIGYDNTLWNGSVVLPDDAPMRKYIRFYRDFVLALNSALAADDRVEICQLPVGDGVTLCRRVK

SEQ ID NO: 8263 - protein, 191 aa, Zea mays
  misc_feature (120)..(120): Xaa can be any naturally occurring amino acid
  Coding DNA Sequence Number=SeqID_182
  Homolog annotation: Hit_ID=Q8SA86; Match level="QueryCoverage=87%, HitCoverage=18%, E-value=4e-62, Identity=67%"; Hit description =Putative retrotransposon protein
GCLCCSELTFGETRPPCNMIRGSPSQIALAEFRVISDHIGTRDLVQEFLAFRVFPTMKEWEMPKLEGEKKKGELIWLPYHYKFKKHFKVPCQEWLDTIEVMCNEILGNYSKKEGQLMTAXFGTRPKRRLNRVMDAIGFEYPDYERLDKGAEGQKRKRVASALNKDNEDQSKKKKQETEVKAVTLKKRKASH

SEQ ID NO: 8264 - protein, 376 aa, Zea mays
  Coding DNA Sequence Number=SeqID_183
  Homolog annotation: Hit_ID=A3AWK6; Match level="QueryCoverage=98%, HitCoverage=99%, E-value=7e-27, Identity=45%"; Hit description =Putative uncharacterized protein
MGKVELEWRPRQPLMLKEWLELEYSAELSRDGLGCYPRHLATEPRSAGCRRSHVIARVSAALRAALSRPPSARQVEAVALPGSLPARLRVVGFWKKRRGEMEETDRQVASCSATAASSGRRDGACSLATSPRRMGQESRQAGGDRVGLGGGRRSHETVKNEGCNCEATCHLDEEREQEQRLSPVSVMDFQSQQDGDDDCNDDGHSEDEGTSPTFEPSLANIQRSSSQQLLQRLRRFEQLAELDTPDTGNGELDSVQDNPDAERGLVPEAGSPSPCPAHRFKKLLEDFFREGLSPCHSAGASDDPELETSLLETAKAWLDGRRCALIRSDQEAEVEEEIERLGRWRCFGEDDREPMSSDVECGIFCCLVEELVEDLC

SEQ ID NO: 8265 - protein, 136 aa, Zea mays
  Coding DNA Sequence Number=SeqID_184
YYFFGAIKLTGRHYLDFIKLLVVVLLLGYLLFTFNELLLSIFYLLSFGLLNHLLVRVRCGEHSNPRPRRNRGGLPSSASNSTGLGRSPCPETPPIGPASLGLHPRLPRGRALSTPMNYGGGESHSSPCVFSRIVSR

SEQ ID NO: 8266 - protein, 334 aa, Zea mays
  Coding DNA Sequence Number=SeqID_186
  Homolog annotation: Hit_ID=A3AAK9; Match level="QueryCoverage=81%, HitCoverage=79%, E-value=6e-66, Identity=49%"; Hit description =Putative uncharacterized protein
  Pfam annotation: Domain name=MMR_HSR1; Domain location=69-214; Score=- 10.3; E_value=0.0093; Accession=PF01926.13; Description=GTPase of unknown function
MRMPRLPLLLKVAAAAAAGALALIVAARLRREDAVASLRREIREALTALVADDEDSDDAEENSSSPPPPSVLITGFRAHGKSSLVNTACRALAAEDGPLLLRAEASPPGGGSEGPRKLRMVKAVVAGTDGDGAGAGEGDVVELLDAPPLAETGKLTREDIDAAISSGDPECVVFILRCNAPTKERNAAIKRLPEISAAIRNKGLNLIIVLTFKKAMRSIRQAEELLREVSFRARTDCVYFIENYTWSNNGPNLHHPPVIRNDFETHFTVLTIIRQCLEFIKLNRSQSKSKKKTNGKQEKAPEPKLKNNPPTETNKQRQKLNESIVKPFLSSSET

SEQ ID NO: 8267 - protein, 325 aa, Zea mays
MAAVEGTKKKVIIDTDPGIDDAMAIFLALRSPELEVLGLTTTFGNVHTALATRNALHLLEAVGRTDIPVAEGSHLTIKKATKLRIASFVHGSDGLGNQDFPPPATKPVNQSAAAFLVEQANLYPGQVTVVALGPLTNLALAVELDPAFPEKIGQIIILGGAYSVNGNVNPAAEANIFGDPDAADIVFTCGADILAVGLNVTHQVVLTDADREKLEQCDSKYARYLCKLMGVYFDYHRDAYFIKGAYLHDPTTVIAAVNPSLLTYTEGVVRVQTVGITKGLTVFDNTKKRYGEITAWSGMPTVKVAVTVDAPAVVELIVQRLMTDD

SEQ ID NO: 8268 - protein, 273 aa, Zea mays
  misc_feature (253)..(253): Xaa can be any naturally occurring amino acid
  Coding DNA Sequence Number=SeqID_1850
  Gene Ontology: Cellular component=cell outer membrane; Biological process=membrane organization and biogenesis
  Homolog annotation: Hit_ID=Q6D0E3; Match level="QueryCoverage=97%, HitCoverage=33%, E-value=3e-95, Identity=62%"; Hit description=LPS -assembly protein precursor
  Pfam annotation: Domain name=OstA_C; Domain location=39-273; Score =92.2; E_value=1.6e-24; Accession=PF04453.5; Description=Organic solvent tolerance protein
FRYLTQFGAGLLELDYLPSDNQYNKDKAARPSVQNDSNDDRWLFYWRHSGVYDQHWRFNADYTKVSDPYYFNDLDSKYYSSTDGYATQKFSVGYADTNWDATLSSKDFQVFGNTSSQNVYRAMPQLDVNLYQNDIGPFDGRIYAQAVKFTNVSNRMPEATRLHIEPTLNLPLSNGWASLDTEAKLLATHYQQDNVNYYNENIDTTRTNQLKESVNRTLPQFKVDGRLVFDRNMDWAEGYTQTLEPRVQKIINXPYRNQSNIYPYDSTRGAGRL

SEQ ID NO: 8269 - protein, 206 aa, Zea mays
  misc_feature (58)..(58): Xaa can be any naturally occurring amino acid
  Coding DNA Sequence Number=SeqID_1851
  Gene Ontology: Mol. function=ubiquitin-protein ligase activity; Cellular component=intracellular; Biological process=protein modification process
  Homolog annotation: Hit_ID=A3B070; Match level="QueryCoverage=98%, HitCoverage=17%, E-value=2e-64, Identity=61%"; Hit description =Putative uncharacterized protein
VRGSAMFFSGDPSARRRVDLGGRSSKERDRKVLLEQTREERRRRQGLRLQNTSATKIXRGKKALELARSEVRKNFCSTFGEHCERIEWNNFGTNSDFLRQLLFFFNANEDNDIAILCQICNLLLQYVKQGGDVVTLFTGVNGSSLQPLVAHRVKKITLICVQAVYQKRHDWGSQLLTTLHISAFCLIPGHCRLRVNPKLLGLQVVG

SEQ ID NO: 8270 - protein, 137 aa, Zea mays
  Coding DNA Sequence Number=SeqID_1852
  Gene Ontology: Mol. function=nucleotide binding; Cellular component =myosin complex; Biological process=protein amino acid phosphorylation
  Homolog annotation: Hit_ID=Q7Y1D5; Match level="QueryCoverage=100%, HitCoverage=9%, E-value=5e-57, Identity=77%"; Hit description =Putative myosin heavy chain
SDSMQEFHVYIIICSFEYAYQDCKKYKLGDPRSFHYLNQSNCIALDGLDDSKEYTETRRAMGIVGMSTDEQDAIFRVVAAILHLGNIEFAEGSEDDSSVPKDEKSQFHLKTAAELFMCDEKGLEESMCKRVMATRGE

SEQ ID NO: 8271 - protein, 293 aa, Zea mays
  Coding DNA Sequence Number=SeqID_1853
  Gene Ontology: Mol. function=ubiquitin-protein ligase activity; Cellular component=intracellular; Biological process=protein modification process
  Homolog annotation: Hit_ID=A7P8B0; Match level="QueryCoverage=99%, HitCoverage=44%, E-value=1e-142, Identity=89%"; Hit description =Chromosome chr3 scaffold_8, whole genome shotgun sequence
  Pfam annotation: Domain name=Arm; Domain location=121-159; Score=1.7; E_value=6.7; Accession=PF00514.13; Description=Armadillobeta-catenin -like repeat
  Pfam annotation: Domain name=Arm; Domain location=162-200; Score =18.3; E_value=0.028; Accession=PF00514.13; Description=Armadillobeta- catenin-like repeat
  Pfam annotation: Domain name=Arm; Domain location=36-77; Score=8.9; E_ value=0.81; Accession=PF00514.13; Description=Armadillobeta-catenin -like repeat
  Pfam annotation: Domain name=Arm; Domain location=79-120; Score=6.3; E_value=1.8; Accession=PF00514.13; Description=Armadillobeta-catenin- like repeat
  Pfam annotation: Domain name=HEAT; Domain location=167-202; Score =17.8; E_value=0.04; Accession=PF02985.12; Description=HEAT repeat
  Pfam annotation: Domain name=HEAT; Domain location=42-79; Score=19.7; E_value=0.011; Accession=PF02985.12; Description=HEAT repeat
  Pfam module annotation: Pfam domain module=Arm::Arm::Arm::Arm::HEAT::H EAT; Domain location=121-159::162-200::36-77::79-120::167-202::42-79
LSGRLKNILAGLRADGEDGRQVEALTQLCEMLSIGTEESLGAFSVDSFVPVLVGLLNHESNPDIMLLAARALTHLCDVLPSSCSAVVHYGAVPCFCARLLTIEYMDLAEQSLQALKKISLEHPTACLRAGALMAVLSYLDFFSTGVQRVALSTAANMCRKLPSDASDFVMEAVPLLTNLLNYHDSKVLEHASVCLTRIAESFSPFPEKLDELCSHGLVAQAASLVSVSNSAGQASLSTSTYTGVIRLLSICASGSPLAAKTLLLLGISGILKDILSGSGLVAGTTVSPALTRP

SEQ ID NO: 8272 - protein, 68 aa, Zea mays
  Coding DNA Sequence Number=SeqID_1854
LVAQCCSRMASIWRWMCHPVLAMYRGRIFSCGALGRVRQERSIWDRFPRKEAAQRRRPALLRQPGRQS

SEQ ID NO: 8273 - protein, 136 aa, Zea mays
  Coding DNA Sequence Number=SeqID_1856
  Gene Ontology: Mol. function=oxidoreductase activity; Biological process=metabolic process
  Homolog annotation: Hit_ID=A3AV84; Match level="QueryCoverage=79%, HitCoverage=51%, E-value=3e-38, Identity=69%"; Hit description =Putative uncharacterized protein
QRPPLNGPLVGGPLLSLPQFSVSLFTPYNLMTVIWLLQKVKDPQLRSMLLDEAALTEGDIEAMASRFLAQVADGTWRGRGWPEVWTDYAVSKLALNAYSRLLASRLAGRGVSVNCFCPGFTRTHMTRGLGNRTADE

SEQ ID NO: 8274 - protein, 193 aa, Zea mays
  Coding DNA Sequence Number=SeqID_1857
  Gene Ontology: Mol. function=oxidoreductase activity; Cellular component=periplasmic space; Biological process=electron transport
  Homolog annotation: Hit_ID=A8GII7; Match level="QueryCoverage=98%, HitCoverage=25%, E-value=1e-84, Identity=77%"; Hit description =Molybdopterin oxidoreductase
MKTRVPHLAQWGAFTAVTENQRLIACEPFFADADPSPMIHTLPELVYSDKRIRQPMVRRSWLKSRENSDRTLRGREDFVAVDWDTALDLVAEENRRVRDRYGASGIFNGSYGWSSAGRVNHARTLIRRFYFQGGGGVDQQGNYSWGAAQFFLPYVIGTYMPLTGRVTDWPQVVEQTEIFVAFGGLALKNAQVA

SEQ ID NO: 8275 - protein, 153 aa, Zea mays
  Coding DNA Sequence Number=SeqID_1858
  Gene Ontology: Mol. function=methyltransferase activity; Cellular component=cytosol
  Homolog annotation: Hit_ID=Q6D958; Match level="QueryCoverage=96%, HitCoverage=47%, E-value=1e-41, Identity=53%"; Hit description =Putative uncharacterized protein
  Pfam annotation: Domain name=Methyltransf_10; Domain location=9-153; Score=1.5; E_value=6.9e-15; Accession=PF05971.2; Description=Protein of unknown function (DUF890)
MSGESMNKPAATALFHPRNRHQGRYDFAALTAAHPPLADKVRPNGYGELSVDFADPHAVLLLNQALLKLFYNLNWQLPEGYLTPPVPGRADYIHALADLLASDNGGVLPRDLDVMDIGCGANCIYPLIGHAEYGWRFTGTDISADAVNAASQI

SEQ ID NO: 8276 - protein, 57 aa, Zea mays
  misc_feature (26)..(26): Xaa can be any naturally occurring amino acid
  misc_feature (33)..(33): Xaa can be any naturally occurring amino acid
  Coding DNA Sequence Number=SeqID_1859
  Gene Ontology: Cellular component=nucleus; Biological process=cell division
  Homolog annotation: Hit_ID=Q01J96; Match level="QueryCoverage=82%, HitCoverage=10%, E-value=3e-10, Identity=80%"; Hit description =Cyclin-B2-1
YFLLVSFPGSLQLVGVTAMLLACLQXEVSVPVXVEDLVLIFDCAYTKGQILEMWKLL

SEQ ID NO: 8277 - protein, 83 aa, Zea mays
  Coding DNA Sequence Number=SeqID_1860
  Gene Ontology: Mol. function=S-adenosylmethionine-dependent methyltransferase activity; Biological process=cobalamin biosynthetic process
  Homolog annotation: Hit_ID=Q39GJ9; Match level="QueryCoverage=100%, HitCoverage=34%, E-value=3e-37, Identity=93%"; Hit description =Precorrin-2 C20-methyltransferase / cobalt-factor II C20- methyltransferase
SGVLPEHELRARLAQADAAVVMKLARNFDKVRRVLDELGLAKRALYVERATMATQRIVPLDEVDPMASPYFSLLVVPGEKWQG

SEQ ID NO: 8278 - protein, 456 aa, Zea mays
  Coding DNA Sequence Number=SeqID_1861
WHGDPLKASQGIDGDLCGPRGIYVFFRAPGVFGANAEVMDKDRQDAVRKRRAFTRVGDPSREVKRARGGANKSSEGARAVASGAGKPPSADPTKERRPLSPVRTDEAAAGGADFEMDISVDDYRIGGVMMFDAHTGRGLVGSDAGQLVVVPAPVAATSSTAAVGAKGTSPDPWSKFCASGEISSLAATKDVAGSAAAFTDHVASGALTLEFAAERQRLEGRIERLRASRNLLEKLTAAEAEKEDLSRWLAEEREGVDKACAEASHSLKRATDAESGLKSLRGYVDKTKASTRVGVDRAHALLVDVCRQLGVRTDPFDKFGEDVGLRFLGWLQEELETLPSVATGLMSYASLVTEDFNRGIFQVRDEMLKRSAGALYDRMWGPHGHDTFRERMMNDEEVENFGGLGSSLTQIEDAGTGAEEQLVPQASPATETAPASEDPAAAAAPAGEDPHRQRDP

SEQ ID NO: 8279 - protein, 79 aa, Zea mays
  Coding DNA Sequence Number=SeqID_1863
  Subcellular localization annotation: CTP_CleavageSite=59; ConfidenceScore=5.78e-01
AFSNNILNRSPRKNGFGPAGMTLRARGKTLSSSLFLGGKTSGGLNSSSLLLNGILNFSFAALFWSTGKANQNPRAFFIS

SEQ ID NO: 8280 - protein, 94 aa, Zea mays
  Coding DNA Sequence Number=SeqID_1865
  Subcellular localization annotation: CTP_CleavageSite=86; ConfidenceScore=5.65e-01
LLFHSGLSLLLSGFASVGSWLGVSAAAVFRALERSFRASAGVRPVPVASLPPLPRSWSRPSRSRGGAPAACAGRSVRLGAAPLSCLAAPRSRRL

SEQ ID NO: 8281 - protein, 110 aa, Zea mays
  Coding DNA Sequence Number=SeqID_1866
  Gene Ontology: Mol. function=catalytic activity; Biological process =trehalose biosynthetic process
  Homolog annotation: Hit_ID=Q2NTL0; Match level="QueryCoverage=86%, HitCoverage=36%, E-value=2e-23, Identity=55%"; Hit description =Trehalose-6-phosphate phophatase
DTGGDVTPAVNENSTLPSLSGGLYAFFFDVDGTLAALQSQPESVSIPASVRQHLQQISNLSHGALALVSGRPISQLDELVAPLQAPAAGVHGAERRDASGHLHRQSLPDE

SEQ ID NO: 8282 - protein, 148 aa, Zea mays
  Coding DNA Sequence Number=SeqID_1867
  Subcellular localization annotation: CTP_CleavageSite=77; ConfidenceScore=5.51e-01
MVSVIIVPTSAATSIMVITSPPIIVPVTGRAPSAPAAVVPVVPPRPLERRRRGPPGRRVTAAAPVRRRAGAAPASPAAATVVPVPLRPRRAERRRWRRGAAPLPARRRRPAGRRRGKPRRAVLRTVRGWRRRAAHARRVGGGLKHVGH

SEQ ID NO: 8283 - protein, 179 aa, Zea mays
  Coding DNA Sequence Number=SeqID_1869
  Gene Ontology: Mol. function=transporter activity; Cellular component= periplasmic space; Biological process=transport
  Homolog annotation: Hit_ID=Q397J4; Match level="QueryCoverage=100%, HitCoverage=33%, E-value=8e-94, Identity=93%"; Hit description=ABC peptide transporter, periplasmic ligand binding protein
TLDPGEIYELVPEEYVANTYDRLVRVDLRDPSKFNGDVAQSWTVSPDGLTYTFKLRSGLKFHSGNPLTADDVAWSIQRAVLLDKGPAAVLTGIGLTKANVAANVKKLDDQTVSITTDHKYAPTFVLNVLGSWPASVVDKKLLLSHQQGNDFGNAWLKTNEAGSGAYKLVKWSPSDSIVL

SEQ ID NO: 8284 - protein, 90 aa, Zea mays
  Coding DNA Sequence Number=SeqID_1870
  Gene Ontology: Mol. function=transferase activity, transferring phosphorus-containing groups; Cellular component=integral to membrane; Biological process=two-component signal transduction system (phosphorelay)
  Homolog annotation: Hit_ID=Q6D239; Match level="QueryCoverage=98%, HitCoverage=18%, E-value=5e-26, Identity=64%"; Hit description =Sensor protein
  Pfam annotation: Domain name=HATPase_c; Domain location=1-86; Score =37.2; E_value=6.1e-08; Accession=PF02518.16; Description=Histidine kinase-, DNA gyrase B-, and HSP90-like ATPase
VHLHSQQKGNQVWIEVANTGTPIPAEEQAMIFEPFYQGSQQRKGPVKGSGLGLSIAKDCLRRMQGDLQLVTRTDADVCFRIILTTSAGNA

SEQ ID NO: 8285 - protein, 177 aa, Zea mays
  misc_feature (85)..(85): Xaa can be any naturally occurring amino acid
  Coding DNA Sequence Number=SeqID_1871
  Gene Ontology: Cellular component=anchored to membrane
  Homolog annotation: Hit_ID=Q8S0T6; Match level="QueryCoverage=96%, HitCoverage=42%, E-value=9e-69, Identity=76%"; Hit description =Putative uncharacterized protein OJ1414_E05.5
  Pfam annotation: Domain name=DUF642; Domain location=27-177; Score= -68.6; E_value=1.5e-09; Accession=PF04862.3; Description=Protein of unknown function, DUF642
AGRKVLVEPGLLSNGDFETAPAGGFVRSASVAEGASSIPGWTINGTVELISAGQHQGGMILIVPQGDHAVRVRNDASVWQVVDVXKGSEYAITISAARTCGQLEALKVSGLGGVSQTVDLQTVDHKKGWEADAVAFQATEKQAHFPIMNPGMEEGPTCGPYPIHGAVQKLFTPNQPK

SEQ ID NO: 8286 - protein, 109 aa, Zea mays
  Coding DNA Sequence Number=SeqID_1872
  Subcellular localization annotation: CTP_CleavageSite=88; ConfidenceScore=5.27e-01
TRGEAKSLLSLTVFSWHFPHSKTKLVQQKALQLSVGITPIKKQSFFSSLFAQISPPSGGQEIGRQFFNSGSTFRHVPPKKNSFSWKTRANSLTGEQPFHQKDYQIGRLF

SEQ ID NO: 8287 - protein, 86 aa, Zea mays
  Coding DNA Sequence Number=SeqID_1873
  Gene Ontology: Biological process=biosynthetic process
  Homolog annotation: Hit_ID=A2XEU7; Match level="QueryCoverage=74%, HitCoverage=19%, E-value=9e-22, Identity=67%"; Hit description =Putative uncharacterized protein
DPLYRPAELNWYSACGVSADLTLVPSLAIAEDFETAKASSANRIRLWNKGVDSESFHTKYRRHEMRRFGREKNLDFLKSFMGYLSA

SEQ ID NO: 8288 - protein, 82 aa, Zea mays
  Coding DNA Sequence Number=SeqID_1874
  Subcellular localization annotation: CTP_CleavageSite=37; ConfidenceScore=5.02e-01
EFTKAPSTPANVSRCTSSGPQNQRAASDLFLEMPEPACSLGRERCVWLKVQVGSRSGQNLGAPRFRWIEDVARRASDAIDLI

SEQ ID NO: 8289 - protein, 106 aa, Zea mays
  misc_feature (83)..(83): Xaa can be any naturally occurring amino acid
  Coding DNA Sequence Number=SeqID_1876
  Gene Ontology: Mol. function=triacylglycerol lipase activity; Biological process=lipid metabolic process
  Homolog annotation: Hit_ID=A3B032; Match level="QueryCoverage=92%, HitCoverage=19%, E-value=5e-39, Identity=71%"; Hit description =Putative uncharacterized protein
APPVADFAHGGTCVYFDGWYKGREIAKGGDAPNKNYFDPRYLLSMYGNPWGDLFKGAFLWAKEGKDFPEGAVSLLYRAPGPLXPGIASHSPRGYVNPVRLGSVASG

SEQ ID NO: 8290 - protein, 102 aa, Zea mays
  Coding DNA Sequence Number=SeqID_1877
KLQGEPCPFKKGGTNSPRLPGFALFGLKKEGLAKLYKGMVFDPGGSYKWLTNKKRGNFLTEAYNPMGTKKKDPPRHIRPPSLICFPGYSGEANSGAPDGENF

SEQ ID NO: 8291 - protein, 142 aa, Zea mays
  misc_feature (39)..(39): Xaa can be any naturally occurring amino acid
  misc_feature (52)..(52): Xaa can be any naturally occurring amino acid
  misc_feature (82)..(82): Xaa can be any naturally occurring amino acid
  misc_feature (87)..(87): Xaa can be any naturally occurring amino acid
  misc_feature (100)..(100): Xaa can be any naturally occurring amino acid
  Coding DNA Sequence Number=SeqID_1879
  Gene Ontology: Mol. function=ATPase activity, coupled to transmembrane movement of substances; Cellular component=integral to membrane; Biological process=transport
  Homolog annotation: Hit_ID=Q10N72; Match level="QueryCoverage=97%, HitCoverage=9%, E-value=6e-39, Identity=66%"; Hit description=ABC transporter family protein, putative, expressed
WYIEWPYALLCTIGAAILFGSFNPLLLVHNSTYSVLAYXQIEICDMPHEVNXIWCLLIVGMGVIIITQQHFYFGIIGEKMTXTERIXRRMTFSAMLHNEXVGWFDKEENNADTLSMRLGKDATFVRAAFSNRLSIFMQDSAA

SEQ ID NO: 8292 - protein, 67 aa, Zea mays
  misc_feature (3)..(3): Xaa can be any naturally occurring amino acid
  misc_feature (23)..(23): Xaa can be any naturally occurring amino acid
  Coding DNA Sequence Number=SeqID_1880
  Gene Ontology: Mol. function=calcium ion binding
  Homolog annotation: Hit_ID=Q10S92; Match level="QueryCoverage=100%, HitCoverage=6%, E-value=1e-23, Identity=83%"; Hit description=EF hand family protein, expressed
AYXDVQERKVELHDALIKMVPRXSVDGLLQVRADRIQYQLEEMEKALSERCKHFELKFLPFASVELP

SEQ ID NO: 8293 - protein, 169 aa, Zea mays
  Coding DNA Sequence Number=SeqID_1881
  Gene Ontology: Mol. function=protein binding; Biological process=iron- sulfur cluster assembly
  Homolog annotation: Hit_ID=Q6AF32; Match level="QueryCoverage=33%, HitCoverage=12%, E-value=3e-20, Identity=80%"; Hit description=Iron -regulated ABC-type transporter
  Subcellular localization annotation: CTP_CleavageSite=72; ConfidenceScore=5.30e-01
MNDAQARTTHRWSKMRGSDHVGAVRTSWLPGHPTLVTRLVPLPMFSAVSLRIPGLRGTIDVAREQHRVRRARAVRVGGVRWNGVQTPRVDAHRPGATHTLPREGNEETMSDVLIDRPELEGLGQYEFGWSDSDTAGASARRGISEEVVTDISNLKNEPEWMLKNRHRPA

SEQ ID NO: 8294 - protein, 185 aa, Zea mays
  misc_feature (116)..(185): Xaa can be any naturally occurring amino acid
  Coding DNA Sequence Number=SeqID_1882
LVGDVIRIERGGLGCFARTTIRSLARTTNGAVAAHESAVGTHMAHTGLNEPTCHCWGPAATTTGAANVGTADVLATSMALLTGWCPYRSPGGSGGVLDSMVAVAVPVLHRLATTAXXXXXXXXXXXXXXXXXXXXXXXXXXXXXXXXXXXXXXXXXXXXXXXXXXXXXXXXXXXXXXXXXXXXXX

SEQ ID NO: 8295 - protein, 82 aa, Zea mays
  Coding DNA Sequence Number=SeqID_1884
CRGSRDGKEGPKAASYKAGELNSTAEHRLQQAGGWRRDNRANRRETGRRRRPQKTPRAPNRETAGEAQRESNLTQAGEDPTN

SEQ ID NO: 8296 - protein, 83 aa, Zea mays
  Coding DNA Sequence Number=SeqID_1886
PNISFQRTEFTTGDYVQAEPRSRGIPTLRKGRIGEVARTRPHSRQGTKLRTVKLTSKRTTGKGGRLCEVGEPKTAHQGVKPFV

SEQ ID NO: 8297 - protein, 119 aa, Zea mays
  Coding DNA Sequence Number=SeqID_1888
RGESHETLSKLRSYEAGLRREGIRAAGERRLIFIESVPAARAAASSVRTSAAPPDEPRAHLGYIQLRPLQLSGRHLLEEAVSDDEARGGRRMASRRKAGRMAIEPCHIVAIYLEMAGGG

SEQ ID NO: 8298 - protein, 203 aa, Zea mays
  Coding DNA Sequence Number=SeqID_1890
  Gene Ontology: Mol. function=transcription factor activity; Cellular component=intracellular; Biological process=regulation of transcription, DNA-dependent
  Homolog annotation: Hit_ID=A7ME96; Match level="QueryCoverage=100%, HitCoverage=68%, E-value=6e-68, Identity=65%"; Hit description =Putative uncharacterized protein
  Pfam annotation: Domain name=SIS; Domain location=50-179; Score =103.4; E_value=7.1e-28; Accession=PF01380.12; Description=SIS domain
AKGPSWVSLDVEENDSVERYSHKIFDSALAGLSRVRQQLDMQVVAQAVQALSQAHKVAFFGLGASAVVAHDATNKFLRFNLPVIWSEDIVIQRMSCINSGPNDVFVLISHTGRTKNMIELARLARVNASTVLAITSPGSPLAEEATLALTLDVPEDTDIYLPMVSRLAQLTVVDVLATGFTLERGTAFRENLKRVKEALKASR

SEQ ID NO: 8299 - protein, 163 aa, Zea mays
  Coding DNA Sequence Number=SeqID_1891
  Gene Ontology: Mol. function=RNA-directed DNA polymerase activity; Biological process=RNA-dependent DNA replication
  Homolog annotation: Hit_ID=Q53NQ3; Match level="QueryCoverage=84%, HitCoverage=9%, E-value=4e-33, Identity=46%"; Hit description =Retrotransposon protein, putative, Ty3-gypsy sub-class
RNRVAEHFQVGHRKQKRWEGLLGEDWSDKPISFDQGDHPNCVSSLGRYPLVVDPVVGNARLTKVFMDGGSSLNIIYAETLGLLGVDLSTIRAGAAPFHGIIPVLADFLRANAEIFAWSPSDMPGIPRDVAEHSLDIQASARPVKQPLRRFDEEKRRAIGEEVL

SEQ ID NO: 8300 - protein, 76 aa, Zea mays
  misc_feature (17)..(17): Xaa can be any naturally occurring amino acid
  Coding DNA Sequence Number=SeqID_1892
  Gene Ontology: Mol. function=protein serine/threonine kinase activity; Biological process=protein amino acid phosphorylation
  Homolog annotation: Hit_ID=A2YD23; Match level="QueryCoverage=97%, HitCoverage=9%, E-value=9e-17, Identity=66%"; Hit description =Putative uncharacterized protein
LEYLAGSILDGPPSIGXNAFRELKSKEAELLLNNKLGQESKEQLSQVRVCSFVLWYQYIRGISGWNFNLKDLKNAG

SEQ ID NO: 8301 - protein, 325 aa, Zea mays
  Coding DNA Sequence Number=SeqID_1893
  Gene Ontology: Mol. function=zinc ion binding; Cellular component =nucleus; Biological process=regulation of transcription, DNA -dependent
  Homolog annotation: Hit_ID=A3B8Q9; Match level="QueryCoverage=95%, HitCoverage=38%, E-value=1e-140, Identity=77%"; Hit description =Putative uncharacterized protein
MIRFRVDEKGRWTVIRFVPVHNHQLAKPGERHMLRSAKSLAVGKSGVIDPLASTEAHPINGFSDMTGDIVENSGYTIRECYNQVGMQSITVIEAGDSQSLVSYFKHKTNEEGMFYWDVQVDQEGRMTNFFYRDGKSRNDYGCFGDAIIFDTTYRTNKYNLICAPFVGVDHHWQNVVFGCAFLLDESVTSYAWVFKSFLESMGGRSPKSIFTDQDEAIMQAVKQVFPNTQHCFSYWHILKNAQSHLGSLNTSQAFQRMFTKCMQGSDSEEDFKESWAPLGPRDKLPDSDSLWGLGPFHPPPRSAGAQGAFDGRLFPGGKPPGGGGG

SEQ ID NO: 8302 - protein, 74 aa, Zea mays
  Coding DNA Sequence Number=SeqID_1894
LVRPCPLLAERGGVRSMVRNSGHPGGRSLNPWPRAPSKHNKGTPQALSGSSNTGWIRLPCGGHPKLCSYLSLLR

SEQ ID NO: 8303 - protein, 130 aa, Zea mays
  Coding DNA Sequence Number=SeqID_1896
  Gene Ontology: Mol. function=repressor LexA activity; Biological process=negative regulation of transcription, DNA-dependent
  Homolog annotation: Hit_ID=A0JUZ2; Match level="QueryCoverage=83%, HitCoverage=43%, E-value=2e-47, Identity=88%"; Hit description=LexA repressor
  Pfam annotation: Domain name=LexA_DNA_bind; Domain location=21-85; Score=97.5; E_value=4.2e-26; Accession=PF01726.7; Description=LexA DNA binding domain
MAAQATGGRATRRGAQPARAPKSLTVRQKKILETIQRSVTDNGYPPSMREIGDTVGLASLSSVTHQLSQLEKLGYLRRDPKRPRAMEVLMPLTLDEGSTPISGVEQPRGLKAVGGLAVSELASATDTAMV

SEQ ID NO: 8304 - protein, 86 aa, Zea mays
  Coding DNA Sequence Number=SeqID_1897
  Homolog annotation: Hit_ID=P0A9V7; Match level="QueryCoverage=100%, HitCoverage=87%, E-value=2e-15, Identity=51%"; Hit description =Uncharacterized HTH-type transcriptional regulator yiaG
MEIKDPMVELLSSLEQIVLTRDAQTPVSEIALNTVSVPEPQRLREMTGMQVDEFARVMGVSVSSVKSWEAQRTRPSATARKLMKLL

SEQ ID NO: 8305 - protein, 177 aa, Zea mays
  Coding DNA Sequence Number=SeqID_1898
  Homolog annotation: Hit_ID=Q10N48; Match level="QueryCoverage=75%, HitCoverage=54%, E-value=3e-37, Identity=60%"; Hit description =Expressed protein
MRHCILQAIVQQIYHNEVEVTGLLIDALPLTELPEKKCKRCGLYEEGTFKPDAVFDEWEMCSSDFKGGKYTRFKEGQFNATFLCPNCTASTVIDVKDASFVPGHGNPRPSEDLETKKTSIAVIIIASVLASVLVVTALFGGFKYWQKKKRERDQVRFLKLFEEGDDLEDELGLSNEF

SEQ ID NO: 8306 - protein, 177 aa, Zea mays
  Coding DNA Sequence Number=SeqID_1899
  Gene Ontology: Mol. function=transcription factor activity; Biological process=regulation of transcription, DNA-dependent
  Homolog annotation: Hit_ID=A6THS0; Match level="QueryCoverage=88%, HitCoverage=51%, E-value=3e-33, Identity=50%"; Hit description =Putative bacterial regulatory protein, LysR
  Pfam annotation: Domain name=HTH_1; Domain location=8-67; Score=68.1; E_value=2.9e-17; Accession=PF00126.17; Description=Bacterial regulatory helix-turn-helix protein, lysR family
MNMHSLDLNLLQTLDVLLVEQNVTRAAQRLNLSQPSVSAQLARLRVLFDDPLLLPGPRGMLPTARAEALREPLRLALDALERAVAPPAAFDPARAELTWRIAATDYMSSALILPALKLIREAAPRSRMAVFALNPPQVAQQLEKGELDVVFHTGDNAPPTLHQRRLFSELYVLAGRH

SEQ ID NO: 8307 - protein, 79 aa, Zea mays
  Coding DNA Sequence Number=SeqID_1900
  Gene Ontology: Mol. function=argininosuccinate lyase activity; Cellular component=cytoplasm; Biological process=arginine biosynthetic process via ornithine
  Homolog annotation: Hit_ID=Q3KCB2; Match level="QueryCoverage=100%, HitCoverage=16%, E-value=3e-19, Identity=56%"; Hit description =Argininosuccinate lyase 1
MSENAELLWGARFKAAPAASLTALSRSPDYYFALAPYDLAGCRAHARELARAGLLSADELDTMLAAIDALDADYRAGQL

SEQ ID NO: 8308 - protein, 365 aa, Zea mays
  misc_feature (157)..(157): Xaa can be any naturally occurring amino acid
  misc_feature (168)..(168): Xaa can be any naturally occurring amino acid
  misc_feature (341)..(341): Xaa can be any naturally occurring amino acid
  Coding DNA Sequence Number=SeqID_1901
  Gene Ontology: Mol. function=RNA-directed DNA polymerase activity; Biological process=RNA-dependent DNA replication
  Homolog annotation: Hit_ID=O48967; Match level="QueryCoverage=99%, HitCoverage=78%, E-value=1e-134, Identity=69%"; Hit description =Putative uncharacterized protein
  Pfam annotation: Domain name=Retrotrans_gag; Domain location=175-267; Score=98.7; E_value=1.8e-26; Accession=PF03732.7; Description =Retrotransposon gag protein
  Subcellular localization annotation: CTP_CleavageSite=55; ConfidenceScore=5.35e-01
RNPPSSTASPGAMLFFFEDVNRLLGMAHPGLARSRPQSFRRQREASASTRGISVCAITLSEGAQNDDLWAELNRRRAGEDARISLERARERQQNFEGRNLNQDFTARDAQIQTGVPLVGVGCTALADHLRVATWPPKFQPHLPENYDGTSNPSEFLXVYVTAITAAGXNTAVMATYFHVALSGPAWTWLMNLAPGSIYTWEELCARFVANFASAYQQHGVEAHLHAVRQEPRETLRTFISRFTKVRGTIPRISDASIITAFRQGVRDKKMLEKLATHDVETVPTLFALADKCARAVEGRAWHSAPQTGVTQTGGSGATTQGGGKKKKKNRGHDRPQSECFXVPQLRTGGRDERGKCPRQQGNGVP

SEQ ID NO: 8309 - protein, 170 aa, Zea mays
  Coding DNA Sequence Number=SeqID_1902
  Gene Ontology: Mol. function=transmembrane receptor activity; Cellular component=integral to membrane; Biological process=signal transduction
  Homolog annotation: Hit_ID=UPI00005F7102; Match level="QueryCoverage =94%, HitCoverage=29%, E-value=2e-39, Identity=53%"; Hit description =COG0840: Methyl-accepting chemotaxis protein
  Pfam annotation: Domain name=HAMP; Domain location=64-133; Score =41.7; E_value=2.7e-09; Accession=PF00672.15; Description=HAMP domain
MAIAQNNLNSLENPLSVIEGLRHEIDNRNLMRERLAQYSEINDRYNHQLIASAESDYRQMVGMAIVMLLISALLLLLARIWVKRVLVTRMADTTVSIQRIAQGDLTQRIEAGNENELGLMLKELEAMRVSLITTVSGIREGVGRIYANAQEIANGNNNLSSRTEEQASAL

SEQ ID NO: 8310 - protein, 143 aa, Zea mays
  Coding DNA Sequence Number=SeqID_1903
  Gene Ontology: Mol. function=hydrolase activity, acting on glycosyl bonds; Biological process=nucleoside metabolic process
  Homolog annotation: Hit_ID=A8GGI7; Match level="QueryCoverage=100%, HitCoverage=29%, E-value=5e-76, Identity=99%"; Hit description=AMP nucleosidase
  Pfam annotation: Domain name=PNP_UDP_1; Domain location=1-143; Score =50.8; E_value=4.8e-12; Accession=PF01048.10; Description =Phosphorylase family
ESQSIGDYVLAHAYLRDDHVLDSVLPPDIPIPSIAEVQRALYDATKAVSGMPGEEVKQRLRTGTVVTTDDRNWELRYSASALRFNLSRAVAVDMESATIAAQGYRFRVPYGTLLCVSDKPLHGEIKLPGQANRFYEGAISEHL

SEQ ID NO: 8311 - protein, 87 aa, Zea mays
  Coding DNA Sequence Number=SeqID_1904
  Gene Ontology: Cellular component=integral to membrane
  Homolog annotation: Hit_ID=A2WWJ1; Match level="QueryCoverage=86%, HitCoverage=16%, E-value=7e-17, Identity=64%"; Hit description =Putative uncharacterized protein
  Subcellular localization annotation: CTP_CleavageSite=55; ConfidenceScore=5.10e-01
RLSYALHLVLVFPLLLFSLRVNVDELLFPGRRPLAACTRRFVSLTPVLMPVLFVLAIAIPSICTLFEYSGSTFAVTISLIFPGAVVL

SEQ ID NO: 8312 - protein, 286 aa, Zea mays
  Coding DNA Sequence Number=SeqID_1905
  Gene Ontology: Mol. function=transferase activity, transferring phosphorus-containing groups; Cellular component=outer membrane -bounded periplasmic space; Biological process=two-component signal transduction system (phosphorelay)
  Homolog annotation: Hit_ID=Q4ZUL6; Match level="QueryCoverage=91%, HitCoverage=22%, E-value=9e-49, Identity=42%"; Hit description=PAS precursor
  Pfam annotation: Domain name=HATPase_c; Domain location=38-150; Score= 127.8; E_value=3.2e-35; Accession=PF02518.16; Description=Histidine kinase-, DNA gyrase B-, and HSP90-like ATPase
  Pfam annotation: Domain name=Response_reg; Domain location=173-284; Score=108.2; E_value=2.5e-29; Accession=PF00072.14; Description =Response regulator receiver domain
  Pfam module annotation: Pfam domain module=HATPase_c::Response_reg; Domain location=38-150::173-284
MSLSEVVRDCEALFRQVALNKGLALNIVLELEQDQVLFDPVALKQILSNLVSNAIKFTSYGEVEVALYQAESTRPEYVLEVSDSGVGLTAEQQQAIFEPFIQVDQGSNRASGTGLGLNICRRLAVMLGTELHVESEPGDGSVFMLRFRAEAASIEHEQPALPQPVEPAKQAALRILIVDDNATNRLLLAQQLRYAGHHVLVADGGAAALALWRENQPDRVITDCNMPEMDGFEFTRQLRAEEKRLVRRAVPVYGLTAMAEERVAQLAQDAGMNGCLFKPLERAQLL

SEQ ID NO: 8313 - protein, 83 aa, Zea mays
  misc_feature (12)..(12): Xaa can be any naturally occurring amino acid
  misc_feature (37)..(37): Xaa can be any naturally occurring amino acid
  Coding DNA Sequence Number=SeqID_1906
  Homolog annotation: Hit_ID=A7PEY1; Match level="QueryCoverage=97%, HitCoverage=23%, E-value=5e-28, Identity=76%"; Hit description =Chromosome chr11 scaffold_13, whole genome shotgun sequence
QPPRELDKSPGXRTAAWLHSDQTILSSCTDMGGVRLXDVRIGKIVKTLETKASVTSAEVSQDGRFITTVDGSSVKFISVNRYL

SEQ ID NO: 8314 - protein, 264 aa, Zea mays
  Coding DNA Sequence Number=SeqID_1907
  Gene Ontology: Mol. function=binding
  Homolog annotation: Hit_ID=A2WQV1; Match level="QueryCoverage=89%, HitCoverage=31%, E-value=3e-55, Identity=51%"; Hit description =Putative uncharacterized protein
MASSLLNVQTTTASTTTSNVSIELTWLGVKILKKIMDNPDNCKEVAKDADDQVISSIVDLTTVSDGDSSSSISWSPVAEEIIVEAVQVLHRLVRTTGDAGKALRRKISENLHVVRNMRKILEHPGSHTELLTDAIGVLACLALDETGKEGIGSSPRVIRKLVPYLVVETPSAPSNRVELAKSAVEALLVLAVDSQRIALRILEELKVEGMQQLVDMLSSDSTELRTMAARLLAVLRVINSVAEHAHYNRTVDSALPLGKSWDTC

SEQ ID NO: 8315 - protein, 138 aa, Zea mays
  misc_feature (131)..(131): Xaa can be any naturally occurring amino acid
  Coding DNA Sequence Number=SeqID_1908
  Gene Ontology: Mol. function=hydrolase activity, acting on glycosyl bonds; Biological process=nucleoside metabolic process
  Homolog annotation: Hit_ID=Q6D6Y2; Match level="QueryCoverage=98%, HitCoverage=27%, E-value=1e-59, Identity=78%"; Hit description=AMP nucleosidase
YDVLIEVGPSQQEIPYPYVIDGSDLSLDRSMSASIARHFPTTELSQIGDETADGLFNADALFPLSHFDALRTDFSLARLRHYTGTAVEHFQPFVLFTNYTRYVDEFVRWAIEQVQDPSTPYDSLACAGDVXITADTQD

SEQ ID NO: 8316 - protein, 80 aa, Zea mays
  Coding DNA Sequence Number=SeqID_1909
  Subcellular localization annotation: CTP_CleavageSite=2; ConfidenceScore=5.29e-01
VAGAVRFPLWRLCLVLPCGLACVPSLRLFSLLGRLAGFPRSSLAALLSPSGVVPSLWPLFPRPCPPPRLPVFNSHARARR

SEQ ID NO: 8317 - protein, 277 aa, Zea mays
  Coding DNA Sequence Number=SeqID_1911
  Gene Ontology: Mol. function=flavin-containing monooxygenase activity; Cellular component=intrinsic to endoplasmic reticulum membrane; Biological process=electron transport
  Homolog annotation: Hit_ID=A2XD86; Match level="QueryCoverage=100%, HitCoverage=46%, E-value=2e-71, Identity=53%"; Hit description =Putative uncharacterized protein
  Pfam annotation: Domain name=DAO; Domain location=22-275; Score= -50.3; E_value=0.021; Accession=PF01266.14; Description=FAD dependent oxidoreductase
MAAASRQDARRSTRQAVPASSRVAIIGGGISGLAAAKQLAAHDPVVFEATASVGGVWKHCVYRSTRLQTPRRDYEFSDYSWRNRDDPTFPTHAEIVEYLEGYADAFGLWRYIVLGARVVDVKFLGGGGLTELWSGGASLCGRSASPPPAPTPFRYECDSLICCSFFTSSRRFGGKPLWDLALLILRARTTTDSVTFTYYQFEFVVMCAGKYGDVPRMPAFPPGRGPEVFRGQVMHSLDYCKLGEEDTVELMRGKKVVVVGYKKSAIDLALECAQANQ

SEQ ID NO: 8318 - protein, 233 aa, Zea mays
  misc_feature (26)..(26): Xaa can be any naturally occurring amino acid
  misc_feature (208)..(208): Xaa can be any naturally occurring amino acid
  Coding DNA Sequence Number=SeqID_1912
  Gene Ontology: Mol. function=translation initiation factor activity; Cellular component=cytoplasm; Biological process=regulation of translation
  Homolog annotation: Hit_ID=O81482; Match level="QueryCoverage=88%, HitCoverage=93%, E-value=3e-62, Identity=62%"; Hit description =Eukaryotic translation initiation factor 4E-2 (eIF4E-2) (eIF-4E-2) (mRNA cap-binding ...
  Homolog annotation: Hit description=protein) (eIF-(iso)4F 25 kDa subunit) (eIF-(iso)4F p28 subunit)
  Pfam annotation: Domain name=IF4E; Domain location=8-217; Score =134.6; E_value=2.9e-37; Accession=PF01652.9; Description=Eukaryotic initiation factor 4E
MAERDMAQDKAPAAARATFTPDEATXPRSKTTTDANATNNLHRQRTFWYHIYTKPNPDAAWRTSLKTRVHLSTPHEELCGLYDLAVRPIKHTVTADLLLFDAEPKPECEDPDQSQMVAQWTVTCNRNPCCETMWLETLMALVGEQFDETDDICGIVASVRPRGDKLALWTRTASNEAVQVHIGKKWKDVIDYNDKIIYTFHVVSRRDXPSTGGRFPRVSCRRRWSLLFGLDRG

SEQ ID NO: 8319 - protein, 85 aa, Zea mays
  Coding DNA Sequence Number=SeqID_1913
  Gene Ontology: Mol. function=oxidoreductase activity
  Homolog annotation: Hit_ID=A7PXU9; Match level="QueryCoverage=83%, HitCoverage=20%, E-value=5e-18, Identity=57%"; Hit description =Chromosome chr15 scaffold_37, whole genome shotgun sequence
PFHPPSIRQVVGTYATEARALALRLLEAISESLGLERSHMVAAMGRHAQHMAVNYYPPCPQPEITFGLPGHEVSRGNGAAGCSAR

SEQ ID NO: 8320 - protein, 194 aa, Zea mays
  misc_feature (9)..(9): Xaa can be any naturally occurring amino acid
  Coding DNA Sequence Number=SeqID_1914
  Gene Ontology: Cellular component=outer membrane; Biological process =lipid metabolic process
  Homolog annotation: Hit_ID=B0KRY7; Match level="QueryCoverage=100%, HitCoverage=26%, E-value=1e-107, Identity=95%"; Hit description =Patatin precursor
QDLPKVSFXQGFYELKYSFDTLDNVYFPHRGEDIGLTLRKYDQSLDSDQDYRQWMFNLDKAISSGPNTFVLGGRYGRTLDDTEVVTSSFVLGGARELSGFRQDSVSGQNVSLMRMVYYRRLTPRAYVPLDFPLYIGGSLERGRAWNNDNEFDSGYINAASIFLGLETPLGPLNFTYGANSAHEQAVYLNLGHTF

SEQ ID NO: 8321 - protein, 86 aa, Zea mays
  misc_feature (12)..(12): Xaa can be any naturally occurring amino acid
  misc_feature (37)..(37): Xaa can be any naturally occurring amino acid
  Coding DNA Sequence Number=SeqID_1915
  Gene Ontology: Mol. function=binding
  Homolog annotation: Hit_ID=Q934G4; Match level="QueryCoverage=95%, HitCoverage=29%, E-value=9e-23, Identity=63%"; Hit description=YbgF protein precursor
QAWVEKHADSTXKPNANYWLGQLFDNRGIKDDAAYYXPLELRNYPKSPKAAKARVKLGVIMQARTDTTKATAVYQQVVRQVPTLIC

SEQ ID NO: 8322 - protein, 191 aa, Zea mays
  Coding DNA Sequence Number=SeqID_1916
  Homolog annotation: Hit_ID=Q6H4V6; Match level="QueryCoverage=53%, HitCoverage=81%, E-value=3e-19, Identity=50%"; Hit description=Auxin responsive protein-like
  Pfam annotation: Domain name=Auxin_inducible; Domain location=69-177; Score=89.0; E_value=1.5e-23; Accession=PF02519.5; Description=Auxin responsive protein
MAARLGKMGSSTSEKGARGGREGGPNATSCCPELPASAVRNILLSPELLLLHVRSELAIGRQSSAMKRLLRRLSRTVSVSVAGEDGGPAARPSSKHKHRRRRKGKKAGAVPEGHVPVCVGEEGGPAERFAVRAELLGEPPLAALLRRAAQEYGYAHPGALRIPCPVDDFRRLLLRLSHGPSSPAPDAMPRA

SEQ ID NO: 8323 - protein, 181 aa, Zea mays
  Coding DNA Sequence Number=SeqID_1917
  Homolog annotation: Hit_ID=A2ZHN6; Match level="QueryCoverage=41%, HitCoverage=13%, E-value=4e-11, Identity=51%"; Hit description =Putative uncharacterized protein
MIGDDGAGPLTTTRHERQRRRSSRRAKFAIYNVVATSSSIGAVLFVLFLLFRGSLAYIFTDSDSDSDDEQSRDDSGTRYREGSHSASSSGLGEDTAIHRFVGSTVQNACHHGLVDPTVNLKEAMDDINEINDMYRRPGMGPKKHGPSANGPARHSPLDHFSCRASSLGTLKKTGRASTSPL

SEQ ID NO: 8324 - protein, 62 aa, Zea mays
  Coding DNA Sequence Number=SeqID_1918
  Subcellular localization annotation: CTP_CleavageSite=36; ConfidenceScore=5.12e-01
AVGTTQRPFFFFFFFFFLGFFFFFFFFFSFFLLEILEMNRGQNIKDQIPIFKRGSTNKGKQQ

SEQ ID NO: 8325 - protein, 186 aa, Zea mays
  Coding DNA Sequence Number=SeqID_1920
  Gene Ontology: Mol. function=protoheme IX farnesyltransferase activity; Cellular component=integral to membrane; Biological process=heme biosynthetic process
  Homolog annotation: Hit_ID=A4AJN9; Match level="QueryCoverage=32%, HitCoverage=19%, E-value=2e-17, Identity=72%"; Hit description =Protoheme IX farnesyltransferase
MGPLYTVVALAGGIWFVVESHRLYSRAIQHVEHVQPMRVFHSSITYLTLLFIAVGIDPLLPQRRVRRRCAAAATVRPRGGGRRAPLRAWRRGAGPPCAPGPVGGSVGRGAPPGGCGCASGRGVACAGSCMRGVATSSRSCDIGLVDPCVRGELRARGCERLEVVRHRTRDSLQARATACAGLRHRP

SEQ ID NO: 8326 - protein, 75 aa, Zea mays
  misc_feature (47)..(47): Xaa can be any naturally occurring amino acid
  Coding DNA Sequence Number=SeqID_1921
  Gene Ontology: Mol. function=DNA binding; Cellular component=nucleus; Biological process=response to salicylic acid stimulus
  Homolog annotation: Hit_ID=A2Y0Q0; Match level="QueryCoverage=66%, HitCoverage=20%, E-value=2e-15, Identity=76%"; Hit description =Putative uncharacterized protein
  Pfam annotation: Domain name=Myb_DNA-binding; Domain location=5-50; Score=33.9; E_value=5.7e-07; Accession=PF00249.21; Description=Myb -like DNA-binding domain
SCRRREKWTADEHGRFLHALLLFGRDWKRVHAFVATKTGTQIRSHAXKHFLKKLDSRSSECAGHRLHGYCTADWA

SEQ ID NO: 8327 - protein, 94 aa, Zea mays
  Coding DNA Sequence Number=SeqID_1922
  Gene Ontology: Mol. function=protein serine/threonine kinase activity; Cellular component=integral to membrane; Biological process=protein amino acid phosphorylation
  Homolog annotation: Hit_ID=A2YVN3; Match level="QueryCoverage=76%, HitCoverage=10%, E-value=2e-16, Identity=62%"; Hit description =Putative uncharacterized protein
LQAATDGFNAKNILGKGRFRNLYRGPLAHRTTVALKPLKDPNPLGQAQFPTEVEIINLALHPQLVGLVRFFARLGQPLLVLPLLPKRNLPFRLA

SEQ ID NO: 8328 - protein, 76 aa, Zea mays
  Coding DNA Sequence Number=SeqID_1923
  Gene Ontology: Mol. function=DNA-directed DNA polymerase activity; Biological process=DNA replication
  Homolog annotation: Hit_ID=A7MKH8; Match level="QueryCoverage=100%, HitCoverage=100%, E-value=8e-29, Identity=82%"; Hit description =Putative uncharacterized protein
  Pfam annotation: Domain name=DNA_pol3_theta; Domain location=1-75; Score=170.7; E_value=3.9e-48; Accession=PF06440.2; Description=DNA polymerase III, theta subunit
MSQNLALLSQEEKDKVNVDLAAAGVAFKERYNMPVIAEMVEREQPEALRDWFRQRLMAYRQASLSLSRLPYEPKQK

SEQ ID NO: 8329 - protein, 81 aa, Zea mays
  Coding DNA Sequence Number=SeqID_1924
  Gene Ontology: Mol. function=nucleoside-triphosphatase activity; Cellular component=integral to membrane; Biological process=defense response
  Homolog annotation: Hit_ID=Q8GU82; Match level="QueryCoverage=100%, HitCoverage=6%, E-value=3e-27, Identity=77%"; Hit description=PDR -like ABC transporter
QFSAYLRLPSDVSPHKRDMFVEEVMGLVELRDLRCAIVGAPGVTGLSSEQRKRLTIAVELVASPSIIFMDEPTTGLDARAA

SEQ ID NO: 8330 - protein, 153 aa, Zea mays
  misc_feature (141)..(141): Xaa can be any naturally occurring amino acid
  Coding DNA Sequence Number=SeqID_1925
  Gene Ontology: Mol. function=zinc ion binding
  Homolog annotation: Hit_ID=Q69L44; Match level="QueryCoverage=99%, HitCoverage=27%, E-value=4e-45, Identity=50%"; Hit description=SWIM zinc finger family protein-like
  Subcellular localization annotation: CTP_CleavageSite=55; ConfidenceScore=5.01e-01
SQTQWQLLQMMRLGHHSFLFFHSSFGVSTLKYPLHTLLAFDSRQHALPVAWVITRSVTKKDTLKTWLKNVIKKCSNVEVQREIFILLGKTICNIWSEKNPMDALGLLFQGFVGPTAFIQYFASFWVPILVMWLGSIQRLPXASLESCGAIVGF

SEQ ID NO: 8331 - protein, 67 aa, Zea mays
  Coding DNA Sequence Number=SeqID_1926
  Gene Ontology: Mol. function=oxidoreductase activity; Biological process=electron transport
  Homolog annotation: Hit_ID=O04709; Match level="QueryCoverage=92%, HitCoverage=5%, E-value=4e-14, Identity=64%"; Hit description=Lysine- ketoglutarate reductase/saccharopine dehydrogenase bifunctional enzyme
AEFLASYPDICTYGVDDGNADQIHVIVASLYQRDAEEVILAMMHSPCLRLPVTSLGGPSLNDGRTGV

SEQ ID NO: 8332 - protein, 97 aa, Zea mays
  Coding DNA Sequence Number=SeqID_1927
  Gene Ontology: Mol. function=serine O-acetyltransferase activity; Cellular component=cytoplasm; Biological process=cysteine biosynthetic process from serine
  Homolog annotation: Hit_ID=P0A9D6; Match level="QueryCoverage=97%, HitCoverage=35%, E-value=9e-44, Identity=91%"; Hit description =Serine acetyltransferase
  Pfam annotation: Domain name=Hexapep; Domain location=19-36; Score =9.3; E_value=11; Accession=PF00132.14; Description=Bacterial transferase hexapeptide (three rep
  Pfam annotation: Domain name=Hexapep; Domain location=37-54; Score =11.9; E_value=2.4; Accession=PF00132.14; Description=Bacterial transferase hexapeptide (three rep
  Pfam module annotation: Pfam domain module=Hexapep::Hexapep; Domain location=19-36::37-54
ACLQSVTLGGTGKTSGDRHPKIREGVMIGAGAKILGNIEVGRGAKIGAGSVVLQPVPPHTTAAGVPARIVGKPASDKPSMDMDQHFTGAGFEYGDGI

SEQ ID NO: 8333 - protein, 180 aa, Zea mays
  Coding DNA Sequence Number=SeqID_1928
  Gene Ontology: Mol. function=aminoacyl-tRNA ligase activity; Cellular component=cytoplasm; Biological process=tRNA aminoacylation for protein translation
  Homolog annotation: Hit_ID=A9WTY1; Match level="QueryCoverage=100%, HitCoverage=37%, E-value=2e-80, Identity=77%"; Hit description =Glycyl-tRNA synthetase
  Pfam annotation: Domain name=HGTP_anticodon; Domain location=96-180; Score=80.7; E_value=4.8e-21; Accession=PF03129.10; Description =Anticodon binding domain
RFGFAGSEWGELMGVANRTDFDLNNHIESSGQDLRYFDQAANEKYVPYVIEPSFGLTRALMAFLLDSYHEDEAPNAKGGVDKRTVLRLDPRLAPVKAAVLPLSRNEQLSPVARGLADDLRKHWNVDFDDAGAIGRRYRRHDEIGTPFCITVDFDTLEDKAVTVRERDTMSQERVALDQLQ

SEQ ID NO: 8334 - protein, 149 aa, Zea mays
  Coding DNA Sequence Number=SeqID_1929
  Gene Ontology: Mol. function=FMN binding; Cellular component=1-2nm peptidoglycan-based cell wall; Biological process=electron transport
  Homolog annotation: Hit_ID=Q8ZED3; Match level="QueryCoverage=98%, HitCoverage=69%, E-value=2e-58, Identity=74%"; Hit description =Electron transport complex protein rnfG
  Pfam annotation: Domain name=FMN_bind; Domain location=40-132; Score =93.1; E_value=8.6e-25; Accession=PF04205.5; Description=FMN-binding domain
ECLLVTDARALGNDKPHHLYVARKGDQPVAAALETTAPDGYSGAIQMLVGADFHGKVLGVRVIEHHETPGLGDKIELRISDWINSFNGKVVHGADDKAFAVKKDGGEFDQFTGATITPRAVVNATKRTALLIETLPAKLASLPECGDAP

SEQ ID NO: 8335 - protein, 150 aa, Zea mays
  Coding DNA Sequence Number=SeqID_1930
  Gene Ontology: Mol. function=nucleotide binding; Biological process =response to stress
  Homolog annotation: Hit_ID=A8AEE8; Match level="QueryCoverage=89%, HitCoverage=29%, E-value=4e-43, Identity=67%"; Hit description =Putative uncharacterized protein
QQHTRVLVVYIGGGTPVCSTLLMGPQWRNQSDRRASLVGLSGFRVGGTDLDIMLAFNTLMPLVGLGGYTLKGTALPALPWWNAVSIHDVPALSPFYSAAIGKLLRALVRDADQGDEVARLLKVWPLQLSTRLVRVSVAGIDNSKGRETAA

SEQ ID NO: 8336 - protein, 156 aa, Zea mays
  Coding DNA Sequence Number=SeqID_1931
  Gene Ontology: Mol. function=nucleic acid binding; Cellular component= protein complex; Biological process=microtubule-based process
  Homolog annotation: Hit_ID=P93802; Match level="QueryCoverage=96%, HitCoverage=17%, E-value=4e-50, Identity=65%"; Hit description=MURAZC
FGISPGCNSPDSTASPSSTAAPVHGGEIFGSEVQRIDGTTQLDWDSIIVSDELDEEGREQVPCENEVYCNLGLNSDDEAAKNRKYARFYSSGTTSHSQERVDIDNEDHHGDEACEDYIPDEKRVVYNRINPSMQPGCLFPNMKEFRIAMRQYAGMQ

SEQ ID NO: 8337 - protein, 90 aa, Zea mays
  Coding DNA Sequence Number=SeqID_1932
MTRRGSPFYARVAAAVFLLLLSPAETSQIGLGPAIAAWINGSPAASPDADAAVDAVALGPWSQEYAELQALKVAVTDDPKGALDVWQGAN

SEQ ID NO: 8338 - protein, 126 aa, Zea mays
  Coding DNA Sequence Number=SeqID_1934
  Homolog annotation: Hit_ID=A7MQ35; Match level="QueryCoverage=100%, HitCoverage=20%, E-value=6e-53, Identity=80%"; Hit description =Putative uncharacterized protein
MNYLSLMDSSDGQGAAALRQLLSLYANLAEAAVARQIDGIRHCQLSAVNRRVPEPGPVVFARGVSITLEVDEQAFSGASPWLLGSVLERVCSRLVALNSFTEFTLNSQQRGEVGYWPPRMGRKALL

SEQ ID NO: 8339 - protein, 252 aa, Zea mays
  misc_feature (1)..(33): Xaa can be any naturally occurring amino acid
  Coding DNA Sequence Number=SeqID_1935
XXXXXXXXXXXXXXXXXXXXXXXXXXXXXXXXXPGNFALPPLHFLQPPQHFPPFFFLRARQGREPFFPRLQRGARLLFHGRRLLSHGAAPSRLLLRAAAAGSSLSSHGVLPFFLTIHSSSTLAQGQGPPRLNALPASYLLPGFSCAAGQAPMGAPPSGLAAGTSPIPPPAVLLLWRAPLPPLGQQWHGAPLLLLSRAAATPWAGLGEVHDHGAQQQHLLPPNCSCHGWRPAQRLCSATSPAAPQRWRFAGVR

SEQ ID NO: 8340 - protein, 100 aa, Zea mays
  Coding DNA Sequence Number=SeqID_1937
  Gene Ontology: Mol. function=oxidoreductase activity; Cellular component=extracellular region; Biological process=response to oxidative stress
  Homolog annotation: Hit_ID=Q5U1F8; Match level="QueryCoverage=77%, HitCoverage=23%, E-value=1e-23, Identity=70%"; Hit description=Class III peroxidase 135 precursor
  Pfam annotation: Domain name=peroxidase; Domain location=10-100; Score=-85.4; E_value=0.058; Accession=PF00141.13; Description =Peroxidase
  Subcellular localization annotation: CTP_CleavageSite=84; ConfidenceScore=5.04e-01
MGAPARESRISVAVTRSTLWAVRVCTNPASCRYALLVVFSPGLVYMGGPTWDVKVGRRDSTTASFSGANNNIPPPTSGLANLTSLFAAQGLSQKDMVALS

SEQ ID NO: 8341 - protein, 167 aa, Zea mays
  Coding DNA Sequence Number=SeqID_1938
  Subcellular localization annotation: CTP_CleavageSite=25; ConfidenceScore=5.13e-01
GGNKRRERAVSAQQAGCLPPLHRARGTTGRESKRRKCTRHRGNPTPENDGTTTTRRPGRRVTPACMPKAIAKDHPQDPRNGQGERRAQQPEHAERPSSRTGTSADDKGTTPANGTGQGEAEASAKESASGTRRARSRRGGQKDHGRAAARRQAWHRPATTTGGPGKP

SEQ ID NO: 8342 - protein, 186 aa, Zea mays
  Coding DNA Sequence Number=SeqID_1940
  Gene Ontology: Mol. function=transporter activity; Biological process= transport
  Homolog annotation: Hit_ID=A7MFJ7; Match level="QueryCoverage=100%, HitCoverage=32%, E-value=5e-50, Identity=53%"; Hit description =Putative uncharacterized protein
GRAEQHLVRQILSGLTRFNADDVEGDLAHHWQHDAQGREWYFWLRPLLSWHNDEPVQAAQLVQQLQRIMQTPHGGRLLAAEEHIDAPHPLALRIRLRTSDYWLPQRLAHQFCLLPHPEHADTGSGPWRLTHFTRELVRLESHARWHHQRPLIHVVEYWITPHLFDRGLGTSCRHPVQIAIGDPDEL

SEQ ID NO: 8343 - protein, 171 aa, Zea mays
  Coding DNA Sequence Number=SeqID_1941
MTVIAQGQRNGHGHTGVGDWRKSAAQAKRGPKRREGEGESTAVLPGGICIALALAPSQSPCGDVEWRLERRLGSTPGAGLVAVLAHDANLPGTYCRLGETQKTTRRRRTDGRIDSYVCAATRSRTDAETDGTGARRPAEMIRAGTSRAISAGLEAWSAQSCISACDRFPND

SEQ ID NO: 8344 - protein, 210 aa, Zea mays
  Coding DNA Sequence Number=SeqID_1943
  Gene Ontology: Mol. function=nucleoside-triphosphatase activity
  Homolog annotation: Hit_ID=A9HPQ4; Match level="QueryCoverage=100%, HitCoverage=14%, E-value=7e-60, Identity=55%"; Hit description =Putative ATP-dependent helicase lhr
  Pfam annotation: Domain name=DEAD_assoc; Domain location=89-210; Score=74.9; E_value=2.6e-19; Accession=PF08494.1; Description=DEADH associated
IITLGATSWRIQQIRHDQVVVVPAPVRSARLPFWHGDSLGRSATLGEAIGRYLRHAASGVLPGSDNLDANARHNIRALIDEQIAATGLVPDDRNLLIERCRDETGDWRVILHSPYGQRVHAPWALAIAERIGRQMGLDPALVASDDGIVARFPDSEGRVPGAELFLFAPDELQRQVTAAVGHSALFAARFRECAARALLLPRRNPGKKSP

SEQ ID NO: 8345 - protein, 171 aa, Zea mays
  Coding DNA Sequence Number=SeqID_1944
CCGVLRCVSAGFSRCFRCLAAACAGLACVLLLSSGCPFAWVGVGRPFVPLLLCPLSPLWCLVLLLRAAASGCRGSRFLGLGLVSLFAFIRLFCALALSRCPLWGAVLRPPRRSCWVGVRAARPARAVSSPCVVLVPPLAPRVPVLVPASAALVGVGLLPLRPRPRFPFRAA

SEQ ID NO: 8346 - protein, 172 aa, Zea mays
  Coding DNA Sequence Number=SeqID_1946
  Gene Ontology: Mol. function=signal transducer activity; Cellular component=membrane; Biological process=signal transduction
  Homolog annotation: Hit_ID=A0FVW7; Match level="QueryCoverage=100%, HitCoverage=30%, E-value=2e-44, Identity=54%"; Hit description =Methyl-accepting chemotaxis sensory transducer
  Pfam annotation: Domain name=HAMP; Domain location=93-162; Score =56.1; E_value=1.2e-13; Accession=PF00672.15; Description=HAMP domain
MAKRFEASLFRADDRANYQRFQTAYNRYRPQLVAIANQVGTSRSAAQAAFVQMTPVWQDVLDTANALVAENRQQADVSAQAIRDSVSGAEITLATALAVMLLAALATGYSLYRAITVPMSRLVEIHDTMSTGNLTQRLRLGRRDEFGVLEGGFNRMSDELASLVAQAQKSSL

SEQ ID NO: 8347 - protein, 109 aa, Zea mays
  Coding DNA Sequence Number=SeqID_1947
  Gene Ontology: Mol. function=pseudouridine synthase activity; Biological process=pseudouridine synthesis
  Homolog annotation: Hit_ID=Q6D1V0; Match level="QueryCoverage=77%, HitCoverage=26%, E-value=5e-33, Identity=82%"; Hit description =Pseudouridine synthase
  Pfam annotation: Domain name=S4; Domain location=42-89; Score=54.5; E_ value=3.6e-13; Accession=PF01479.15; Description=S4 domain
MTSTIAHYIKRHRRENPTLTKKLYMAQQVQLTATVSEAQLGQRLDQTLAELFPDYSRSRIKEWILERRVSVNGTIIDKPKEKVLGGERVAIDAQIEEEHRWEAQNIPLD

SEQ ID NO: 8348 - protein, 69 aa, Zea mays
  misc_feature (11)..(11): Xaa can be any naturally occurring amino acid
  Coding DNA Sequence Number=SeqID_1948
  Gene Ontology: Mol. function=hydrolase activity, acting on acid anhydrides, catalyzing transmembrane movement of substances; Cellular component=proton-transporting ATP synthase complex, catalytic core F(1); Biological ...
  Gene Ontology: Cellular component=process=ATP synthesis coupled proton transport
  Homolog annotation: Hit_ID=P12862; Match level="QueryCoverage=97%, HitCoverage=13%, E-value=2e-14, Identity=59%"; Hit description=ATP synthase subunit alpha, mitochondrial
VLEPIQTGLKXVNRMVPIGSGQRNLIIGDRPSGNPAIAIDVILCQKQMSSRGRNDTPPLHLSHIFLGWQ

SEQ ID NO: 8349 - protein, 91 aa, Zea mays
  misc_feature (44)..(44): Xaa can be any naturally occurring amino acid
  misc_feature (46)..(46): Xaa can be any naturally occurring amino acid
  Coding DNA Sequence Number=SeqID_1949
  Gene Ontology: Mol. function=biotin carboxylase activity; Cellular component=cytoplasm; Biological process=metabolic process
  Homolog annotation: Hit_ID=Q11HL4; Match level="QueryCoverage=100%, HitCoverage=20%, E-value=3e-25, Identity=65%"; Hit description =Biotin carboxylase / acetyl-coenzyme A carboxylase carboxyl transferase subunit alpha
AVHAGFGFLSEIARFVRILSLHKFPFIGPSSLHIEVMGFKIAAXRXAVALGIPVVPGSEGAVRLEVEARSLAAEFGFPALKKTSAGGGGRG

SEQ ID NO: 8350 - protein, 67 aa, Zea mays
  Coding DNA Sequence Number=SeqID_1950
  Gene Ontology: Mol. function=protein dimerization activity; Cellular component=chromatin; Biological process=chromatin assembly or disassembly
  Homolog annotation: Hit_ID=A7P6V7; Match level="QueryCoverage=79%, HitCoverage=11%, E-value=1e-11, Identity=62%"; Hit description =Chromosome chr9 scaffold_7, whole genome shotgun sequence
YGGLIYELQCLAKRIVSLCCVASGCKRNWSEFSHVHKKMRNRLEHQMLNKLVYEDEEESIHTADGCA

SEQ ID NO: 8351 - protein, 73 aa, Zea mays
  Coding DNA Sequence Number=SeqID_1951
ESGVIKVKNIVRTQGRSSVWPKELPPGDCIRDGFTALYYSRDISQMCNIRKRGLFYRKYFVCSQPVIVPPSRL

SEQ ID NO: 8352 - protein, 159 aa, Zea mays
  Coding DNA Sequence Number=SeqID_1953
  Homolog annotation: Hit_ID=Q2QNU0; Match level="QueryCoverage=99%, HitCoverage=12%, E-value=2e-87, Identity=95%"; Hit description =Expressed protein
PEFIQTTDSRLRSRFPQKQYLFWFREPYATVVLVTCEDLDEFKTILKPRLKLIVQNDEREWFIVFVSKAHPNNDQATKMAKKVYARLEADFNTKKRERCCKFDLHGPDTEFWDDFDSKMVDCIRNTLDRRVQFYEEEIRRLSEQRFTPIWNFCNFFILK

SEQ ID NO: 8353 - protein, 163 aa, Zea mays
  Coding DNA Sequence Number=SeqID_1954
MPMPSRPSLDDAEGPCGGWVGESGDGTLRCARYTPMGEGDSTGEVTSRRKLQLGDRGKGQDLSSQAWGSVGGNIPSDVVPTGGENLDLERAGKEVLSTRVRSGSRAHGGGGDIDGGACVIDRSGGTMSWVEARARASLGGGVAGTTTKMEEARREIPGRRRRA

SEQ ID NO: 8354 - protein, 219 aa, Zea mays
  misc_feature (59)..(59): Xaa can be any naturally occurring amino acid
  misc_feature (146)..(219): Xaa can be any naturally occurring amino acid
  Coding DNA Sequence Number=SeqID_1956
  Subcellular localization annotation: CTP_CleavageSite=58; ConfidenceScore=5.70e-01
RPPTAPSMRQLHLSPQLSPSPVLSSHFSPPPAEASSWRRRLHRGRAFQPPLSSLRDPNXATLRKASSNVPFRLGGGGSGSPKDRRPADDDKEEEEAEGEGGARALTETLVAGALLVGFVGGIGAAGYMYKDQINTFLTLLSRYIDXXXXXXXXXXXXXXXXXXXXXXXXXXXXXXXXXXXXXXXXXXXXXXXXXXXXXXXXXXXXXXXXXXXXXXXXXX

SEQ ID NO: 8355 - protein, 85 aa, Zea mays
  misc_feature (26)..(26): Xaa can be any naturally occurring amino acid
  Coding DNA Sequence Number=SeqID_1958
  Gene Ontology: Mol. function=catalytic activity
  Homolog annotation: Hit_ID=A2YMQ6; Match level="QueryCoverage=98%, HitCoverage=19%, E-value=2e-16, Identity=53%"; Hit description =Putative uncharacterized protein
VWDVLSNQEAVDIVSSSPSRSKAARXKVEAAAREWKAKYPTSKTDECAVVCLYLDGKMDQERDSTGAMDHISLDFQGPAEDPNEA

SEQ ID NO: 8356 - protein, 108 aa, Zea mays
  Coding DNA Sequence Number=SeqID_1959
  Gene Ontology: Mol. function=transaminase activity; Biological process=metabolic process
  Homolog annotation: Hit_ID=A0KAW3; Match level="QueryCoverage=100%, HitCoverage=35%, E-value=3e-53, Identity=96%"; Hit description =Branched chain amino acid: 2-keto-4-methylthiobutyrate aminotransferase
MSQAEFEPIVYLSVSSQEELVPLSQARVPVLDRGFIFGDGVYEVVPVYAHDGAHVPFRIEQHLDRLARSLKKIGIDNPHDAAGWRALIERVVAANAEGLVDANALVYL

SEQ ID NO: 8357 - protein, 57 aa, Zea mays
  Coding DNA Sequence Number=SeqID_1960
VDLQICLVLVVTRGLAYLLRPLRQPRVIAEIIVSAAAEVTLDRLLVLLRSMDGLHVI

SEQ ID NO: 8358 - protein, 177 aa, Zea mays
  Coding DNA Sequence Number=SeqID_1962
  Gene Ontology: Mol. function=transporter activity; Cellular component= integral to membrane; Biological process=transport
  Homolog annotation: Hit_ID=A0GKP1; Match level="QueryCoverage=100%, HitCoverage=41%, E-value=1e-45, Identity=48%"; Hit description=Major facilitator superfamily MFS_1
MVISRAVNYMLNYVPTYATKNLHLPGSVAFTATLLAGVILTVVTPLMGWWAERIGRLPLMWGSLILLMVTIYPAFRLVVNHTTPATLIVLVCWMALLKSIYFSTVPSVMADLFPIGTRASGMAISYNIAVTVFGGFAPLICTLLISATGTSLAPGYYLMAMSLLSGVALLRSQKRIR

SEQ ID NO: 8359 - protein, 150 aa, Zea mays
  misc_feature (31)..(31): Xaa can be any naturally occurring amino acid
  Coding DNA Sequence Number=SeqID_1963
  Gene Ontology: Mol. function=protein serine/threonine kinase activity; Biological process=protein amino acid phosphorylation
  Homolog annotation: Hit_ID=A2WM88; Match level="QueryCoverage=60%, HitCoverage=20%, E-value=9e-30, Identity=67%"; Hit description =Putative uncharacterized protein
  Subcellular localization annotation: CTP_CleavageSite=55; ConfidenceScore=5.34e-01
ASASSLGTFPDWMVTSQDNGSSLVLNPPPAXNLTEFLQFSLGQVSLMQWSEDSAAANTNSSGWVARWTFPSDCKSNGFFCGSFGACRSNGECSCVGKEVHFFYDGDGEEETHPQAGDIRRVLRDVETRMPEQLGYNVSDLSDPATQRYTF

SEQ ID NO: 8360 - protein, 78 aa, Zea mays
  Coding DNA Sequence Number=SeqID_1964
  Subcellular localization annotation: CTP_CleavageSite=52; ConfidenceScore=5.74e-01
STSPTTSSPTPTASSHAWCSEGSATTTVPTAAARSSRSCSPTLRGSWGRQPVAGRFAASGLALGITAHHGVWTPRPHA

SEQ ID NO: 8361 - protein, 117 aa, Zea mays
  Coding DNA Sequence Number=SeqID_1966
  Gene Ontology: Mol. function=nucleotide binding; Cellular component =intracellular; Biological process=small GTPase mediated signal transduction
  Homolog annotation: Hit_ID=A3MM44; Match level="QueryCoverage=100%, HitCoverage=19%, E-value=2e-54, Identity=91%"; Hit description=GTP -binding protein lepA
  Pfam annotation: Domain name=GTP_EFTU_D2; Domain location=2-68; Score= 27.4; E_value=5.2e-05; Accession=PF03144.15; Description=Elongation factor Tu domain 2
MLVRIVNGTLRPKDKIKMMATGAQYPVEHIGVFTPKSRNLESLSAGQVGFIIAGIKELTAAKVGDTVTHAAKAATEPLPGFKEVKPQVFAGLYPVEANQYDALRESLEKLKLNDASL

SEQ ID NO: 8362 - protein, 143 aa, Zea mays
  Coding DNA Sequence Number=SeqID_1967
  Homolog annotation: Hit_ID=A7I030; Match level="QueryCoverage=63%, HitCoverage=18%, E-value=3e-07, Identity=32%"; Hit description =Putative uncharacterized protein
MELANGVLLEAHGWEEELRGFKWHDLRPDRAYLDDIENKERVKDKAQVDASMKKLYLELMPAMDKVKGKIRITGTPLAENCMITRLRENADWTSRRYPICNGDIDDPDTKATWPERYPMEWIRRQRNEAQGPSQLIGFGPATA

SEQ ID NO: 8363 - protein, 71 aa, Zea mays
  Coding DNA Sequence Number=SeqID_1968
MQGALPHGAAFGLRCARGLPFDEMPNPGLVSRAAITCAAQVLAVFGDMLADGVLLDNEAVVLASSYASIDT

SEQ ID NO: 8364 - protein, 65 aa, Zea mays
  Coding DNA Sequence Number=SeqID_1970
TQREPPKRVRQSARTRPLPPPRRGTIYLSICIRLILQNYTILCCSCFEQYIPFETMQGNLAASKS

SEQ ID NO: 8365 - protein, 52 aa, Zea mays
  Coding DNA Sequence Number=SeqID_1972
  Homolog annotation: Hit_ID=P10581; Match level="QueryCoverage=96%, HitCoverage=4%, E-value=7e-19, Identity=96%"; Hit description =Probable DNA-directed RNA polymerase
SNDFKQKHWSVLVSVGLLRPKNLALFKRKEALRLLSSLLFIHEELSTIYRYS

SEQ ID NO: 8366 - protein, 173 aa, Zea mays
  misc_feature (27)..(27): Xaa can be any naturally occurring amino acid
  misc_feature (63)..(63): Xaa can be any naturally occurring amino acid
  Coding DNA Sequence Number=SeqID_1973
  Gene Ontology: Mol. function=transferase activity, transferring glycosyl groups; Biological process=metabolic process
  Homolog annotation: Hit_ID=Q2R1N0; Match level="QueryCoverage=94%, HitCoverage=33%, E-value=8e-37, Identity=51%"; Hit description=UDP -glucoronosyl and UDP-glucosyl transferase family protein, expressed
  Subcellular localization annotation: CTP_CleavageSite=45; ConfidenceScore=5.35e-01
YTAKITTWPHVTILSTPGMGHLIPLSXLTQRLASRHGATSTIITFASTALPTQRAFLTSLPTXVSSLSLPPVDLYDLPRAAAINTRMSQECARSVPAQTAVLAHLRRSTAGRLAAFVTDLFGADSLNAARAAGVRRRCIFFPSNLHVLTLILHLPDLEAAVPGEFRDMPEPLR

SEQ ID NO: 8367 - protein, 139 aa, Zea mays
  Coding DNA Sequence Number=SeqID_1974
  Gene Ontology: Mol. function=glycerone kinase activity; Biological process=glycerol metabolic process
  Homolog annotation: Hit_ID=A4WF30; Match level="QueryCoverage=93%, HitCoverage=23%, E-value=5e-34, Identity=58%"; Hit description =Dihydroxyacetone kinase
  Pfam annotation: Domain name=Dak2; Domain location=44-139; Score=2.2; E_value=1.3e-06; Accession=PF02734.7; Description=DAK2 domain
QRAERIGSVLDFDPSDNAEVAQVVERVTQTLIDLESELNALDAKVGDGDTGSTFAAGAKKIQRGLREQQLPLDELPTLLALVGEQLATVMGGSSGVLMSILFTSAGQQLEEGSTLPQALMHGLERMKHYGGAQPGHRTL

SEQ ID NO: 8368 - protein, 89 aa, Zea mays
  Coding DNA Sequence Number=SeqID_1975
WDVGFVRIVSPGQRVVRLASATHGGDGDIAGLIYSNYVPTDANKENDTGARAHATAAPRRDDTQSNDGCVPRHGQSLTWIHGVEANGGR

SEQ ID NO: 8369 - protein, 98 aa, Zea mays
  misc_feature (22)..(22): Xaa can be any naturally occurring amino acid
  Coding DNA Sequence Number=SeqID_1977
  Gene Ontology: Mol. function=hydrogen ion transporting ATP synthase activity, rotational mechanism; Cellular component=proton -transporting ATP synthase complex, catalytic core F(1); Biological process=ATP synthesis coupled proton transport
  Homolog annotation: Hit_ID=A1E927; Match level="QueryCoverage=100%, HitCoverage=25%, E-value=6e-10, Identity=41%"; Hit description=ATP synthase subunit beta
  Subcellular localization annotation: CTP_CleavageSite=28; ConfidenceScore=5.18e-01
LVGFQVGSVFGRLFDRLGARFXLCFTALAMAGFFRHVLEPVVLFFMAALFRFVRAGSVVSAFLGGVPSAVGSPPPLRSAMGSLLGKTTSPLWGSISSL

SEQ ID NO: 8370 - protein, 108 aa, Zea mays
  misc_feature (42)..(42): Xaa can be any naturally occurring amino acid
  Coding DNA Sequence Number=SeqID_1978
  Gene Ontology: Mol. function=kinase activity; Cellular component=cell surface; Biological process=protein amino acid phosphorylation
  Homolog annotation: Hit_ID=Q6QP54; Match level="QueryCoverage=100%, HitCoverage=48%, E-value=2e-48, Identity=76%"; Hit description =Putative kinase
  Pfam annotation: Domain name=Lectin_legB; Domain location=4-108; Score=-97.7; E_value=0.00093; Accession=PF00139.10; Description =Legume lectin domain
MPAASVWFDSAARVAPSGLLVLTNVTVAMTDHALHLIPLPFXHELAFFILRTRSLSTTMSIQYLGLLNITDGAEATSNHILVVGFDTVLNYEFGDINHNHVSIDIDSL

SEQ ID NO: 8371 - protein, 67 aa, Zea mays
  Coding DNA Sequence Number=SeqID_1979
MERQSLSTCPAHEESGRRQEKRADAEKEERRSLVRPFLFLESASLGDSPRSSASAQPVVAVGESARP

SEQ ID NO: 8372 - protein, 97 aa, Zea mays
  Coding DNA Sequence Number=SeqID_1981
  Subcellular localization annotation: CTP_CleavageSite=27; ConfidenceScore=5.04e-01
ASSPFRRNPGPEARRRPSSAAAYTRCCSASGKHLPAGLCSHRVVSFDLSERRLGYRRPTPDALVLGGPFPGNEHLTAGLLALSLPFLLCRNRAAPKA

SEQ ID NO: 8373 - protein, 135 aa, Zea mays
  misc_feature (101)..(101): Xaa can be any naturally occurring amino acid
  Coding DNA Sequence Number=SeqID_1983
  Gene Ontology: Mol. function=oxidoreductase activity; Cellular component=extracellular region; Biological process=response to oxidative stress
  Homolog annotation: Hit_ID=A2Y668; Match level="QueryCoverage=100%, HitCoverage=40%, E-value=2e-44, Identity=65%"; Hit description =Putative uncharacterized protein
CGPIQKRLSNFTGNMDGQDPSLDPAYAAELRKLCPPPPRPGDDDRKVKVPLDPGSNYTFDLSYYRHVLATGGLFQSDGSLLHDPVTRGYVEKVVKASSPDXYYADFATAMVKMGRTDVLVGDHGEIRPTCGIFVD

SEQ ID NO: 8374 - protein, 88 aa, Zea mays
  Coding DNA Sequence Number=SeqID_1984
SALSLISLSWYWSKGPSSPWKSKLFKFMAHLSFSELGPDMNFSIGKEPQGTHQIPAKKKPPEPKFFPIKGYSGPFLFNPERHPQMFPS

SEQ ID NO: 8375 - protein, 144 aa, Zea mays
  Coding DNA Sequence Number=SeqID_1986
  Gene Ontology: Mol. function=acyl-[acyl-carrier-protein]-phospholipid O-acyltransferase activity; Cellular component=integral to membrane; Biological process=metabolic process
  Homolog annotation: Hit_ID=Q5PEN7; Match level="QueryCoverage=99%, HitCoverage=19%, E-value=3e-70, Identity=88%"; Hit description =Bifunctional protein aas [Includes: 2-acylglycerophosphoethanolamine acyltransferase (EC ...
  Homolog annotation: Hit description=2.3.1.40) (Acyl-[acyl-carrier -protein]-- phospholipid O-acyltransferase) (2-acyl-GPE acyltransferase); Acyl- [acyl-carrier-protein] synthetase (EC 6.2.1.20) (Long-chain-fatty- ...
  Homolog annotation: Hit description=acid--[acyl-carrier-protein] ligase) (Acyl-ACP synthetase)]
QDKLWILAHLLLPRRAQVAQQPEDAAMVLFTSGSEGNPKGVVHSHKSLLANVEQIRTVADFTPRDRFMSALPLFHAFGLTVGLFTPLLTGAQVFLYPSPLHYRIVPELVYDRNCTVLFGTSTFLGNYARFASPYDFARLRYVVA

SEQ ID NO: 8376 - protein, 270 aa, Zea mays
  misc_feature (159)..(159): Xaa can be any naturally occurring amino acid
  Coding DNA Sequence Number=SeqID_1987
  Gene Ontology: Mol. function=nucleic acid binding; Cellular component= cytoplasm; Biological process=multicellular organismal development
  Homolog annotation: Hit_ID=A2XKQ7; Match level="QueryCoverage=100%, HitCoverage=26%, E-value=1e-102, Identity=65%"; Hit description =Putative uncharacterized protein
  Pfam annotation: Domain name=DUF1785; Domain location=89-142; Score =96.0; E_value=1.2e-25; Accession=PF08699.1; Description=Domain of unknown function (DUF1785)
  Pfam annotation: Domain name=PAZ; Domain location=143-270; Score =111.6; E_value=2.4e-30; Accession=PF02170.12; Description=PAZ domain
  Pfam module annotation: Pfam domain module=DUF1785::PAZ; Domain location=89-142::143-270
GRRPVYDGRKSLFTAGPLPFQSKEFVLMLTNHERGRQGEKEYKVAIKDAARIDMYSLKMFLAGRNRDLPQNTIQALDIALREFPTSEYTPISKSFFSRKEFGDGQSLGNGVECWRGYYQSLRPTQMGLSLNIDVSATSFYKAQPVIDFVVEYLNLRDTXKRISDQDRIKLKKALKMVWVATNHMQDKCIHYRITGLTSTPLKDLTFDQEGTRVSVVHYFKQRYNYYLQYTHWPCLQAGRVDKQIYLPIEVCSIVQGQRYSSKLNENQVRN

SEQ ID NO: 8377 - protein, 150 aa, Zea mays
  Coding DNA Sequence Number=SeqID_1988
MGVVFIYIRNSWGPIRGDADVYIGADLLWSPTCPNKSHLECEAVAALENVTSVFESWRLRIESTVESVKDSIPSTPFVQSYPRSPSYWSEARSRTVGTRSASSRLLHGTPTAQWGTTFHLIHAPSTTSWPEFGFMRIEHRRFVIASTYRN

SEQ ID NO: 8378 - protein, 175 aa, Zea mays
  misc_feature (100)..(100): Xaa can be any naturally occurring amino acid
  Coding DNA Sequence Number=SeqID_1990
  Gene Ontology: Mol. function=maltose transmembrane transporter activity; Cellular component=periplasmic space; Biological process =carbohydrate transport
  Homolog annotation: Hit_ID=P0AEY0; Match level="QueryCoverage=100%, HitCoverage=44%, E-value=6e-59, Identity=65%"; Hit description =Maltose-binding periplasmic protein precursor
MTMKTGARVLALSALTAVLFSASAVAKIEEGKLVIWINGDKGYNGLAEVGKKFEQDTGISVTVEHPDKMEEKYPQVSSSEDRPDIIFWAHDRYHGYAQSXIFVLSHTEIKTSIQQLFRFTWDAVSFNGELIGYPVSVYSPPLIYNKDLLPTPQKKMEQMAALIINPPKDKSVMMF

SEQ ID NO: 8379 - protein, 82 aa, Zea mays
  Coding DNA Sequence Number=SeqID_1991
  Subcellular localization annotation: CTP_CleavageSite=65; ConfidenceScore=5.24e-01
YTQKWACLANSACTMIRATGSSLRWIELAKSRPFMRSCSSLSALTRIYTPGFLAHRSERTNQDVRISAHKPRLMVYACLKPG

SEQ ID NO: 8380 - protein, 94 aa, Zea mays
  Coding DNA Sequence Number=SeqID_1993
  Gene Ontology: Mol. function=oxidoreductase activity, acting on single donors with incorporation of molecular oxygen, incorporation of two atoms of oxygen
  Homolog annotation: Hit_ID=A9AL47; Match level="QueryCoverage=98%, HitCoverage=26%, E-value=6e-42, Identity=89%"; Hit description =Gentisate 1,2-dioxygenase
MMTSRHPDTSRADYYARIAEQRLAPLWESLHNLVPKTPQPAAQPAIWKYAQVRDLVMQAGNVISAEEAVRRVLVLENPGLPGKSSMTPSLYAGL

SEQ ID NO: 8381 - protein, 209 aa, Zea mays
  Coding DNA Sequence Number=SeqID_1994
  Gene Ontology: Mol. function=binding
  Homolog annotation: Hit_ID=A3AFB3; Match level="QueryCoverage=66%, HitCoverage=21%, E-value=2e-32, Identity=56%"; Hit description =Putative uncharacterized protein
LCPAPLSDLVDLLHLGGGRRLDAIATALLLDDVHVVSDRKLGGEAKRAIASVRELKGGRERLVLHSNRAQCRLARREADAAVSDATRALALARPANAHARSLWRRAQAYDMKGMARESLLDCLAFAGAWLDGRRHPRRAARGANPKLPYCVARMINKQMSVTGLFAGVKMKDNKVGSDDCMPWCSENDRDNEDGEDDPDDDDESDEEIA

SEQ ID NO: 8382 - protein, 48 aa, Zea mays
  Coding DNA Sequence Number=SeqID_1995
HHLAHRLCFSQRQIMLQKLCCLQMLTKSHGMGKLRQSWSLFIFIPKSS

SEQ ID NO: 8383 - protein, 64 aa, Zea mays
  Coding DNA Sequence Number=SeqID_1997
  Gene Ontology: Mol. function=nucleotide binding; Cellular component =intracellular; Biological process=small GTPase mediated signal transduction
  Homolog annotation: Hit_ID=Q6Z6Z4; Match level="QueryCoverage=95%, HitCoverage=31%, E-value=2e-09, Identity=55%"; Hit description =Putative ADP-ribosylation factor
QEKHVVMLGLDAAGITTILYRLHMGEVLSTVPTVGRSGLTLLQSSFLYPIATSGNIISIRPAGM

SEQ ID NO: 8384 - protein, 71 aa, Zea mays
  Coding DNA Sequence Number=SeqID_1998
SADRTPQHGTTGAAEARPPEKFKIKDFEAFSSLKNSEDKFTLTSSSHEREACSRVSPAIRAGGRRGPCCCC

SEQ ID NO: 8385 - protein, 126 aa, Zea mays
  Coding DNA Sequence Number=SeqID_2000
MRIVYPNYDDTRSDGVIPLYYALARPLAAIKDAMVASSMLYYTVAFIAAAVAVYCAMPYLLATNEIDITGTLHNHSPGSCTPTMYELYCAVTHSGSRERKNWGLFNLIAVPDYNLDLTASGMLMTN

SEQ ID NO: 8386 - protein, 182 aa, Zea mays
  Coding DNA Sequence Number=SeqID_2002
  Gene Ontology: Mol. function=receptor activity
  Homolog annotation: Hit_ID=Q5S1T9; Match level="QueryCoverage=71%, HitCoverage=59%, E-value=1e-53, Identity=80%"; Hit description =Prenylated Rab acceptor protein 1
  Pfam annotation: Domain name=PRA1; Domain location=29-169; Score =93.1; E_value=8.6e-25; Accession=PF03208.9; Description=PRA1 family protein
  Subcellular localization annotation: CTP_CleavageSite=47; ConfidenceScore=5.57e-01
SGPSSGTGLSDAALATPGFRLFVSRLANTARRSLADRSPWTELLDRSAFSRPDSLSEATSRLRRNLAYFRVNYAGVVAFALGASLLAHPFSLLILLGLLTAWCFLYLFCPSDQPVVLFGRTFSDREALLGLGDEVQGGAERAAAAPHGGSSPRRRLPTAALPTASYQGGKGMRRWFWKRRGG

SEQ ID NO: 8387 - protein, 191 aa, Zea mays
  misc_feature (24)..(24): Xaa can be any naturally occurring amino acid
  misc_feature (32)..(32): Xaa can be any naturally occurring amino acid
  misc_feature (119)..(119): Xaa can be any naturally occurring amino acid
  misc_feature (153)..(153): Xaa can be any naturally occurring amino acid
  Coding DNA Sequence Number=SeqID_2003
  Gene Ontology: Mol. function=ubiquinol-cytochrome-c reductase activity; Cellular component=mitochondrial respiratory chain; Biological process=electron transport
  Homolog annotation: Hit_ID=P49727; Match level="QueryCoverage=96%, HitCoverage=66%, E-value=3e-59, Identity=69%"; Hit description =Cytochrome b-c1 complex subunit Rieske, mitochondrial precursor
  Pfam annotation: Domain name=Rieske; Domain location=90-187; Score= -8.5; E_value=0.025; Accession=PF00355.16; Description=Rieske [2Fe -2S] domain
RIQGGKFVYDEYNHERYPPGDPSXKGALAYFXVLSGGRFIYACLLRLLVLTFVLSMSASKYVFALASLEDHFSSIESGPSVTVKWLGKPVFIRRRLDDDIELADSVEVASFRLREQDTXCVKNLECLVVIGVCTHLGCIPLPNAGVFGIWMWXSINLYNYYISGRISKGPAPFNLEVPTHSFLEEIEFLVD

SEQ ID NO: 8388 - protein, 119 aa, Zea mays
  Coding DNA Sequence Number=SeqID_2004
  Gene Ontology: Mol. function=6-phosphogluconolactonase activity; Biological process=carbohydrate metabolic process
  Homolog annotation: Hit_ID=A4W8A9; Match level="QueryCoverage=93%, HitCoverage=33%, E-value=6e-34, Identity=62%"; Hit description=6 -phosphogluconolactonase
APRAQPHPTTVEGAGPRHTASHPNGAHGYAANEPDSTADVWALNNVNGQVERVQSLDTTPPGLSDTRRAADIHTTPDGRYLQACDRTSSTLTAFSTREDGPVPTTDGHQPTETQPRGPN

SEQ ID NO: 8389 - protein, 81 aa, Zea mays
  Coding DNA Sequence Number=SeqID_2005
MGFAGGVGMPGGAPVAGETSAVGPGKPGGAPAVGARAAREERGRGGKASPTLGKRVGGGGRPAMEDGVIYAVAQQPPYDGL

SEQ ID NO: 8390 - protein, 218 aa, Zea mays
  misc_feature (182)..(182): Xaa can be any naturally occurring amino acid
  Coding DNA Sequence Number=SeqID_2007
RGPGTDLSWEELEVLVKGITDESFVLESLILPQGIPALCDDPGLRTAILATLLTLDKSGVAVCQTGGRDPHRRIRISDAPAGGPQTTSAAPSAPAMAPSAPVAAPRPLDKGKGAAGSFSASGGTGGSEEERRCQLRCADGSFVSDPLEASEDCWWGRGGRLPSPGRVEARQSSATTTIGSVXTTTTTTTTVGSAVATTTRWRSPPGAPTTAATTAAAA

SEQ ID NO: 8391 - protein, 81 aa, Zea mays
  misc_feature (39)..(39): Xaa can be any naturally occurring amino acid
  misc_feature (53)..(53): Xaa can be any naturally occurring amino acid
  Coding DNA Sequence Number=SeqID_2009
  Gene Ontology: Mol. function=transferase activity, transferring groups other than amino-acyl groups; Cellular component=cellular _component; Biological process=flavonoid biosynthetic process
  Homolog annotation: Hit_ID=P30080; Match level="QueryCoverage=88%, HitCoverage=18%, E-value=1e-24, Identity=81%"; Hit description =Chalcone synthase 6
  Pfam annotation: Domain name=Chal_sti_synt_C; Domain location=1-80; Score=19.6; E_value=4.1e-05; Accession=PF02797.6; Description =Chalcone and stilbene synthases, C-te
SSSTASSSSLKPEKLEATRHVLIEYGDMSSACVLFILDXKLTKKSIEYGLGTXGEGLDWGVLCGFSPELTVETVVLRSVTV

SEQ ID NO: 8392 - protein, 325 aa, Zea mays; identical to SEQ ID NO: 8267
  Coding DNA Sequence Number=SeqID_188
  Coding DNA Sequence Number=SeqID_188
  Gene Ontology: Mol. function=hydrolase activity; Cellular component =integral to membrane; Biological process=metabolic process
  Homolog annotation: Hit_ID=A7QB13; Match level="QueryCoverage=96%, HitCoverage=98%, E-value=1e-140, Identity=76%"; Hit description =Chromosome chr5 scaffold_72, whole genome shotgun sequence
  Pfam annotation: Domain name=IU_nuc_hydro; Domain location=8-325; Score=281.9; E_value=1.3e-81; Accession=PF01156.9; Description =Inosine-uridine preferring nucleoside hydrolase

SEQ ID NO: 8393 - protein, 142 aa, Zea mays
  Coding DNA Sequence Number=SeqID_189
EIFIGFNGTSCLRPCSRSHEVSPLMESSPDPFSLSLLLARPPPPPVLGRHAACSVLRPSVVCCSPARRGDMRLRQRGGGDQGGGRVRGAAAVDTLAPLAAAVDVSSGSAYPSLPASLDVLLFLFSRYRMVVLLATLTHQVPR

SEQ ID NO: 8394 - protein, 317 aa, Zea mays
  Coding DNA Sequence Number=SeqID_191
  Gene Ontology: Mol. function=DNA binding; Cellular component=nucleus
  Homolog annotation: Hit_ID=Q84PV0; Match level="QueryCoverage=100%, HitCoverage=100%, E-value=1e-55, Identity=43%"; Hit description=Myb -like protein
  Pfam annotation: Domain name=Myb_DNA-binding; Domain location=166 -213; Score=14.5; E_value=0.19; Accession=PF00249.21; Description=Myb- like DNA-binding domain
  Pfam annotation: Domain name=Myb_DNA-binding; Domain location=254 -303; Score=24.0; E_value=0.00055; Accession=PF00249.21; Description =Myb-like DNA-binding domain
  Pfam module annotation: Pfam domain module=Myb_DNA-binding::Myb_DNA -binding; Domain location=166-213::254-303
  Subcellular localization annotation: CTP_CleavageSite=42; ConfidenceScore=5.46e-01
MEFIDPWDSQSRARVVHSGANSTSFSSSTAKAPLSLRHAASCAAAAVALLAAAFYLLPTYQILSSLLIWIASSLLLAPFAPLSATGGDISVGRGRVVPAPEPAPEPTPEPTPAPRRGRRQNPVPTPTKPSDPGTPPVQSAASLHPLQKATTAGGAVVDGGEREEDAGEWTDQELELLRRQMVKHPAGEPQRWEKIAAVFGGRRTPENVIRAAKSGAPAAGGSSFEQFLRKRKPLDPRAEVADTADDAGGAESADAAWSAGDDRALLNALKEFPKDTAMRWEKVAASVPGKTKAACMKRITELKRDFRSTKTASEAAP

SEQ ID NO: 8395 - protein, 195 aa, Zea mays
  Coding DNA Sequence Number=SeqID_192
  Subcellular localization annotation: CTP_CleavageSite=32; ConfidenceScore=5.33e-01
APAGAHYCRSLTCRSLSTPHRACPPSGTGQARARRRPATRGMDKYKLMVDQEEQQQLSSWSLPSIQPSVKLLRCSRDSQDPCRHSCHASSSMICSGQRTAAEGRRGVPLLACSSRQVLMQRKALVRAKNNLHGGILKTLPVVRFNDRKKEKNRERLLYGARGDVWKSLSMPFLSHQTSILQLFLVLTILPFLSLL

SEQ ID NO: 8396 - protein, 167 aa, Zea mays
  Coding DNA Sequence Number=SeqID_194
SQHAQPHPYMAFEDEELLQLLSRAEAVEAKQIEVMSLLMLATAESLASGELTPGDPEWKALGSRCSARQRNRWSHVDGGRVRRTRLARRGVGGGGCASEAGRQHGGAGHTCRRGVRAGRLGLELQLALHAGRSCQRSTALHEGGGRGIHIPCVWSVDQESLATLIRM

SEQ ID NO: 8397 - protein, 123 aa, Zea mays
  Coding DNA Sequence Number=SeqID_196
  Subcellular localization annotation: CTP_CleavageSite=45; ConfidenceScore=5.34e-01
LRYLEIFLYISRTMKPQFPTTAQNHLRRRLFPPGAQLSSYMDRARAESSSRQAVGANARVCTRALALLLSVRVRPHVFSLVGAHYWPAAATPSRARHELRCRWDCGREGEACDARGPEGALRC

SEQ ID NO: 8398 - protein, 176 aa, Zea mays
  misc_feature (86)..(86): Xaa can be any naturally occurring amino acid
  Coding DNA Sequence Number=SeqID_198
NPSRTMGRTVLSDEEEDEFEADEEDPRPSRRNRDDMDERDDDDDDEDGQDEFEKDDFIVDDEEEEEVEGEEEEQKSDDERRRKKKXNEEGIRRLHLDEDDYMLLQDNNITGISRPKPGNKFKRLKKAGRESEMDEHSGFSDGDGTGKKRSCLYTSLNRALAKKKARERKTNITSQH

SEQ ID NO: 8399 - protein, 139 aa, Zea mays
  Coding DNA Sequence Number=SeqID_200
  Gene Ontology: Mol. function=hydrolase activity, acting on ester bonds; Cellular component=cellular_component; Biological process =lipid metabolic process
  Homolog annotation: Hit_ID=Q8RZ61; Match level="QueryCoverage=87%, HitCoverage=30%, E-value=3e-51, Identity=76%"; Hit description =Lipase-like
QTFSEHHHKLLLEELEKLRKTNPTVTIIYADYYGAAMEIFRSPERFGIEEPLVACCGGEGPYGVSLSTACGYGDYKVCDNPDKYGSWDGFHPSEAAYKAIAMGLLRGTYTQPSIASTTSSCPQLTELGSSVEYKVLYDL

SEQ ID NO: 8400 - protein, 158 aa, Zea mays
  misc_feature (101)..(101): Xaa can be any naturally occurring amino acid
  Coding DNA Sequence Number=SeqID_201
  Gene Ontology: Mol. function=sodium channel inhibitor activity; Cellular component=nematocyst; Biological process=pathogenesis
  Homolog annotation: Hit_ID=A2YB57; Match level="QueryCoverage=99%, HitCoverage=35%, E-value=2e-47, Identity=59%"; Hit description =Putative uncharacterized protein
  Pfam annotation: Domain name=Methyltransf_7; Domain location=1-158; Score=-117.9; E_value=4.9e-08; Accession=PF03492.6; Description=SAM dependent carboxyl methyltransferase
LKLRRKELVHGGRMVLVFLSRKNEDVYSGDLNQLFAFVATALQSLVSKGLVEKEKLESFNLPIYGLSVGEVEDLVTGLFSMDLIKQFEMNWDPFDDSERSXSMNVAKYIRSALKSLIVCHFGEAIIDAWFAEFRRLVAEHLEKEKTKFTTFAMCLKKE

SEQ ID NO: 8401 - protein, 139 aa, Zea mays
  Coding DNA Sequence Number=SeqID_202
YLLEEWHRWFAAGLWRGGQCRSLRCEGEGLHRCALASLDGDRRRGPPGAAGVPRPRRQGRHRRCPKGACPGNVARWWCFEGNGVLGLVVIGFCLIERCCICLPRKKTDETKSLIRVLVALGFDCDQIEANGWGLEMLVC

SEQ ID NO: 8402 - protein, 92 aa, Zea mays
  Coding DNA Sequence Number=SeqID_204
GSSGHDDIAAAARGFHLLSSGALGVWCRSSINTYVTCARRIDQDHQPTSIGTSRRRLKSAVDPPGTVANPHPHSKPRRASGRGSGCSTGRSC

SEQ ID NO: 8403 - protein, 82 aa, Zea mays
  Coding DNA Sequence Number=SeqID_2010
ARAVLNFPALARHLPRPASLAPRDVQAAAARAAVMHDPEPQRPDEPGRQPVEEEVAAAAQLLMNSMRLALSRALSWLATEAA

SEQ ID NO: 8404 - protein, 245 aa, Zea mays
  Coding DNA Sequence Number=SeqID_2012
  Gene Ontology: Mol. function=oxidoreductase activity; Cellular component=extracellular region; Biological process=lignin catabolic process
  Homolog annotation: Hit_ID=Q69L99; Match level="QueryCoverage=85%, HitCoverage=35%, E-value=1e-79, Identity=70%"; Hit description =Laccase-14 precursor
  Pfam annotation: Domain name=Cu-oxidase; Domain location=72-229; Score=142.8; E_value=9.9e-40; Accession=PF00394.12; Description =Multicopper oxidase
  Pfam annotation: Domain name=Cu-oxidase_3; Domain location=1-62; Score=38.6; E_value=1.8e-10; Accession=PF07732.5; Description =Multicopper oxidase
  Pfam module annotation: Pfam domain module=Cu-oxidase::Cu-oxidase_3; Domain location=72-229::1-62
QRLSCWADGPNMVSQCPIRPAAGTYTYRFNVTGQEGTLWWHAHVSFLRATVYGALILHPAAPSSYPFPTPHGEATILLGEWWNVSVVDVERQALLMGAGPNNSVALTINGLIGAGGGAGCENSSSSSQYELVVQRGRTYLLRIINAALNYELFFKVANHSFTVVAADACYTDPYHTDVIVIAPGQTVDALMRADADPGRRYYMAAQVYQSLANATYSAATTALLTYLPDASGSDDEQPTLMPTMP

SEQ ID NO: 8405 - protein, 255 aa, Zea mays
  misc_feature (131)..(131): Xaa can be any naturally occurring amino acid
  Coding DNA Sequence Number=SeqID_2013
  Gene Ontology: Mol. function=serine carboxypeptidase activity; Cellular component=extracellular region; Biological process =proteolysis
  Homolog annotation: Hit_ID=A2Z241; Match level="QueryCoverage=92%, HitCoverage=51%, E-value=1e-91, Identity=71%"; Hit description =Putative uncharacterized protein
  Pfam annotation: Domain name=Peptidase_S10; Domain location=80-253; Score=24.8; E_value=3.1e-16; Accession=PF00450.12; Description =Serine carboxypeptidase
  Subcellular localization annotation: CTP_CleavageSite=45; ConfidenceScore=5.08e-01
MMSMSACFFFVLLIVCLLGSHANSSQEARLREFILSRRSSGSAFSAHDKSGSTDTSRLRSEYYGTDQSAQKAVDKITSLPGQPDGVDFDQYAGYVTVDETNGRALFYYFVEAPQDASTKPLLLWLNGSPEXSSVGYRAMIEIGPFRITSDNKALSRNENAWNSEANVLFLESPAGVGFSYSNTSSDYGKSGDQRTADDAFVFLINWLERFPEYKARAFYISGESYAGHYVPQLATAILSHSIKSESGIINLRAIL

SEQ ID NO: 8406 - protein, 118 aa, Zea mays
  Coding DNA Sequence Number=SeqID_2014
  Subcellular localization annotation: CTP_CleavageSite=36; ConfidenceScore=5.52e-01
SVSSTLFSFHLSHSRARCLLPMVEHPRPLGSLFLLSCAAVPASLPMDTGSRRCFSPVLTMVVASKLLPAARVAVTLCSPRRVELPRRVLFLLAPYYLRIPAMVAELGLYSSLCAPCSD

SEQ ID NO: 8407 - protein, 140 aa, Zea mays
  Coding DNA Sequence Number=SeqID_2016
  Gene Ontology: Cellular component=cell outer membrane
  Homolog annotation: Hit_ID=A9ALM8; Match level="QueryCoverage=100%, HitCoverage=11%, E-value=4e-73, Identity=96%"; Hit description =Putative uncharacterized protein
  Pfam annotation: Domain name=DUF748; Domain location=1-132; Score =93.2; E_value=8.2e-25; Accession=PF05359.2; Description=Domain of Unknown Function (DUF748)
PNYTANLVAIKGTVGAFGTDSTTSAPVDVAANLAGNGPISIKGTVNPLIDKPALDLTATAHDIELTNLTPYSAKYAGYPITKGKLNVDLHYQLANDQLSANNHIFIDQLTFGDHVENDTATKLPVKLAISLLKNTRGQID

SEQ ID NO: 8408 - protein, 76 aa, Zea mays
  Coding DNA Sequence Number=SeqID_2017
  Gene Ontology: Cellular component=membrane
  Homolog annotation: Hit_ID=A7MFZ0; Match level="QueryCoverage=73%, HitCoverage=20%, E-value=1e-21, Identity=85%"; Hit description =Putative uncharacterized protein
RAFHEAGLWNHFQATAFDFSNTLSTHSIFGTLLEGILGYQKAPSVSEVAVWLIYLIPALLLFFFPARPAPSAARSV

SEQ ID NO: 8409 - protein, 351 aa, Zea mays
  misc_feature (1)..(74): Xaa can be any naturally occurring amino acid
  misc_feature (274)..(351): Xaa can be any naturally occurring amino acid
  Coding DNA Sequence Number=SeqID_2018
XXXXXXXXXXXXXXXXXXXXXXXXXXXXXXXXXXXXXXXXXXXXXXXXXXXXXXXXXXXXXXXXXXXXXXXXXXGEGQERGLELESEVLGSRVDGRKLKLATFTASGGGDGKGGGGDGNRRREEVVVEMETEDAALRWGDIIRDCLASLGNQYQGSSAPPTATTSRELGAYNLSGCHDGMALLQRVGRAGKDGTALAQGRSLPPAWTLVTPYCKRTRPGHGANTKAAGSTSHACLPPAASPPFAFRLAPTHLGWGTRRQFTRRSRDPLCFETPXXXXXXXXXXXXXXXXXXXXXXXXXXXXXXXXXXXXXXXXXXXXXXXXXXXXXXXXXXXXXXXXXXXXXXXXXXXXXX

SEQ ID NO: 8410 - protein, 174 aa, Zea mays
  Coding DNA Sequence Number=SeqID_2020
  Gene Ontology: Mol. function=oxidoreductase activity; Cellular component=integral to membrane; Biological process=metabolic process
  Homolog annotation: Hit_ID=A0TDR0; Match level="QueryCoverage=100%, HitCoverage=40%, E-value=3e-94, Identity=95%"; Hit description=FAD dependent oxidoreductase
QRDGRAVTLIDPAAPGDSTAKWSCGQMAVSEVIPLSKPGILMKVPRWLMDQKGPLALRPGALPGILPWFFRFVASARHAKIVSIAQAMATLTHDVYSDYAPLLDACGDRALLGQRPVLEVFDDPAGIAHEEPHLALRQSLGFASQRLSAADIGDLEPALAGRFKHGLLFPDWRA

SEQ ID NO: 8411 - protein, 100 aa, Zea mays
  Coding DNA Sequence Number=SeqID_2021
  Gene Ontology: Mol. function=transferase activity; Cellular component= endoplasmic reticulum membrane; Biological process=metabolic process
  Homolog annotation: Hit_ID=A4AGD8; Match level="QueryCoverage=97%, HitCoverage=35%, E-value=7e-41, Identity=78%"; Hit description =Undecaprenyl pyrophosphate synthetase
  Pfam annotation: Domain name=Prenyltransf; Domain location=37-100; Score=-121.1; E_value=0.03; Accession=PF01255.10; Description =Putative undecaprenyl diphosphate synth
MSPRRHDDAEPFRPIDWTGETPPAIPARFVPQHVAIVMDGNGRWANGRGLTRIEGHKAGEASLLDVVAGGIQIGVQHISAYAFSTENWKRSPEEVRFLMG

SEQ ID NO: 8412 - protein, 215 aa, Zea mays
  misc_feature (16)..(16): Xaa can be any naturally occurring amino acid
  misc_feature (52)..(52): Xaa can be any naturally occurring amino acid
  misc_feature (112)..(112): Xaa can be any naturally occurring amino acid
  misc_feature (179)..(179): Xaa can be any naturally occurring amino acid
  misc_feature (190)..(190): Xaa can be any naturally occurring amino acid
  misc_feature (203)..(203): Xaa can be any naturally occurring amino acid
  Coding DNA Sequence Number=SeqID_2022
  Gene Ontology: Mol. function=RNA-directed DNA polymerase activity; Cellular component=nucleus; Biological process=RNA-dependent DNA replication
  Homolog annotation: Hit_ID=O48968; Match level="QueryCoverage=100%, HitCoverage=96%, E-value=6e-85, Identity=69%"; Hit description =Putative uncharacterized protein
SLEKQFKGFTLQHIEXSKNEQANMLAKAPAKGDLIPSDVFFHTIGTLAMRSXGLQITDDPEGQRIENLIMTKDWRAPITLYLQGHYHSTDQAEAKRLKHRSCDFIVIEGQLXEKGMSQPMLKYITVVEGIKLLREVHSGICGSHSGPRALAAKVMRQVLYWPVIACAANCVVRSCEACXKFSPQAGAPSXFTKLITHTWPVTXWRLDIFGPLPTA

SEQ ID NO: 8413 - protein, 74 aa, Zea mays
  misc_feature (45)..(45): Xaa can be any naturally occurring amino acid
  Coding DNA Sequence Number=SeqID_2023
  Gene Ontology: Mol. function=transferase activity, transferring glycosyl groups; Biological process=sucrose metabolic process
  Homolog annotation: Hit_ID=A5Y2Y1; Match level="QueryCoverage=78%, HitCoverage=7%, E-value=2e-23, Identity=86%"; Hit description =Putative sucrose synthase
GISAAFCLLLRRHYRTVIEPMTCGLPTIETCHGGPADIIEDGVSXLHIDPYHSDKAANILCNFFDKCKADPSYM

SEQ ID NO: 8414 - protein, 211 aa, Zea mays
  misc_feature (185)..(185): Xaa can be any naturally occurring amino acid
  Coding DNA Sequence Number=SeqID_2024
  Gene Ontology: Mol. function=hydrolase activity
  Homolog annotation: Hit_ID=Q10PD0; Match level="QueryCoverage=88%, HitCoverage=87%, E-value=4e-46, Identity=65%"; Hit description =Purple acid phosphatase 1, putative, expressed
MAKGGAATVILAVVLLCLCHPAKNDGSLSLLVVGDWGRKGACNQSRVAEQMGRRGVAPREKYIANLLKDLDKALKKSTGKWKIAIGHHPMRSVSPHGNTEELLQLLLPILENNGLDFYINGHDPCLEPISSRDSPIQYFPSGGGSRAWRGFFQPNEDKLKFFYDGQGFMSLQLYQDQAEFPFYEXDGNILYQYSQWSLRETYLRPSYVAKE

SEQ ID NO: 8415 - protein, 90 aa, Zea mays
  Coding DNA Sequence Number=SeqID_2025
  Homolog annotation: Hit_ID=P46857; Match level="QueryCoverage=97%, HitCoverage=93%, E-value=8e-29, Identity=64%"; Hit description =Uncharacterized protein yrhB
MITYQNAMDKALDYLNGFDIPVVITLHGRFSEGWFYCYQSKEYLETGEFSAQLVGNAPFIIDKDNGEIHSFGTAYPLDKYLLDYEQQKNE

SEQ ID NO: 8416 - protein, 88 aa, Zea mays
  Coding DNA Sequence Number=SeqID_2026
MDTGKRNCRIDETQRRPSLQLPVPGMMIHDEPRLRPATTRGGKSLLPATSHRHHHPRRIIMGTIDHPVLSAAAIIVLAPGRLAPVLSA

SEQ ID NO: 8417 - protein, 106 aa, Zea mays
  misc_feature (59)..(59): Xaa can be any naturally occurring amino acid
  misc_feature (86)..(86): Xaa can be any naturally occurring amino acid
  Coding DNA Sequence Number=SeqID_2028
  Gene Ontology: Mol. function=tRNA-pseudouridine synthase activity; Biological process=tRNA pseudouridine synthesis
  Homolog annotation: Hit_ID=A8G909; Match level="QueryCoverage=97%, HitCoverage=32%, E-value=6e-21, Identity=50%"; Hit description=tRNA pseudouridine synthase B
  Subcellular localization annotation: CTP_CleavageSite=30; ConfidenceScore=5.20e-01
AGNVHGVFVLHIPQGVSSDHGLQKGKRRFNASNVGKRGALKPIASGMFASCIGIASKFXPNIMDAHLCLRVSVRLGQRTDTHEQGXDIVRMRPVAFIQVDLDAALQ

SEQ ID NO: 8418 - protein, 128 aa, Zea mays
  Coding DNA Sequence Number=SeqID_2029
  Gene Ontology: Mol. function=DNA-directed RNA polymerase activity; Cellular component=flagellum; Biological process=regulation of transcription, DNA-dependent
  Homolog annotation: Hit_ID=UPI00005F87DE; Match level="QueryCoverage =100%, HitCoverage=53%, E-value=1e-42, Identity=64%"; Hit description= COG1191: DNA-directed RNA polymerase specialized sigma subunit
  Pfam annotation: Domain name=Sigma70_r2; Domain location=16-89; Score= 54.4; E_value=3.8e-13; Accession=PF04542.4; Description=Sigma-70 region 2
VNGIYTSSGVENKNDLWKRYGHLVRQEALRLQVRLPASVELDDLIQAGSLGFLSAIDSFDPKKGVAISAYIIQRVRWALMDELRERDWVPRRVRTHATEMAAVIQRLGQQTLSASGVKEIAREMGISL

SEQ ID NO: 8419 - protein, 103 aa, Zea mays
  Coding DNA Sequence Number=SeqID_2030
  Gene Ontology: Mol. function=protein-N(PI)-phosphohistidine-sugar phosphotransferase activity; Cellular component=membrane; Biological process=phosphoenolpyruvate-dependent sugar phosphotransferase system
  Homolog annotation: Hit_ID=UPI00005FA8FE; Match level="QueryCoverage =95%, HitCoverage=91%, E-value=5e-30, Identity=70%"; Hit description =COG1447: Phosphotransferase system cellobiose-specific component IIA
  Pfam annotation: Domain name=PTS_IIA; Domain location=4-99; Score =125.0; E_value=2.1e-34; Accession=PF02255.7; Description=PTS system, LactoseCellobiose specific IIA subunit
EIDESTVMELIIQAGEARSCSMEALRAARRKEWPRADALLSEASEAARPAHRIQTELIGADEGCGKIPVNLIMVHAQDHLMNAMLCRELAEEIIQLRRELAAD

SEQ ID NO: 8420 - protein, 81 aa, Zea mays
  Coding DNA Sequence Number=SeqID_2031
  Gene Ontology: Mol. function=protein transporter activity; Cellular component=cytoplasmic vesicle; Biological process=intracellular protein transport
  Homolog annotation: Hit_ID=A3A4F1; Match level="QueryCoverage=97%, HitCoverage=9%, E-value=6e-32, Identity=79%"; Hit description =Putative uncharacterized protein
  Pfam annotation: Domain name=WD40; Domain location=30-68; Score=50.1; E_value=7.7e-12; Accession=PF00400.22; Description=WD domain, G-beta repeat
GVEYFTGGGGRYLITGCDTQTCKVWDYQTKNCVQTLEGHAHNVSAVCFHPELPIIMTGSEDGTVCLWHSTTYRFYNSQRYR

SEQ ID NO: 8421 - protein, 115 aa, Zea mays
  misc_feature (1)..(80): Xaa can be any naturally occurring amino acid
  Coding DNA Sequence Number=SeqID_2032
XXXXXXXXXXXXXXXXXXXXXXXXXXXXXXXXXXXXXXXXXXXXXXXXXXXXXXXXXXXXXXXXXXXXXXXXXXXXXXXXIPSYSHFTVTCTSRVKPSVQLVAQAKALVHDPEIC

SEQ ID NO: 8422 - protein, 137 aa, Zea mays
  Coding DNA Sequence Number=SeqID_2034
  Gene Ontology: Mol. function=N-acetyltransferase activity; Biological process=metabolic process
  Homolog annotation: Hit_ID=A8GC86; Match level="QueryCoverage=100%, HitCoverage=98%, E-value=1e-36, Identity=52%"; Hit description=GCN5 -related N-acetyltransferase
  Pfam annotation: Domain name=Acetyltransf_1; Domain location=40-116; Score=60.1; E_value=7.6e-15; Accession=PF00583.14; Description =Acetyltransferase (GNAT) family
  Pfam annotation: Domain name=FR47; Domain location=36-120; Score= -7.2; E_value=0.065; Accession=PF08445.1; Description=FR47-like protein
  Pfam module annotation: Pfam domain module=Acetyltransf_1::FR47; Domain location=40-116::36-120
MQLSVTDSVTHQDLDEMRLGLNAFNSRFIDINEMKAIGVFIKDGAGKKLAGLTGSTYGNWLRIDMLWVSDGLRGQGAGSQLIQAAEQEARARGCRYAQVDTASFQARPFYEKLGYTLRFSLDHYPREHQRHYLSKTL

SEQ ID NO: 8423 - protein, 149 aa, Zea mays
  Coding DNA Sequence Number=SeqID_2035
  Gene Ontology: Mol. function=L-seryl-tRNASec selenium transferase activity; Cellular component=cytoplasm; Biological process =selenocysteine incorporation
  Homolog annotation: Hit_ID=A7MND6; Match level="QueryCoverage=53%, HitCoverage=21%, E-value=4e-31, Identity=86%"; Hit description =Putative uncharacterized protein
  Pfam annotation: Domain name=DUF1341; Domain location=81-149; Score= -52.9; E_value=9.3e-07; Accession=PF07071.2; Description=Protein of unknown function (DUF1341)
MVAKMTPFIDNLNTLNGVSARVVWDAAGRDIARAEIKFDEAVTGWPTGELVQALKNGDIAIYFRGYKANEGIIEADVRSGRLCLNVLAGSKQNAQAIWQAAEGHVLVGVLSKNYASNEAAIADMREYAALIDNALSVGLGAGDPNQSAM

SEQ ID NO: 8424 - protein, 114 aa, Zea mays
  misc_feature (33)..(33): Xaa can be any naturally occurring amino acid
  misc_feature (41)..(41): Xaa can be any naturally occurring amino acid
  misc_feature (97)..(97): Xaa can be any naturally occurring amino acid
  Coding DNA Sequence Number=SeqID_2036
  Gene Ontology: Mol. function=oxidoreductase activity, acting on NADH or NADPH; Cellular component=plasma membrane; Biological process =electron transport
  Homolog annotation: Hit_ID=A4W9W8; Match level="QueryCoverage=98%, HitCoverage=16%, E-value=8e-47, Identity=78%"; Hit description =Electron transport complex, RnfABCDGE type, C subunit
  Pfam annotation: Domain name=Complex1_51K; Domain location=1-106; Score=-77.7; E_value=6.3e-07; Accession=PF01512.8; Description =Respiratory-chain NADH dehydrogenase 51 Kd subunit
QLRVIPTKYPSGGAKQLTKILTGREVPHGGRSXDIGVLMQXVGTAWAVKRAIVDGEPITERVVTLTGEAIARPRNVWGRLGTPVSHLLQQVGFTPGXRQMVVMGGPVDGLTLPS

SEQ ID NO: 8425 - protein, 200 aa, Zea mays
  Coding DNA Sequence Number=SeqID_2037
  Gene Ontology: Mol. function=zinc ion binding; Cellular component =nucleus; Biological process=regulation of transcription
  Homolog annotation: Hit_ID=Q8L5E5; Match level="QueryCoverage=63%, HitCoverage=71%, E-value=5e-32, Identity=56%"; Hit description=Dof zinc finger protein
  Pfam annotation: Domain name=zf-Dof; Domain location=37-99; Score =137.7; E_value=3.3e-38; Accession=PF02701.6; Description=Dof domain, zinc finger
MATGDDAVGTRKGGAAGGGGTPTTQTQQQQQQQPPPPPEPGVRCPRCDSPNTKFCYYNNYSLSQPRHFCKTCRRYWTKGGALRNVPVGGGCRKNKRSRSAAAARLSLNLPPEAGADQQEASPGFLGGGGPAADYHQQQANAAVVGMMMTLPRLHVAPAVGQYVPFGEWPSGAAGDVSSGGGHAANGGAAMTVSSGVATSI

SEQ ID NO: 8426 - protein, 151 aa, Zea mays
  Coding DNA Sequence Number=SeqID_2038
  Gene Ontology: Cellular component=integral to membrane
  Homolog annotation: Hit_ID=A9N255; Match level="QueryCoverage=96%, HitCoverage=81%, E-value=5e-57, Identity=73%"; Hit description =Putative uncharacterized protein
MTYQQAGRIAILKRVAGWVIFIPALLSTLISILGFMFKHSEKQPGIDAVMLDFVHVMVDMIKFNTPFLNVFWNNSPVPEFNGGANIGFWLIYILIFVGIALQASGARMWRQARHIKVGIEDQMILDQAKGSEGRTRAQLEEKIHVRATPCC

SEQ ID NO: 8427 - protein, 99 aa, Zea mays
  Coding DNA Sequence Number=SeqID_2039
  Gene Ontology: Mol. function=tetracycline:hydrogen antiporter activity; Cellular component=integral to membrane; Biological process=response to antibiotic
  Homolog annotation: Hit_ID=A7MLV1; Match level="QueryCoverage=94%, HitCoverage=23%, E-value=2e-38, Identity=80%"; Hit description =Putative uncharacterized protein
MLRSIESWKINLISVWFGCFFTGLAISQIIPFLPLYVEELGIRGGNALSIWSGLTFSVTFIFSAAVAPLWGSLADRKGRKLMLLRASFGMGAMILLQAC

SEQ ID NO: 8428 - protein, 90 aa, Zea mays
  Coding DNA Sequence Number=SeqID_2040
  Gene Ontology: Mol. function=hydrolase activity, hydrolyzing O -glycosyl compounds; Cellular component=cytoplasm; Biological process= carbohydrate metabolic process
  Homolog annotation: Hit_ID=A0TUD8; Match level="QueryCoverage=100%, HitCoverage=24%, E-value=1e-33, Identity=82%"; Hit description=Beta -N-acetylhexosaminidase
DDLSMEAAREGGTLTQAADAALAAGCDMVLVCNQPDAAEVVLNELNAQASAESVRRIKRMRARGKALKWDKLIAQPEYVRAQTLLSSALA

SEQ ID NO: 8429 - protein, 146 aa, Zea mays
  Coding DNA Sequence Number=SeqID_2041
GRNIVITRQYGPLTFILFHLDGEGTPNQTCKTTARASLLGAACLLITRRTDGGAWKDPSVGPLGMSLGDLAPPVFGEEVAAPVLGGALVRGHGDPFFAGGGPLGEEVVEGPHPRPGGALAEPTLFFCRRPCRSFGHGRKNQKGLEN

SEQ ID NO: 8430 - protein, 107 aa, Zea mays
  Coding DNA Sequence Number=SeqID_2042
  Gene Ontology: Mol. function=sequence-specific DNA binding; Cellular component=nucleus; Biological process=regulation of transcription, DNA-dependent
  Homolog annotation: Hit_ID=Q2RAA7; Match level="QueryCoverage=87%, HitCoverage=13%, E-value=3e-16, Identity=52%"; Hit description =Associated with HOX family protein, expressed
  Pfam annotation: Domain name=POX; Domain location=1-66; Score=23.8; E_ value=3.9e-09; Accession=PF07526.2; Description=Associated with HOX
MTETDTVVCRQRWQVEQRYQQYHGQMQAVSASFDAAAGAGSSRTYTVLALRTISRQFRCLRDAIAAQVRAASRALGEDADAALAGGRTVGSRLRYIDHQLRQQRALQ

SEQ ID NO: 8431 - protein, 93 aa, Zea mays
  Coding DNA Sequence Number=SeqID_2043
MLNQPLGYTQHSFRHSDGKKFIHRMHFFPILFGRLFYDKLDLEFFILVGADHVADQVGPTFHPRGLLVVNATEYYVMIFIRFFHFYFQSNTSA

SEQ ID NO: 8432 - protein, 77 aa, Zea mays
  Coding DNA Sequence Number=SeqID_2045
  Gene Ontology: Mol. function=diphosphate-fructose-6-phosphate 1 -phosphotransferase activity; Cellular component=6-phosphofructokinase complex; Biological process=glycolysis
  Homolog annotation: Hit_ID=Q41141; Match level="QueryCoverage=94%, HitCoverage=13%, E-value=1e-26, Identity=79%"; Hit description =Pyrophosphate--fructose 6-phosphate 1-phosphotransferase subunit beta
ILLHRSRNLKTRVIGCPKTIDGDLKCKEVPTSFGFDTACKIYSEMIGNVMTDARSTGKYYHCNSDAGSPGSEAGSDC

SEQ ID NO: 8433 - protein, 131 aa, Zea mays
  Coding DNA Sequence Number=SeqID_2046
  Gene Ontology: Mol. function=oxidoreductase activity, acting on CH-OH group of donors; Cellular component=plasma membrane; Biological process=electron transport
  Homolog annotation: Hit_ID=A8I8Y2; Match level="QueryCoverage=63%, HitCoverage=14%, E-value=6e-27, Identity=66%"; Hit description=GMC oxidoreductase
MSMSFLPMGADFDLTKYVSTHNVGGAVMGDNPKTSALNKYLQSWDVHNVFVPGGNAFPQNFQANPTDTIGAITLMAAQAIKEHYLQNPGPLAQAADDASLIKKGEYLARLGDCMACHTVAGKADYAGGLAI

SEQ ID NO: 8434 - protein, 146 aa, Zea mays
  misc_feature (23)..(23): Xaa can be any naturally occurring amino acid
  misc_feature (27)..(27): Xaa can be any naturally occurring amino acid
  misc_feature (76)..(76): Xaa can be any naturally occurring amino acid
  Coding DNA Sequence Number=SeqID_2047
  Gene Ontology: Mol. function=lyase activity
  Homolog annotation: Hit_ID=A0QM80; Match level="QueryCoverage=100%, HitCoverage=47%, E-value=2e-49, Identity=66%"; Hit description =Putative uncharacterized protein
  Pfam annotation: Domain name=AHS2; Domain location=3-147; Score= -25.7; E_value=4.3e-09; Accession=PF02626.6; Description=Allophanate hydrolase subunit 2
LIIGEHTAEVPELDHALVAAIAXGPVXELLVVPVPRDYWLVDPDALVHTEWIVTHRRDRVGMLLNGRTLLHRWPDXRELSSEGTTRGAIEVPPNGLPVILGPDHPVTGGYPVIGVVADHDIDKVGQIRPGQHVRMHWSRPRQPFGA

SEQ ID NO: 8435 - protein, 146 aa, Zea mays
  misc_feature (45)..(45): Xaa can be any naturally occurring amino acid
  misc_feature (92)..(92): Xaa can be any naturally occurring amino acid
  Coding DNA Sequence Number=SeqID_2048
  Gene Ontology: Mol. function=sequence-specific DNA binding; Cellular component=nucleus; Biological process=regulation of transcription, DNA-dependent
  Homolog annotation: Hit_ID=Q40702; Match level="QueryCoverage=100%, HitCoverage=70%, E-value=2e-26, Identity=49%"; Hit description=MADS -box transcription factor 2
TSLSTILEKYQTNSGKIPWDEKRKVILEKISRASAPNSKTALALXMTLGEEPFFRPFGTASRRAEKRATESPDKGGLSCQFNSESETRKLAXATISLHYLQHQQDIALSGSMGDLELGYHTDRDLAAQMPITFRMQPSHPNLQDNN

SEQ ID NO: 8436 - protein, 113 aa, Zea mays
  Coding DNA Sequence Number=SeqID_2049
  Gene Ontology: Mol. function=structural constituent of ribosome; Cellular component=ribonucleoprotein complex; Biological process =translation
  Homolog annotation: Hit_ID=O48558; Match level="QueryCoverage=87%, HitCoverage=87%, E-value=4e-50, Identity=97%"; Hit description=60S ribosomal protein L30
  Pfam annotation: Domain name=Ribosomal_L7Ae; Domain location=16-107; Score=102.4; E_value=1.4e-27; Accession=PF01248.16; Description =Ribosomal protein L7AeL30eS12eGadd45 family
MVYKRLLNQYMLYGNNKLQPIVMKSGKYTLGYKTVLRTLRNSKSKLVIIANNCPPLRKSEIEYYAMLAKVTVHHFHGNNVDLGTACGKYFRVCCLSIIDPGDSDIIKTTPGEQ

SEQ ID NO: 8437 - protein, 66 aa, Zea mays
  Coding DNA Sequence Number=SeqID_2050
  Gene Ontology: Mol. function=protein serine/threonine kinase activity; Biological process=protein amino acid phosphorylation
  Homolog annotation: Hit_ID=Q336M2; Match level="QueryCoverage=75%, HitCoverage=10%, E-value=2e-19, Identity=90%"; Hit description =Cyclin-dependent kinase E-1
MLKPSYFRMDPLPGRNALLPSQPGEKIVQYPIRPVDTTTDFEGTTSLQPTQPVTHLFLTPYFPYLV

SEQ ID NO: 8438 - protein, 71 aa, Zea mays
  Coding DNA Sequence Number=SeqID_2051
VIIFIHTPPVKITAALVLWSISLPTEMGSLRTVLIAATKVPATVSEPRVAWCTCEAAVKQGRASGSTISRL

SEQ ID NO: 8439 - protein, 72 aa, Zea mays
  Coding DNA Sequence Number=SeqID_2053
  Homolog annotation: Hit_ID=A9PCJ8; Match level="QueryCoverage=100%, HitCoverage=66%, E-value=2e-25, Identity=72%"; Hit description =Putative uncharacterized protein
HYIARVCQDTSKKSPMELINEVPPIKVDGRIAVCEGGRRVGLGHPIEYICLDLEAPNVCKYCGLRYVQVHHH

SEQ ID NO: 8440 - protein, 177 aa, Zea mays
  misc_feature (99)..(99): Xaa can be any naturally occurring amino acid
  misc_feature (134)..(134): Xaa can be any naturally occurring amino acid
  misc_feature (142)..(142): Xaa can be any naturally occurring amino acid
  Coding DNA Sequence Number=SeqID_2054
  Gene Ontology: Mol. function=diacylglycerol kinase activity; Cellular component=nucleus; Biological process=activation of protein kinase C
  Homolog annotation: Hit_ID=Q69XF8; Match level="QueryCoverage=90%, HitCoverage=38%, E-value=7e-58, Identity=57%"; Hit description =Pentatricopeptide (PPR) repeat-containing protein-like
  Pfam annotation: Domain name=PPR; Domain location=56-90; Score=44.8; E_value=3.1e-10; Accession=PF01535.11; Description=PPR repeat
  Pfam annotation: Domain name=PPR; Domain location=92-126; Score=8.3; E_value=0.81; Accession=PF01535.11; Description=PPR repeat
  Pfam module annotation: Pfam domain module=PPR::PPR; Domain location =56-90::92-126
SRPAVKLGKEIHYRSMRMRGCGDVIVESALVDLYAKCGAVDYAYRVFKMSSVRNMITWNAMICGCAQNGHGERTISLFNEMVRGGVKPDYMSFIGVLFXACSHTGMVEEGRNYFNSMSKDYGIPPSIEHYNCIXDLLSGVEXLAPINNAITRSDARKHTKLWSASAFFMTDATGLMT

SEQ ID NO: 8441 - protein, 244 aa, Zea mays
  Coding DNA Sequence Number=SeqID_2055
  Gene Ontology: Mol. function=hydrolase activity, hydrolyzing O -glycosyl compounds; Biological process=carbohydrate metabolic process
  Homolog annotation: Hit_ID=Q1IUL9; Match level="QueryCoverage=98%, HitCoverage=38%, E-value=9e-57, Identity=47%"; Hit description =Glycoside hydrolase, family 9 precursor
TPGRYVLQTTSSDGDVRSGPFIIGADLLERYTLSDVIAYFKSQRVTGLFDKADRKLPLPPGTGSGTVDVHGGWYDATGDYGVHLSHQNLTSYFNPQQAPLVAWSLLRGYQNLGARDNPNFDEYRRRMLDEGLYGADFLVRMKRPGESFFQAISSPGKEKLAQDRVIANPNWRTQIKEKESDSTIVEEEAVGPLAWQASFRSGAGMSIAALALASTMENDGNFTRQQYLQTAEDAFAFLQVENRG

SEQ ID NO: 8442 - protein, 90 aa, Zea mays
  Coding DNA Sequence Number=SeqID_2056
RAGPAQPHRARHAPLARATRKMAHKAPNVRVGERGGKAAHSGINQGDRYDDSEEEVTKPGAAPREGHPGDQEVGTKKASQAAHGEGDPRS

SEQ ID NO: 8443 - protein, 76 aa, Zea mays
  misc_feature (35)..(36): Xaa can be any naturally occurring amino acid
  Coding DNA Sequence Number=SeqID_2058
  Gene Ontology: Mol. function=transferase activity, transferring phosphorus-containing groups; Cellular component=integral to membrane; Biological process=two-component signal transduction system (phosphorelay)
  Homolog annotation: Hit_ID=A6BT36; Match level="QueryCoverage=77%, HitCoverage=6%, E-value=7e-20, Identity=76%"; Hit description=Sensor protein
DVTMSNMDGYRLTQRLRQLGHAFPVIGVTANALSXXNQRCMDAGMDNCLSKPVTLDVLKHHGWLVYTVYGTRNPGR

SEQ ID NO: 8444 - protein, 78 aa, Zea mays
  Coding DNA Sequence Number=SeqID_2059
  Gene Ontology: Mol. function=hydrolase activity, acting on ester bonds; Biological process=lipid metabolic process
  Homolog annotation: Hit_ID=A2Y1J1; Match level="QueryCoverage=98%, HitCoverage=21%, E-value=2e-18, Identity=55%"; Hit description =Putative uncharacterized protein
PQVVDIVPSAENFGLNYGLKFSCGPAGKGSYNYYNKARAGLAGSTPSGNPKNSLWWNGFILTKAAYGSLGIGWLKGTY

SEQ ID NO: 8445 - protein, 71 aa, Zea mays
  Coding DNA Sequence Number=SeqID_2060
  Gene Ontology: Mol. function=nucleic acid binding; Cellular component= spliceosome; Biological process=mRNA processing
  Homolog annotation: Hit_ID=A7NYL7; Match level="QueryCoverage=80%, HitCoverage=12%, E-value=4e-17, Identity=71%"; Hit description =Chromosome chr6 scaffold_3, whole genome shotgun sequence
RTTPYYERINKAHVCSFFVRGEYTRGAECPYRQEMPGTGQLPQHNIKNRCYGLDFPLRPTGFQHTDMVPPA

SEQ ID NO: 8446 - protein, 101 aa, Zea mays
  Coding DNA Sequence Number=SeqID_2061
  Gene Ontology: Mol. function=transcription factor activity; Cellular component=intracellular; Biological process=regulation of transcription, DNA-dependent
  Homolog annotation: Hit_ID=A1KC88; Match level="QueryCoverage=96%, HitCoverage=37%, E-value=4e-22, Identity=55%"; Hit description =Putative glycerol-3-phosphate regulon repressor
  Pfam annotation: Domain name=DeoR; Domain location=3-89; Score=-46.9; E_value=0.007; Accession=PF00455.13; Description=Bacterial regulatory proteins, deoR family
MMMAGAQQTRGEMTVGEIYRYRADVALLSPVGIDARNGASSFHPHEAAIAHAMVQQASRTLLLADHSKLGVISRTQYAPVGDIDLLICDGGAAKPGALSAL

SEQ ID NO: 8447 - protein, 106 aa, Zea mays
  Coding DNA Sequence Number=SeqID_2062
  Gene Ontology: Mol. function=hydrolase activity, hydrolyzing O -glycosyl compounds; Biological process=carbohydrate metabolic process
  Homolog annotation: Hit_ID=UPI00006A1C3E; Match level="QueryCoverage =81%, HitCoverage=83%, E-value=4e-11, Identity=47%"; Hit description =UPI00006A1C3E related cluster
SSGNNAEYAGSSGPTAEDAGGRGPDAESAGSSGNNAEDAGNSGNHAEDAGSSGNNAQDAGSSGNNPEYAGSSGNNAEFAGRVVQRRVRGEMRCSAPPPRPFPFFIF

SEQ ID NO: 8448 - protein, 187 aa, Zea mays
  Coding DNA Sequence Number=SeqID_2063
  Gene Ontology: Mol. function=alcohol dehydrogenase activity; Cellular component=membrane; Biological process=electron transport
  Homolog annotation: Hit_ID=A9BZ37; Match level="QueryCoverage=95%, HitCoverage=24%, E-value=5e-51, Identity=53%"; Hit description =Gluconate 2-dehydrogenase
YPAMPYPDYAKISDEDLHALYVYFMQGVKPDSAQPPETKLSFPFSQRWGMRFWNWAFTLDKPFQPIGGASAQVNRGAYIVESLGHCGSCHTPRGLGMNEKALDSSDDRFLAGGSLNNWEVPSLRGVPRWSEQEIVDYLQTGRNDKAAVGGEMTSVVEHSSSHMTDADLQAIAAYLKFLGGKPPLQAC

SEQ ID NO: 8449 - protein, 506 aa, Zea mays
  Coding DNA Sequence Number=SeqID_2064
  Gene Ontology: Mol. function=hydrolase activity, hydrolyzing O -glycosyl compounds; Cellular component=extracellular region; Biological process=cell wall organization and biogenesis
  Homolog annotation: Hit_ID=Q7XTH4; Match level="QueryCoverage=93%, HitCoverage=92%, E-value=0.0, Identity=71%"; Hit description =Endoglucanase 11 precursor
  Pfam annotation: Domain name=Glyco_hydro_9; Domain location=37-502; Score=767.0; E_value=1.2e-227; Accession=PF00759.9; Description =Glycosyl hydrolase family 9
MTRPAPPSSQALVLLAAVAVSLLLSRSSHVAAGGHPDYADALAKAILFFQGQRSGQLPPDQAVTWRSNSGLSDGSAANSLYLSVDVRARQVDLTGGYYDGGDNAKFGFPMAFTTTMLSWSVLEHGGRMKARVRDARAAVRWGADYLLKAATQTPGRLYVGVGDPGADHRCWERPEDMDTPRTVYWVSASAPGSDVAAETAAALAAASMVFRAADRAYSRRLLAAARGVMELAVQHQGRYSDFVGGDVGAYYQSYSGYKDELLWGSAWLLWATNSSSYLTYLYYLGDNDGVDMFSWDNKLAGARVLLSRRALVNGDTRLEPFRQQAEDFFCRILRDSPSSTTQYTPGGLMHKSGYANLQYVTSASFLLTTYAKYMAATKHTFSCQGLPVTATSLRALAKQQVDYILGANPQGMSYMVDFGVRWPQRIHHRASSLPSVASHPAHIGCQEGFQSYFYSSGANPNVHTGAVVGGPDEHDEFPDDRADYARSEPTTYTNAPLVGCLAYLAG

SEQ ID NO: 8450 - protein, 224 aa, Zea mays
  Coding DNA Sequence Number=SeqID_2065
  Gene Ontology: Mol. function=siderophore-iron transmembrane transporter activity; Cellular component=cell outer membrane; Biological process=siderophore transport
  Homolog annotation: Hit_ID=Q8ZQ10; Match level="QueryCoverage=98%, HitCoverage=30%, E-value=3e-80, Identity=62%"; Hit description=Outer membrane receptor for Fe(III)-coprogen
QSLNDVLSNTTGIHGVAADMDRINYYSRGFLIDNYMTDGIPTAFAQRWNLGDAQTDTALYERVEVVRGATGLLTGPGNPSAAINMVRKHADSKEFTGSLEAGYGSWNKQRYVADLSAPLSPEGNVRGRLVAGYEDKNSFIERYGADKKFIYGVVDADVTDATRLSVGYEFSQVNTDSPMWGGAPRWYTDGTQIHSRRGYNTAPEWAYNNKENKKVFVNLQVDSR

SEQ ID NO: 8451 - protein, 153 aa, Zea mays
  Coding DNA Sequence Number=SeqID_2066
  Gene Ontology: Mol. function=transcription factor activity; Biological process=regulation of transcription, DNA-dependent
  Homolog annotation: Hit_ID=Q4UNS4; Match level="QueryCoverage=94%, HitCoverage=47%, E-value=1e-38, Identity=57%"; Hit description =Transcriptional regulator
  Pfam annotation: Domain name=HTH_1; Domain location=2-34; Score=37.9; E_value=3.7e-08; Accession=PF00126.17; Description=Bacterial regulatory helix-turn-helix protein, lysR family
RSSLSHLVKTLEHNLGVQLFQRTTRSVSLTDAGEQLLQRLAPLLNQMDEVLHDVSLSRQQQYGTLRISASDVVIGLLLDQVVPEFSARYPGIQLDLSAQGALVDITAAGFDAGIRLIEDVPQDMVDIALGGPLTFVTVASPDYLAAHAPVRRP

SEQ ID NO: 8452 - protein, 151 aa, Zea mays
  Coding DNA Sequence Number=SeqID_2067
  Gene Ontology: Mol. function=hydrolase activity, acting on carbon -nitrogen (but not peptide) bonds; Cellular component=cytoplasm
  Homolog annotation: Hit_ID=A8G7W6; Match level="QueryCoverage=92%, HitCoverage=29%, E-value=3e-53, Identity=72%"; Hit description =Amidohydrolase 3 precursor
CSWRWPNHHGVRCEIVAFPQHGMLHSQVDGLMREAMQLGVQYVGGLDPTNVDGAMQASLDAMFRIALDYDRGVDIHLHETSAAGVAAIQYMIATIARNPQLKGKVTLSHGFALATLEGKALDEIIAGMAEQQMSVASTIPIGKLTMPLPQL

SEQ ID NO: 8453 - protein, 199 aa, Zea mays
  Coding DNA Sequence Number=SeqID_2068
  Gene Ontology: Cellular component=outer membrane
  Homolog annotation: Hit_ID=A7MND8; Match level="QueryCoverage=98%, HitCoverage=34%, E-value=6e-73, Identity=68%"; Hit description =Putative uncharacterized protein
  Pfam annotation: Domain name=Surf_Ag_VNR; Domain location=143-198; Score=25.3; E_value=0.00023; Accession=PF07244.5; Description =Surface antigen variable number repeat
DEVSNDGRFQARVAAAIKEGLRALGYYEPQIDFESRPAPPQGGRPVLIARVTAGEPVKIGGSTIVVEGAAKDDPDYQAWVKQGRPKVGSQLNHGDYDKFKNGFSSLALRNGYFDGDFKQSQLGVSVERRLAFWDIDYDSGPRYRFGDVSFEGSQINEAYLRNLVPFKKGDPYSSRDLAELNRRLSATGWFNSVVVAPGV

SEQ ID NO: 8454 - protein, 73 aa, Zea mays
  Coding DNA Sequence Number=SeqID_2069
  Subcellular localization annotation: CTP_CleavageSite=28; ConfidenceScore=5.18e-01
GAAAAIGKRDAGRSGLAQKVGMASASPRSATVAAGSYRCDNNTASLPAWWAQGGPEHCLVAACVCHEPTTRFI

SEQ ID NO: 8455 - protein, 136 aa, Zea mays
  misc_feature (48)..(48): Xaa can be any naturally occurring amino acid
  Coding DNA Sequence Number=SeqID_2071
  Gene Ontology: Mol. function=rRNA methyltransferase activity; Biological process=regulation of transcription, DNA-dependent
  Homolog annotation: Hit_ID=A7MPE7; Match level="QueryCoverage=100%, HitCoverage=31%, E-value=4e-42, Identity=64%"; Hit description =Putative uncharacterized protein
  Pfam annotation: Domain name=Nol1_Nop2_Fmu; Domain location=11-136; Score=-68.0; E_value=0.0013; Accession=PF01189.8; Description =NOL1NOP2sun family
QTASSEQWHHIVVGSNHPRTMWMRVNRQHHSRDAWLALLSQQNQNALXGDAPDALSLQAPAPVSQLPGFQQGWVTVQDLSAQRCALLLAPEIGETILDLCAAPGGKTTHILEIAPQARVMAVDIDAQRLSRVTENL

SEQ ID NO: 8456 - protein, 124 aa, Zea mays
  Coding DNA Sequence Number=SeqID_2072
  Gene Ontology: Mol. function=hydrolase activity; Cellular component =membrane; Biological process=proton transport
  Homolog annotation: Hit_ID=A2WWQ1; Match level="QueryCoverage=62%, HitCoverage=9%, E-value=9e-30, Identity=80%"; Hit description =Putative uncharacterized protein
VKRCAEMSRKLKFFSDQINRAGLRSSVRPALEPDIDLEELEARLGEHEHELLEMNTNSDKLKQTYNELLEFKLVLSKVVSHSCDLIVLLIHYFSLLSIKCFIKQHLAGRSHPCFFSQPCSFKKI

SEQ ID NO: 8457 - protein, 208 aa, Zea mays
  Coding DNA Sequence Number=SeqID_2073
  Gene Ontology: Mol. function=succinate-semialdehyde dehydrogenase [NAD(P)+] activity; Cellular component=mitochondrial matrix; Biological process=metabolic process
  Homolog annotation: Hit_ID=A6V9J9; Match level="QueryCoverage=95%, HitCoverage=40%, E-value=1e-83, Identity=79%"; Hit description =Succinate-semialdehyde dehydrogenase [NADP+]
  Pfam annotation: Domain name=Aldedh; Domain location=1-208; Score= -33.3; E_value=4e-12; Accession=PF00171.12; Description=Aldehyde dehydrogenase family
RRLNGQTIPSHIPGAQLSTLKEPVGVCALLTPWNFPSAMITRKAAAALAAGCTVVVKPAHETPFSALALAQLAEDAGFPPGVFNVVIGEPQMAMETLVRDSRVRAVSFTGSTRVGKLVLQAAAQDVKKVALELGGNAPFIVCADADLELAVRVAVAAKFQTSGQDCCAANRIMVQRPLYEAFLARFAQAVRALKVGPAKVEGEETATE

SEQ ID NO: 8458 - protein, 116 aa, Zea mays
  misc_feature (34)..(34): Xaa can be any naturally occurring amino acid
  misc_feature (79)..(79): Xaa can be any naturally occurring amino acid
  Coding DNA Sequence Number=SeqID_2074
  Gene Ontology: Cellular component=integral to membrane; Biological process=regulation of cell shape
  Homolog annotation: Hit_ID=A4THD1; Match level="QueryCoverage=100%, HitCoverage=70%, E-value=5e-18, Identity=44%"; Hit description=Rod shape-determining protein MreD
  Pfam annotation: Domain name=MreD; Domain location=1-116; Score=0.9; E_value=0.00035; Accession=PF04093.3; Description=rod shape -determining protein MreD
YRSQGRWVIWLSFLVALILQIMPWPDQIYMFRPXWLLLILIYWVLALPAPGSNVGHGFFLGPHNDFVPGFNLGVGSLAXTILPILLPFKFKLFPILAFCHQPLMVMVLSLPVNVIV

SEQ ID NO: 8459 - protein, 159 aa, Zea mays
  Coding DNA Sequence Number=SeqID_2075
  Gene Ontology: Mol. function=shikimate 5-dehydrogenase activity; Cellular component=cytoplasm; Biological process=aromatic amino acid family biosynthetic process
  Homolog annotation: Hit_ID=A8GKG0; Match level="QueryCoverage=98%, HitCoverage=57%, E-value=1e-56, Identity=67%"; Hit description =Shikimate dehydrogenase
  Pfam annotation: Domain name=Shikimate_DH; Domain location=3-110; Score=72.7; E_value=1.2e-18; Accession=PF01488.10; Description =Shikimate  quinate 5-dehydrogenase
QLIRPGDRILLVGADGTARGVILPLLSTGCALVVVNRTAERAQQLAELFQHSGAIQAMSFDQLAGDRFDLIINATSSGVAGDVPPLPVTLIDAQVRCYDMFYQQGLTPFLAWCQQHGTQQLADGLGMLVGQAAHAFQLWHGVMPEIAPVIDQLKQAMQA

SEQ ID NO: 8460 - protein, 93 aa, Zea mays
  Coding DNA Sequence Number=SeqID_2076
  Gene Ontology: Mol. function=binding; Cellular component =mitochondrial inner membrane; Biological process=transport
  Homolog annotation: Hit_ID=Q10QM8; Match level="QueryCoverage=100%, HitCoverage=22%, E-value=7e-36, Identity=80%"; Hit description =Mitochondrial carrier protein, expressed
  Pfam annotation: Domain name=Mito_carr; Domain location=11-93; Score =30.1; E_value=4.9e-06; Accession=PF00153.17; Description =Mitochondrial carrier protein
LLKWSGNEESANFERFIAGAFAGVTTTIMCIPMDTIMTKMDAPGGEAIRGVIGVARHMIQTEGFFSLDNGLMPSLISMASSGDAFYGVYGILK

SEQ ID NO: 8461 - protein, 163 aa, Zea mays
  misc_feature (24)..(24): Xaa can be any naturally occurring amino acid
  misc_feature (30)..(30): Xaa can be any naturally occurring amino acid
  misc_feature (111)..(111): Xaa can be any naturally occurring amino acid
  Coding DNA Sequence Number=SeqID_2077
  Gene Ontology: Mol. function=unfolded protein binding; Cellular component=plasma membrane; Biological process=response to stress
  Homolog annotation: Hit_ID=P71331; Match level="QueryCoverage=99%, HitCoverage=25%, E-value=3e-38, Identity=58%"; Hit description =Chaperone protein dnaK
ATKDAPRIEGLDVKHSSKEQTETXLADGLXRGQGNRTIPEDDLGGGTFDKAIMEINEENREKTLEELATDGDTQPRGEDVNSRLSNCLCDASKKHPAHRPDNNALAMHRLXKKADQKAKNEPVSAQQTDVNLPYIAGEATGTKHQTIKGTRAKLEPLGEDQVT

SEQ ID NO: 8462 - protein, 75 aa, Zea mays
  Coding DNA Sequence Number=SeqID_2078
  Homolog annotation: Hit_ID=A2ZQ47; Match level="QueryCoverage=98%, HitCoverage=4%, E-value=1e-12, Identity=50%"; Hit description =Putative uncharacterized protein
TLNNTTATNLGCRTGVGQGKMLSRGICGGGGHGGKGGDGFYKGNLAEGGAIYGNADLPCELGSGSGNDFTEVSTR

SEQ ID NO: 8463 - protein, 166 aa, Zea mays
  Coding DNA Sequence Number=SeqID_2079
  Homolog annotation: Hit_ID=A8AM24; Match level="QueryCoverage=100%, HitCoverage=37%, E-value=2e-32, Identity=46%"; Hit description =Putative uncharacterized protein
SAQQQDSRSKNKRHDQPPDAAEQQRLRLLHKPGTRENNALQMARGLKREHPIKAKVLPTEWLGEHSAEQVANAEDSKLEEEARDQGHENRLGNNRAEQRLIERLKNDPEMAERAETNKHWPKEDESSNPYIGELRQDQRRRLKSDPNGDNTREQERERPAALRQGE

SEQ ID NO: 8464 - protein, 82 aa, Zea mays
  Coding DNA Sequence Number=SeqID_2080
  Gene Ontology: Mol. function=methyltransferase activity; Biological process=porphyrin biosynthetic process
  Homolog annotation: Hit_ID=A1JJS8; Match level="QueryCoverage=95%, HitCoverage=16%, E-value=9e-14, Identity=55%"; Hit description =Siroheme synthase
MGTVKAAEIAAGLIEHGRAPSTPVAVIGRGTRQDQQVLTGTLAQLEALAAAAPTPALLVIGEVVNLHGQLAWFQHSAQQGTR

SEQ ID NO: 8465 - protein, 160 aa, Zea mays
  misc_feature (44)..(44): Xaa can be any naturally occurring amino acid
  Coding DNA Sequence Number=SeqID_2081
  Gene Ontology: Mol. function=catalytic activity; Cellular component =cytoplasm; Biological process=metabolic process
  Homolog annotation: Hit_ID=A8GD73; Match level="QueryCoverage=81%, HitCoverage=46%, E-value=1e-59, Identity=87%"; Hit description =Deoxyribose-phosphate aldolase/phospho-2-dehydro-3-deoxyheptonate aldolase
MPLMVEPLVMAPAGQGAAYGSLGDVRQIVPLVRLARELGADIIXADPTDNVEDFHRVVEAARCPTLVRGGGKGELGAVLAKSAALMAQGASGMVYGRNVYQHDNPSRVVSALMAIIHQGVSGADALDIYQQAECAGETHQPQEGFAERPVEDIWRGVSNA

SEQ ID NO: 8466 - protein, 168 aa, Zea mays
  misc_feature (57)..(57): Xaa can be any naturally occurring amino acid
  Coding DNA Sequence Number=SeqID_2082
  Gene Ontology: Mol. function=transcription factor activity; Cellular component=nucleus; Biological process=regulation of transcription, DNA-dependent
  Homolog annotation: Hit_ID=Q10R18; Match level="QueryCoverage=54%, HitCoverage=30%, E-value=3e-32, Identity=73%"; Hit description=AP2 domain containing protein
  Pfam annotation: Domain name=AP2; Domain location=48-101; Score=30.2; E_value=7.5e-06; Accession=PF00847.10; Description=AP2 domain
  Subcellular localization annotation: CTP_CleavageSite=17; ConfidenceScore=5.30e-01
IHPWSTPAGSPSSKAPSCSRAHGQALGRRLQHPAQGRAWKKGPTRGKGGPQNAACAXEDVGKWVAEIREPNKRTRLWLGSFATTEQAALAYDEAARRLYDPDAFLNLSHLRAFTPTLHTTATSLPSSSKSRQPPPHVLQRKSQDVRDQITRSCELVADCYRVRSRRTV

SEQ ID NO: 8467 - protein, 95 aa, Zea mays
  Coding DNA Sequence Number=SeqID_2083
  Gene Ontology: Mol. function=protein phosphatase type 2A regulator activity; Cellular component=protein phosphatase type 2A complex; Biological process=signal transduction
  Homolog annotation: Hit_ID=A2X5T4; Match level="QueryCoverage=96%, HitCoverage=18%, E-value=4e-30, Identity=65%"; Hit description =Putative uncharacterized protein
  Pfam annotation: Domain name=WD40; Domain location=29-68; Score=27.9; E_value=3.7e-05; Accession=PF00400.22; Description=WD domain, G-beta repeat
LQYLLTSSKDKTVRLWKPGCDGCLAVFKHKDYGKQNIKLITVTCVQFNPIDEKYFISGSVDGKVRIWDVLDKRVTDWADTRNIITDLSYQPDGKV

SEQ ID NO: 8468 - protein, 127 aa, Zea mays
  misc_feature (28)..(28): Xaa can be any naturally occurring amino acid
  misc_feature (42)..(42): Xaa can be any naturally occurring amino acid
  misc_feature (85)..(85): Xaa can be any naturally occurring amino acid
  Coding DNA Sequence Number=SeqID_2084
  Gene Ontology: Mol. function=methionine adenosyltransferase activity; Cellular component=phagocytic vesicle; Biological process=one-carbon compound metabolic process
  Homolog annotation: Hit_ID=P24260; Match level="QueryCoverage=97%, HitCoverage=31%, E-value=2e-17, Identity=42%"; Hit description=S -adenosylmethionine synthetase 2
  Pfam annotation: Domain name=S-AdoMet_synt_M; Domain location=3-118; Score=-1.4; E_value=2.8e-06; Accession=PF02772.6; Description=S -adenosylmethionine synthetase, cent
RPGLIYGYTSDETPYLMPLNRVLATIVXPRLTEDRMDSTCAXIMPDGLTACTVCYLERRHRHGAYTRAHRANILPARLDRLQRLXIGAHLLVDFLNPGIPDRDLYDKTVFHLNNTVCLKIGGPHGDP

SEQ ID NO: 8469 - protein, 90 aa, Zea mays
  Coding DNA Sequence Number=SeqID_2085
LLIVGPVAPQDTVVEGVAPTEAEIAANARAKEVVMLIHLPAGSASLLIVGPVASQDAVVEVVAPTEAEIAANARAKEVAMLIHRPAGSAS

SEQ ID NO: 8470 - protein, 161 aa, Zea mays
  misc_feature (33)..(33): Xaa can be any naturally occurring amino acid
  misc_feature (80)..(80): Xaa can be any naturally occurring amino acid
  misc_feature (113)..(113): Xaa can be any naturally occurring amino acid
  misc_feature (124)..(124): Xaa can be any naturally occurring amino acid
  Coding DNA Sequence Number=SeqID_2087
  Gene Ontology: Mol. function=hydrolase activity, hydrolyzing O -glycosyl compounds; Cellular component=extracellular region; Biological process=carbohydrate metabolic process
  Homolog annotation: Hit_ID=O04139; Match level="QueryCoverage=93%, HitCoverage=48%, E-value=9e-34, Identity=53%"; Hit description=Basic class III chitinase OsChib3b precursor
  Pfam annotation: Domain name=Glyco_hydro_18; Domain location=12-156; Score=-12.5; E_value=1.2e-05; Accession=PF00704.18; Description =Glycosyl hydrolases family 18
CTTFALAELATRVRAGYFALYWGQNINEGMLAXDYATRNYKFVNVAFLPTFGEGQTPAPNLADLYDLASDGCTGMGTDIXACQHMGIKVLLSIGGGVGSYGLSSLADARRASXTYLRNHYLDGXSIFISRPLGDTVLDDVDFNIESGGGMSWDDFDECVSL

SEQ ID NO: 8471 - protein, 116 aa, Zea mays
  Coding DNA Sequence Number=SeqID_2088
  Gene Ontology: Mol. function=phosphoglycolate phosphatase activity; Biological process=carbohydrate metabolic process
  Homolog annotation: Hit_ID=Q6CZR3; Match level="QueryCoverage=100%, HitCoverage=49%, E-value=1e-25, Identity=53%"; Hit description =Phosphoglycolate phosphatase
MAHFTDIRALAFDLDGTLVHSAPGLAQAIDLALADLQLPPAGVERVSTWIGNGADIMMARALSWALGREPQADEQRDARALFDKHYAATVEAGSTLFPQVQETLAALHASGLPLAI

SEQ ID NO: 8472 - protein, 141 aa, Zea mays
  misc_feature (112)..(112): Xaa can be any naturally occurring amino acid
  Coding DNA Sequence Number=SeqID_2089
  Subcellular localization annotation: CTP_CleavageSite=43; ConfidenceScore=5.65e-01
LGPVGSSPAGVACRLPARPVATPVGRCVGVQARFSPAAPRLPRRSSGRGPLRRAREAPPPARPPDGELAPGSVLGAACARTRRRGLRALRCCLPRARVRIQVHQGAVMDHGXLHKDKGAASGIPGARYIAERRPRRPAGGR

SEQ ID NO: 8473 - protein, 158 aa, Zea mays
  Coding DNA Sequence Number=SeqID_2090
  Gene Ontology: Mol. function=structural constituent of cell wall
  Homolog annotation: Hit_ID=A2YQG9; Match level="QueryCoverage=70%, HitCoverage=23%, E-value=2e-25, Identity=52%"; Hit description =Putative uncharacterized protein
PAPHRIIVVFVSLGGLLLLACLAAALLCWHKKKKRRGRKAEEEEAKADVLNFSDHVHVHKQTVPGPAGGASAVRLTVDEDVRLQEAVRKQDAIGESSSTAPWTWHKKHQSGEERKTAVINVTKHKHVDEMIVPGPHGDRVDVLSEDEDIRCEEASESQ

SEQ ID NO: 8474 - protein, 95 aa, Zea mays
  Coding DNA Sequence Number=SeqID_2091
  Gene Ontology: Mol. function=iron ion transmembrane transporter activity; Cellular component=periplasmic space; Biological process =high-affinity iron ion transport
  Homolog annotation: Hit_ID=A7MGS6; Match level="QueryCoverage=75%, HitCoverage=27%, E-value=8e-26, Identity=80%"; Hit description =Putative uncharacterized protein
DKYLLLGLWLLCHSLLAAPRVITLSPHLTELAFAAGITPVAVSAWSDYPAAARQLEQVANWQGIRVERIVQLRPDVVLAWRGGNPLRQGSSCRHA

SEQ ID NO: 8475 - protein, 101 aa, Zea mays
  misc_feature (73)..(73): Xaa can be any naturally occurring amino acid
  Coding DNA Sequence Number=SeqID_2092
  Gene Ontology: Cellular component=integral to membrane
  Homolog annotation: Hit_ID=A3C1C3; Match level="QueryCoverage=100%, HitCoverage=18%, E-value=2e-20, Identity=53%"; Hit description =Putative uncharacterized protein
DGTIPCITLILGGNLTQGGRYFDQNQTQWRSKHVHPLDETMARLRKSGLKRAVIVAIMCVRFVLLPLIGIAVXRAAYELGFLSRDPLYRYMLIAVPPAMNI

SEQ ID NO: 8476 - protein, 164 aa, Zea mays
  Coding DNA Sequence Number=SeqID_2093
  Homolog annotation: Hit_ID=A2WCS0; Match level="QueryCoverage=100%, HitCoverage=46%, E-value=4e-86, Identity=92%"; Hit description=Thiol- disulfide isomerase and thioredoxin
SLLPYLENHGVLTRDSLDPSLKLMPFKDSADYKESLTSYYYRLCEIDDLVCYPWIAQAFAGLSLADLKRHIDAMLADGKPVPIRYWQGDKVVDGTANPPRFFRGMQQLYNALRENGIEVYVMTAAHEELARLVLADPKYGYNVKPQNVIGVTTLLRNPATGALT

SEQ ID NO: 8477 - protein, 176 aa, Zea mays
  misc_feature (170)..(170): Xaa can be any naturally occurring amino acid
  Coding DNA Sequence Number=SeqID_2094
  Gene Ontology: Mol. function=D-sedoheptulose 7-phosphate isomerase activity; Cellular component=cytoplasm; Biological process =lipopolysaccharide core region biosynthetic process
  Homolog annotation: Hit_ID=P66818; Match level="QueryCoverage=61%, HitCoverage=55%, E-value=1e-40, Identity=80%"; Hit description=DnaA initiator-associating protein diaA
  Pfam annotation: Domain name=UPF0102; Domain location=1-63; Score =32.8; E_value=1.3e-06; Accession=PF02021.8; Description =Uncharacterised protein family UPF0102
MRDADCWVFVEVRYRRDARFGGAAASVTRQKQQKLLRTAALWLLARGGSFDTVNCRFDIIAITGRELTQIAAAEALPDAISRAAMTLVQSLLNGNKILSCGNGASAANAQHFAASMINRFETERPSLPALALSADNVMLTAIGNDRLHDEIYAKQVRALGQAGDVLLAIXTRGNTP

SEQ ID NO: 8478 - protein, 55 aa, Zea mays
  Coding DNA Sequence Number=SeqID_2095
MMKKDSTSVTRKQMPSQHEQYESTVHLFIGTGRSPCKITFMSLIFTVDHKACCRG

SEQ ID NO: 8479 - protein, 238 aa, Zea mays
  Coding DNA Sequence Number=SeqID_2097
  Gene Ontology: Mol. function=transcription factor activity; Biological process=regulation of transcription, DNA-dependent
  Homolog annotation: Hit_ID=A7MKN2; Match level="QueryCoverage=100%, HitCoverage=79%, E-value=2e-82, Identity=62%"; Hit description =Putative uncharacterized protein
  Pfam annotation: Domain name=LysR_substrate; Domain location=39-237; Score=141.8; E_value=1.9e-39; Accession=PF03466.10; Description=LysR substrate binding domain
LHRTTRRVHLTQDGLVYYDRCLDLLSMLDDMDSLFQHDPATLSGKLRVDMSVAMATGFILPRLPEFLQHYPGVEIELSSSDRQVDVIREGFDCVLRVGELKDSGLIARKIGSHALINCASPGYLSRFGMPVRLDDLGQHAMVHYTQQLGQPSPGFEYFDGKQCHYVQTGGVVTVNSTETYRAACIAGLGIIQVPAIGVQPLLESGQLVEVLHHFPAKPMPISLLYPHRRNVARRVRVF

SEQ ID NO: 8480 - protein, 147 aa, Zea mays
  Coding DNA Sequence Number=SeqID_2098
  Gene Ontology: Cellular component=membrane
  Homolog annotation: Hit_ID=A7MMA4; Match level="QueryCoverage=53%, HitCoverage=7%, E-value=2e-17, Identity=56%"; Hit description =Putative uncharacterized protein
  Pfam annotation: Domain name=Lectin_N; Domain location=28-141; Score=- 63.3; E_value=0.055; Accession=PF03954.4; Description=Hepatic lectin, N-terminal domain
  Subcellular localization annotation: CTP_CleavageSite=67; ConfidenceScore=5.00e-01
MGRFKLGSTVINLFAPNRVKLAESLEAESKTRLARRQRSAHRLIPGNTAVRASLFLLLSLVLSSTVFAATVPPASQLKQDLETAKSAKSSPSQAEQVQALEAAINFLSERDDSLERAKQYQQVIDDFPRLARELRQQIATLTDSSKP

SEQ ID NO: 8481 - protein, 173 aa, Zea mays
  Coding DNA Sequence Number=SeqID_2099
  Gene Ontology: Mol. function=transferase activity, transferring glycosyl groups; Biological process=metabolic process
  Homolog annotation: Hit_ID=A3AVP2; Match level="QueryCoverage=97%, HitCoverage=86%, E-value=3e-25, Identity=62%"; Hit description =Putative uncharacterized protein
MDEVTLCPKPRFLVIPWPATSHMIPIVDIGCLLAADGAPVTIITTPSSSQLVQSRVDDRAGQAGSADTTVTALPFPAMEAGLPDGCEPWAVPEGVPGSPDRWRLCDKLWVGLDAGERCCGRADGHLAFSAEQFLNEKLAVGVLGIRVSVGVTKPTEGVLTGAKDGGGARAEAD

SEQ ID NO: 8482 - protein, 80 aa, Zea mays
  misc_feature (40)..(40): Xaa can be any naturally occurring amino acid
  Coding DNA Sequence Number=SeqID_2100
  Gene Ontology: Mol. function=ubiquitin thiolesterase activity; Cellular component=nucleus; Biological process=ubiquitin-dependent protein catabolic process
  Homolog annotation: Hit_ID=Q2QQM3; Match level="QueryCoverage=100%, HitCoverage=7%, E-value=2e-26, Identity=71%"; Hit description =Ubiquitin-specific protease 12, putative, expressed
EQIPEEENNLGPHDRLVHVYHFMKDPNQNHQIQNLRDPFXMVIWEGETAAEVMERIQRKLRVHDDELSKLPFLSSYMLRP

SEQ ID NO: 8483 - protein, 95 aa, Zea mays
  Coding DNA Sequence Number=SeqID_2101
  Gene Ontology: Mol. function=N-acetyltransferase activity; Biological process=metabolic process
  Homolog annotation: Hit_ID=Q67UR2; Match level="QueryCoverage=94%, HitCoverage=22%, E-value=1e-18, Identity=54%"; Hit description=GCN5 -related N-acetyltransferase-like
MGVVDEAKPVKKTTIRVREFDVERDPRAVEELERLCQVGLSGDQGSDHPVADHDRGAEKTTRSSKKKKKKGMSLYVEQIGDPFARVRHAPDNIIL

SEQ ID NO: 8484 - protein, 170 aa, Zea mays
  Coding DNA Sequence Number=SeqID_2102
PAAEAGRHAFGGSVARHLAVAVADGLPEMTPLPPRPPQMELFFISHRRSSSGFVHTMQHAYMEEAASKVDDHAPKDKEDAAPASVVEVDAVEQEVADILTNMKRLMRSRDRRDRRRERRERRERRRERERARAAAAVAVPSADSPLAYPQSGGDDAPPKDAADRPRDQIW

SEQ ID NO: 8485 - protein, 127 aa, Zea mays
  Coding DNA Sequence Number=SeqID_2104
DPGRQEQPGAGPRSHQGPVRRTQHDHQLDLETPQTEPQDPDDTHRATKPKTNPAKQTTHDRNSSTARRCGSTTTKGRCSRPKKRPRDRETGGDTTHARTDSPQPKETETENDNTGRRPPTPGEPAQP

SEQ ID NO: 8486 - protein, 108 aa, Zea mays
  misc_feature (15)..(15): Xaa can be any naturally occurring amino acid
  misc_feature (52)..(52): Xaa can be any naturally occurring amino acid
  misc_feature (79)..(79): Xaa can be any naturally occurring amino acid
  Coding DNA Sequence Number=SeqID_2106
  Gene Ontology: Mol. function=nucleotide binding; Cellular component =plasma membrane; Biological process=small GTPase mediated signal transduction
  Homolog annotation: Hit_ID=P40392; Match level="QueryCoverage=99%, HitCoverage=53%, E-value=2e-39, Identity=78%"; Hit description=Ras -related protein RIC1
  Pfam annotation: Domain name=Miro; Domain location=2-102; Score=16.1; E_value=0.00031; Accession=PF08477.3; Description=Miro-like protein
  Pfam annotation: Domain name=Ras; Domain location=5-107; Score=53.8; E_value=1.9e-13; Accession=PF00071.12; Description=Ras family
  Pfam module annotation: Pfam domain module=Miro::Ras; Domain location= 2-102::5-107
ASFLSFTLRDDSYLXESYISTIGVDFKIRTVEQDGKTIKLQIWDTAGKQERXRTSTSSYYRGAHGILVMYDVTDQEIKXWLNEIDRYASENVNKLLVGNKADILSHRM

SEQ ID NO: 8487 - protein, 93 aa, Zea mays
  Coding DNA Sequence Number=SeqID_2107
  Gene Ontology: Biological process=response to stress
  Homolog annotation: Hit_ID=O48673; Match level="QueryCoverage=100%, HitCoverage=90%, E-value=1e-10, Identity=42%"; Hit description=LIP5
MPAFFNRIEGKLNMGGNHKREDDYQRMAEVHHRRGEGELHKMDGGKHMEGVLKKIRDKITVELGNKSGVPMDMMARKRMTEKMKRGEGHHHDG

SEQ ID NO: 8488 - protein, 124 aa, Zea mays
  Coding DNA Sequence Number=SeqID_2108
  Gene Ontology: Mol. function=copper ion binding; Cellular component =periplasmic space; Biological process=response to copper ion
  Homolog annotation: Hit_ID=A7MKH9; Match level="QueryCoverage=95%, HitCoverage=90%, E-value=5e-28, Identity=55%"; Hit description =Putative uncharacterized protein
  Pfam annotation: Domain name=CopC; Domain location=1-124; Score =124.0; E_value=4.3e-34; Accession=PF04234.3; Description=Copper resistance protein CopC
MKTASRRVIALLLAGATLGFSQLALAHAHLKAPVPADNAVVEHAPQQLTLTFTEDIEPAFSGVEMTNAQQQPVALDKAQLNPQQHDQLIVPIAQPLASGQYQVNWHVLSVDGHKTKGSYSFSVK

SEQ ID NO: 8489 - protein, 132 aa, Zea mays
  Coding DNA Sequence Number=SeqID_2109
  Gene Ontology: Mol. function=exodeoxyribonuclease V activity; Cellular component=exodeoxyribonuclease V complex; Biological process=response to DNA damage stimulus
  Homolog annotation: Hit_ID=A7MR17; Match level="QueryCoverage=100%, HitCoverage=11%, E-value=4e-40, Identity=61%"; Hit description =Putative uncharacterized protein
MEADPELKPRDIIVMVADIDSYAPFIQAAFASAPPERYLPFAISDRRASQAHPAILALLSLLALPDSRFASEEVLALLEVPALAQRFSVEESGLRLLRRWVMESGIRWGLDDASVEALALPVTGQHTWRFGL

SEQ ID NO: 8490 - protein, 122 aa, Zea mays
  misc_feature (70)..(70): Xaa can be any naturally occurring amino acid
  misc_feature (93)..(93): Xaa can be any naturally occurring amino acid
  Coding DNA Sequence Number=SeqID_2110
  Gene Ontology: Mol. function=binding; Cellular component=integral to membrane; Biological process=transport
  Homolog annotation: Hit_ID=O80414; Match level="QueryCoverage=100%, HitCoverage=33%, E-value=6e-39, Identity=69%"; Hit description =Mitochondrial phosphate transporter
  Pfam annotation: Domain name=Mito_carr; Domain location=21-104; Score= -7.7; E_value=0.016; Accession=PF00153.17; Description=Mitochondrial carrier protein
VELIYKHAVPVPKCECSKAPQLGISCAGGYMAGVFCASVSHPAENLVSFLTNAKHVTVGHPVKKLGLWGXFTRGLPLRMVKNGTVHGAQWGIXDAFKVMVGITTTGGVTPAPAPKGELQARA

SEQ ID NO: 8491 - protein, 79 aa, Zea mays
  Coding DNA Sequence Number=SeqID_2111
MPALPVMHSANLKTWTTRSAYPDEPPYNSLPGYFKRYNDAMPVGYAAKWAPSSSRASGRSHVGFWEPSVAAGGDYLGVA

SEQ ID NO: 8492 - protein, 64 aa, Zea mays
  misc_feature (41)..(41): Xaa can be any naturally occurring amino acid
  Coding DNA Sequence Number=SeqID_2113
  Gene Ontology: Mol. function=transcription factor activity; Cellular component=nucleus; Biological process=regulation of transcription, DNA-dependent
  Homolog annotation: Hit_ID=Q9SUK8; Match level="QueryCoverage=100%, HitCoverage=35%, E-value=2e-11, Identity=57%"; Hit description =Ethylene-responsive transcription factor ERF039
GVWRTINSRGVRMQHLCKRVPEIRGPRRYFHIWVVTFSTHXMEARAHDMGALSIKGRGKHLNFP

SEQ ID NO: 8493 - protein, 162 aa, Zea mays
  Coding DNA Sequence Number=SeqID_2114
MSGGVDEMRNALNDMEKLAPGLVSALDGLTITPSAGASGFGGTPTGETTPDHPDQPAAPAAPIAPGGPAIAAPPAAAPIDNKQADNPARDLASMLRNAAPNGGMGMPMPQMPQIPNLGSMIPQSLPGAKPAGLDNKELPDDLKAKLADRLQDKDKDKDKKDL

SEQ ID NO: 8494 - protein, 167 aa, Zea mays
  Coding DNA Sequence Number=SeqID_2116
GSRRDLWRPKGTIPNGRPACRTHTSTAVEGAARPWLADKEASSVCEKNPSAPRPVKNTMTNVTHQSEARTPTAEDRAAMTRAPRKKRSALETAATACTNAMTAGQNAMKEPEPKNKNCGNTAPHANMGIQIYLGHCEKNNTPRRNMATRHACSAEPPDRKGLWDRDA

SEQ ID NO: 8495 - protein, 111 aa, Zea mays
  Coding DNA Sequence Number=SeqID_2118
MGAGNQNAVFLGVGDDGQAMAITERGEIKPLSEVAKWDGPHQGFFALPDDGAPVAQVHEASAQQPAAGTPAAPATPAAAPAPSIQDTNAGILPGQTTGNRGLNPESVPPNQ

SEQ ID NO: 8496 - protein, 143 aa, Zea mays
  Coding DNA Sequence Number=SeqID_2120
  Subcellular localization annotation: CTP_CleavageSite=52; ConfidenceScore=5.18e-01
HRCLGTLAGLVSWLLLPLFVKPRFRALGSHGSEPGPAGGGPRSSPALGLGCRSAGRVVFGRPLLRGAEPTPRPSQRRQQQVAPDWDSSGFSSSRCQHRRHVRWVRGHVRASRLLQLDGRLGYEPSRELAPRRLVPPEPPAVER

SEQ ID NO: 8497 - protein, 214 aa, Zea mays
  misc_feature (26)..(26): Xaa can be any naturally occurring amino acid
  Coding DNA Sequence Number=SeqID_2122
  Gene Ontology: Mol. function=transcription factor activity; Cellular component=membrane; Biological process=regulation of transcription, DNA-dependent
  Homolog annotation: Hit_ID=A1FCV2; Match level="QueryCoverage=100%, HitCoverage=72%, E-value=2e-71, Identity=67%"; Hit description =Transcriptional regulator, LysR family
  Pfam annotation: Domain name=LysR_substrate; Domain location=5-210; Score=178.5; E_value=1.7e-50; Accession=PF03466.10; Description=LysR substrate binding domain
IHVLGNLSRGSLRLAVTPTFTTYLVXPLVEAFHSRYPGISLNVREISQENIEEQLLAGELDVGIAFGEVSGQEIDAIPLLDETFALVVSTLHPLAQENSVGLQALSTESLVLLSREFATREQIDRYCLKHGIHPKVLMEADALGAVIEIVRRTRLSTLLPTKTAQAQNNLVAIALEPEHLTRTAVLMRRRDAYQSFAARAFTGLAVEVAAQLNQ

SEQ ID NO: 8498 - protein, 84 aa, Zea mays
  misc_feature (25)..(25): Xaa can be any naturally occurring amino acid
  Coding DNA Sequence Number=SeqID_2123
  Gene Ontology: Mol. function=transcription factor activity; Cellular component=transcription factor complex; Biological process =regulation of transcription, DNA-dependent
  Homolog annotation: Hit_ID=Q6Z5N3; Match level="QueryCoverage=80%, HitCoverage=15%, E-value=4e-17, Identity=63%"; Hit description =Transcription factor-like
RKHGLDGANKPGQRKRVKDWKTLFXSFCPQSKNQALSDLFAHYVDAWKTWYFEFAQGSSFMQQPFGHPDAHFLEANFRANHSSF

SEQ ID NO: 8499 - protein, 94 aa, Zea mays
  Coding DNA Sequence Number=SeqID_2124
IGSHQVLAAEEEGGTLVLNLEAEAWDVAKMMEVDAVVAAEGAELQPKVVTKVEAAAVAKSVGHMGECRFLRPAKNQNGSCLLDIEEAAAVRLVA

SEQ ID NO: 8500 - protein, 120 aa, Zea mays
  Coding DNA Sequence Number=SeqID_2126
  Gene Ontology: Mol. function=nucleotide binding; Cellular component =myosin complex; Biological process=protein amino acid phosphorylation
  Homolog annotation: Hit_ID=A7QVN7; Match level="QueryCoverage=95%, HitCoverage=7%, E-value=3e-56, Identity=94%"; Hit description =Chromosome chr14 scaffold_190, whole genome shotgun sequence
CCTADLQNLKARYELNEIYTYTGNILIAINPFQRLPHIYGAHMMQQYKGAPFGELSPHVFAVADVAYRAMINEKKSNSILVSGESGAGKTETTKMLMQYLAFLGGRAGTEGRTVEQQVLE

SEQ ID NO: 8501 - protein, 136 aa, Zea mays
  Coding DNA Sequence Number=SeqID_2127
  Gene Ontology: Mol. function=metal ion binding; Cellular component =integral to membrane; Biological process=metal ion transport
  Homolog annotation: Hit_ID=UPI00005F7494; Match level="QueryCoverage =100%, HitCoverage=40%, E-value=3e-30, Identity=50%"; Hit description= COG2215: ABC-type uncharacterized transport system, permease component
HHADCGCGHAHLTSAQQLAGAVSGKTHALVVLSMGLRPCSGAIMMLLFAKEIGVYGWSVASALTMALGTALTVSLLGLLVQRSRVLAVRLGRLSNRGTAQWLLPAVMLAGSLLLLVAGFILWHRATPGFGGGQRPF

SEQ ID NO: 8502 - protein, 51 aa, Zea mays
  Coding DNA Sequence Number=SeqID_2128
RTCSSKIGREISKMVDDSHNLSGCIPVKMFWDNSSFTIYAVAQPSNLVSHH

SEQ ID NO: 8503 - protein, 94 aa, Zea mays
  Coding DNA Sequence Number=SeqID_2130
VLQLKVGNAGNPKAQRDAWETDVVSPAARIVGMFLAVEGARDKDKDRFLLTTPKEVGVPGICTATVDWFGQQLNVTVMYASKGYAGLDSETVGV

SEQ ID NO: 8504 - protein, 114 aa, Zea mays
  Coding DNA Sequence Number=SeqID_2132
  Subcellular localization annotation: CTP_CleavageSite=72; ConfidenceScore=5.57e-01
TPGRRGEPLSMCSTRGANNTQETGASRRGRRTCSPRPQRLRVEKGRPPPTAWSGRARGRARPRQARRRRRVRARETGEAKTVDRGRGRVQALGLGDTENGQPGRGGRPALGKGE

SEQ ID NO: 8505 - protein, 203 aa, Zea mays
  Coding DNA Sequence Number=SeqID_2134
  Gene Ontology: Mol. function=sequence-specific DNA binding; Cellular component=intracellular; Biological process=nucleobase, nucleoside, nucleotide and nucleic acid metabolic process
  Homolog annotation: Hit_ID=A1R6B6; Match level="QueryCoverage=100%, HitCoverage=64%, E-value=6e-78, Identity=66%"; Hit description =Putative 5'-3' exonuclease
  Pfam annotation: Domain name=5_3_exonuc_N; Domain location=1-174; Score=167.2; E_value=4.4e-47; Accession=PF02739.7; Description=5'-3' exonuclease, N-terminal resolvase-like domain
MLLDTASLYFRAFYGVPDRVKAPDGSSVNAVRGLLDIVAKLVTLYRPTQIVACWDDAWRPQWRVDRIPSYKAHRLISSDAGEIEDVPEALVQQVPLIRQALTAVGIPIVGVADHEADDVIGTLSTRSAIPVDIVTGDRDLFQLVDDARDVRVVYTAKGMSNLEIVTDAVVVAKYGILPSQYADFATMRGDASDGLPGVKGVGE

SEQ ID NO: 8506 - protein, 269 aa, Zea mays
  misc_feature (203)..(269): Xaa can be any naturally occurring amino acid
  Coding DNA Sequence Number=SeqID_2135
NTKSQKLNNALNQILTTTMAYHAGPDGAHGEEPSCTSVPRRMPRTTYATAAAMPATATAATPQATPAATDTDLRGVADGAVPAVVAAAVVAGSAVAAAASGLAGMEASRASGSAAAAWGLKKVCISGVVVASPPLVKSPRPWDSERAASSAATLSANSRLFVLHAIVARFRRSPSFRERRLAFVMEKGPARTEGEHRARACLXXXXXXXXXXXXXXXXXXXXXXXXXXXXXXXXXXXXXXXXXXXXXXXXXXXXXXXXXXXXXXXXXXX

SEQ ID NO: 8507 - protein, 46 aa, Zea mays
  Coding DNA Sequence Number=SeqID_2137
  Gene Ontology: Mol. function=catalytic activity; Biological process =metabolic process
  Homolog annotation: Hit_ID=A7PKG0; Match level="QueryCoverage=97%, HitCoverage=11%, E-value=2e-13, Identity=73%"; Hit description =Chromosome chr15 scaffold_19, whole genome shotgun sequence
GARLNKFYQSWEDNPDIGFVMMKGSGRAFCAGGDVVRLHELISEGG

SEQ ID NO: 8508 - protein, 96 aa, Zea mays
  misc_feature (49)..(49): Xaa can be any naturally occurring amino acid
  misc_feature (57)..(57): Xaa can be any naturally occurring amino acid
  Coding DNA Sequence Number=SeqID_2138
  Gene Ontology: Mol. function=nucleotide binding; Cellular component =nucleus; Biological process=ribosome biogenesis and assembly
  Homolog annotation: Hit_ID=A2YHG3; Match level="QueryCoverage=100%, HitCoverage=28%, E-value=2e-16, Identity=50%"; Hit description =Putative uncharacterized protein
AADGDRLEIYGQQSHKILRRTSRPRSRARSSPPGEDLHGEEHKACLHMXRLSRYLRXATRNRNKEARHGEADRVIPTLKPKHLFSGKRTLGKTSRR

SEQ ID NO: 8509 - protein, 125 aa, Zea mays
  Coding DNA Sequence Number=SeqID_2139
  Gene Ontology: Mol. function=1,3-beta-glucan synthase activity; Cellular component=1,3-beta-glucan synthase complex; Biological process=1,3-beta-glucan biosynthetic process
  Homolog annotation: Hit_ID=A7PJU9; Match level="QueryCoverage=94%, HitCoverage=6%, E-value=3e-58, Identity=90%"; Hit description =Chromosome chr12 scaffold_18, whole genome shotgun sequence
MILQLENRVRFHYGHPDIFDRLFHITRGGISKASKTINLSEDIFSGFNSTMRGGNVTHHEYMQVGKGRDVGMNQISSFEAKVANGNGEQTLSRDIYRLGHRFDFYRMLSFYFTTVGFYFSSMVRI

SEQ ID NO: 8510 - protein, 151 aa, Zea mays
  misc_feature (8)..(8): Xaa can be any naturally occurring amino acid
  misc_feature (43)..(43): Xaa can be any naturally occurring amino acid
  Coding DNA Sequence Number=SeqID_2140
  Gene Ontology: Mol. function=penicillin binding; Biological process =peptidoglycan-based cell wall biogenesis
  Homolog annotation: Hit_ID=A0PKC9; Match level="QueryCoverage=85%, HitCoverage=26%, E-value=1e-46, Identity=72%"; Hit description =Penicillin-binding protein PbpA
  Pfam annotation: Domain name=UCR_TM; Domain location=30-89; Score= -3.9; E_value=0.039; Accession=PF02921.5; Description=Ubiquinol cytochrome reductase transmembrane region
GSPIVDLXNARIAATVANGGVSMAPYLVDDLKGPDLSNIAGTXPHQQRRAISSQVAATLTDLMVGAEQVTQQKGAIAGVQIASKTGTAEHGTDPRNTPPHAWYIAFAPAKSPKVAVAVLVENGGDRLSATGGALAAPIGRATIAAALREGS

SEQ ID NO: 8511 - protein, 87 aa, Zea mays
  Coding DNA Sequence Number=SeqID_2141
  Gene Ontology: Mol. function=oxidoreductase activity, acting on the CH-CH group of donors; Biological process=electron transport
  Homolog annotation: Hit_ID=A2X159; Match level="QueryCoverage=100%, HitCoverage=11%, E-value=7e-27, Identity=71%"; Hit description =Putative uncharacterized protein
QDVMAAEVIHDRLCQQQKKHFSFTRLDALAQRALKEGWIDESEAKVLTRAEASRLKAINVDDFAPEALAVAKPDSKPKPSARPSEAA

SEQ ID NO: 8512 - protein, 64 aa, Zea mays
  Coding DNA Sequence Number=SeqID_2142
  Gene Ontology: Mol. function=protein serine/threonine kinase activity; Cellular component=chloroplast; Biological process=protein amino acid phosphorylation
  Homolog annotation: Hit_ID=A2X055; Match level="QueryCoverage=84%, HitCoverage=12%, E-value=8e-16, Identity=72%"; Hit description =Putative uncharacterized protein
LCETAGICIVHVTLSYIDTFGSLHPAYWRTGHLYVKSDVYGFGVVMLEMLSGQRALDPNRPSGQ

SEQ ID NO: 8513 - protein, 180 aa, Zea mays
  misc_feature (61)..(61): Xaa can be any naturally occurring amino acid
  Coding DNA Sequence Number=SeqID_2143
  Gene Ontology: Mol. function=acyltransferase activity
  Homolog annotation: Hit_ID=Q8ZRI7; Match level="QueryCoverage=99%, HitCoverage=58%, E-value=2e-71, Identity=70%"; Hit description =Putative hydrolase or acyltransferase
QRVAFVGHYRGGRVGHRLALDHPEKVSCCVFVDIAPTATMYALTDQAFATRYFWWFFLIHXDPLPETMIGHDPAFFLRKHIDGQLKTPGATEAAIFEDYLRCYRDPAMIHAVCEDYRAAASIDLQHDAADSDRRIACPLFLLWGEKGTVGQLYDVVHTWQDKALQVQGEALPCGHSPQEE

SEQ ID NO: 8514 - protein, 147 aa, Zea mays
  Coding DNA Sequence Number=SeqID_2144
  Subcellular localization annotation: CTP_CleavageSite=65; ConfidenceScore=5.68e-01
ESRSSRTTSATRAQMASAIPPAASVACWPAMMVSSVMTGLQLKVSSRSASAYTCTTAAAPGSPPPASSRSRDRNRSTTWPAAGDAAAPAIGTGEEDLGFQGLGFGVPPRREGAGGMGAERSGGKGEIAGDSHRFVRETARISFQRCF

SEQ ID NO: 8515 - protein, 82 aa, Zea mays
  Coding DNA Sequence Number=SeqID_2145
  Gene Ontology: Mol. function=transporter activity; Cellular component= integral to membrane; Biological process=transport
  Homolog annotation: Hit_ID=P64487; Match level="QueryCoverage=100%, HitCoverage=100%, E-value=5e-30, Identity=76%"; Hit description =UPF0410 protein yeaQ
  Pfam annotation: Domain name=Transgly_assoc; Domain location=33-82; Score=77.7; E_value=3.7e-20; Accession=PF04226.4; Description =Transglycosylase associated protein
MGILSWIIFGLIAGIIAKWIMPGKDGGGFILTVVLGIVGAVVGGWISTLFGFGRVDGFNFGSFVVAVIGAIVVLWIYRKVRS

SEQ ID NO: 8516 - protein, 51 aa, Zea mays
  Coding DNA Sequence Number=SeqID_2146
CLQDQLSKIAEYRVTMSWPLKYNVPTGKTVLLPSLISLHHMRLSCSLGVIH

SEQ ID NO: 8517 - protein, 76 aa, Zea mays
  Coding DNA Sequence Number=SeqID_2148
GPPFRMSRYQKPEIDRVKLELDNNVQGFHLPRQISTKWKDPTTTTITTPRYQPLEGARRRRRTRRRPAHLRGRRRR

SEQ ID NO: 8518 - protein, 129 aa, Zea mays
  misc_feature (54)..(54): Xaa can be any naturally occurring amino acid
  Coding DNA Sequence Number=SeqID_2150
  Gene Ontology: Mol. function=calcium ion binding; Cellular component =oxygen evolving complex; Biological process=photosynthesis
  Homolog annotation: Hit_ID=A7PS37; Match level="QueryCoverage=89%, HitCoverage=36%, E-value=2e-23, Identity=52%"; Hit description =Chromosome chr14 scaffold_27, whole genome shotgun sequence
PPARSPPRPRTRGFGRVTSFLLGLSPELGRSLRLDVLYPDGGFTRCLDSDNGFXEFIDPSRWVGDQTLLYRQATKAESQRSLDPPTLPNGGSSSRPGNITEPVARFGHPGSNGELNVSVIACTVPRDYS

SEQ ID NO: 8519 - protein, 72 aa, Zea mays
  Coding DNA Sequence Number=SeqID_2151
  Subcellular localization annotation: CTP_CleavageSite=52; ConfidenceScore=5.47e-01
HAFWVVWCGSALPRLPPVRPRFTASRGSAPSVAIMDRVKVLGAGVWGLASVSASLGVTTSSAAFCVPVQCGS

SEQ ID NO: 8520 - protein, 101 aa, Zea mays
  misc_feature (32)..(32): Xaa can be any naturally occurring amino acid
  misc_feature (35)..(35): Xaa can be any naturally occurring amino acid
  Coding DNA Sequence Number=SeqID_2153
  Gene Ontology: Mol. function=metallopeptidase activity; Cellular component=cell wall; Biological process=proteolysis
  Homolog annotation: Hit_ID=A0T5N0; Match level="QueryCoverage=98%, HitCoverage=15%, E-value=2e-49, Identity=91%"; Hit description =Peptidase M15D, vanX D-ala-D-ala dipeptidase
  Pfam annotation: Domain name=Peptidase_M15; Domain location=1-101; Score=-12.3; E_value=9.6e-06; Accession=PF01427.8; Description=D-ala- D-ala dipeptidase
AYRPAQAQQVLWDFLPDPNFVADLGRGSNHSXRTXLDLTLVGANGEPLDMGTGFDEMVAASGHFHAGLPEHVQRNRLLLLGVMHAAGFAHIDSEWWHYEAA

SEQ ID NO: 8521 - protein, 163 aa, Zea mays
  Coding DNA Sequence Number=SeqID_2154
  Gene Ontology: Mol. function=glutamate-putrescine ligase activity; Biological process=nitrogen compound metabolic process
  Homolog annotation: Hit_ID=A8GDI1; Match level="QueryCoverage=90%, HitCoverage=31%, E-value=2e-58, Identity=72%"; Hit description =Glutamate--putrescine ligase
ACATLFNEYRAGGNIANLVKVEDFTRHSADNRTSAFQLEVKTWLERHPETQYVDILLNDLNGVFRGKRIPVSALAKLEKGCYFPASVFAMDILGNTVEKAGLGQALVEPDNLCIPVPGTLIPSASDPQRIAQLLLTMCDQDGTPFDVEPRNVLNRLWQQLRNR

SEQ ID NO: 8522 - protein, 160 aa, Zea mays
  misc_feature (56)..(56): Xaa can be any naturally occurring amino acid
  Coding DNA Sequence Number=SeqID_2155
  Subcellular localization annotation: CTP_CleavageSite=43; ConfidenceScore=5.49e-01
SESCSSPCTLSQPTRRSRTRRVARNPSPAQPSGPKAPHRTPVRGAAVLHARADRSXQVLIPSSLSWSGLVADGRPTRTRDMLSSRRCFAAEANRIRPLARAFCDAPASRADAGALRYAQPAGTHPRTLCLPLPCRDHAEKGAALKDPPDVLHAAIVGGGM

SEQ ID NO: 8523 - protein, 46 aa, Zea mays
  Coding DNA Sequence Number=SeqID_2157
  Gene Ontology: Mol. function=protein phosphatase type 2A regulator activity; Cellular component=protein phosphatase type 2A complex; Biological process=signal transduction
  Homolog annotation: Hit_ID=A7P6U1; Match level="QueryCoverage=97%, HitCoverage=9%, E-value=4e-14, Identity=84%"; Hit description =Chromosome chr9 scaffold_7, whole genome shotgun sequence
PFHLASPSVHSDGETFISADDLRINLWNLEISNQSFNIVDVKPAHM

SEQ ID NO: 8524 - protein, 69 aa, Zea mays
  misc_feature (30)..(30): Xaa can be any naturally occurring amino acid
  misc_feature (42)..(42): Xaa can be any naturally occurring amino acid
  Coding DNA Sequence Number=SeqID_2158
  Gene Ontology: Mol. function=transferase activity
  Homolog annotation: Hit_ID=Q10N45; Match level="QueryCoverage=97%, HitCoverage=21%, E-value=3e-20, Identity=77%"; Hit description=IN2-1 protein, putative, expressed
YQDIAYVPFIERVQIFYSNLKNYDFPRGRXPNLQKFIEEVEXNKIDAYTQTKLDPDFLLEQTKKRLGIA

SEQ ID NO: 8525 - protein, 241 aa, Zea mays
  Coding DNA Sequence Number=SeqID_2159
  Gene Ontology: Mol. function=sulfuric ester hydrolase activity; Cellular component=lysosome; Biological process=metabolic process
  Homolog annotation: Hit_ID=A9IE67; Match level="QueryCoverage=97%, HitCoverage=46%, E-value=1e-100, Identity=69%"; Hit description =Arylsulfatase
  Pfam annotation: Domain name=Sulfatase; Domain location=5-224; Score=- 35.1; E_value=0.0011; Accession=PF00884.13; Description=Sulfatase
AHGFDEFFGNLYHLNAKEEPKNPNYPKDPEYRKQFGPRGVIKASADGKVEDTGPLNVKRMGTVDEEFLAANNDFMERQVKAGKPFFTWFNTTRMHNKTHIKPQDQGVTGLGDYADGMVEHDKMIGEVLKKIKDLGIEDNTIVIYTTDNGPMIATWPDSGMTPFRGEKNTGWEGGFRVPAMIKWPGHIKPGTMINDIFGSNDWFPTLVAAAGVPDIKQQLLKGYKTSAMTDKVHLYGYCAGN

SEQ ID NO: 8526 - protein, 113 aa, Zea mays
  Coding DNA Sequence Number=SeqID_2160
  Gene Ontology: Mol. function=transporter activity; Cellular component= integral to membrane; Biological process=transport
  Homolog annotation: Hit_ID=A8GKD9; Match level="QueryCoverage=100%, HitCoverage=43%, E-value=2e-24, Identity=52%"; Hit description =Binding-protein-dependent transport systems inner membrane component precursor
MSRVEKLYHRLIVWLLLIVLAAPLLATLLYGISSEWSDTILPQGFTLKWLTQLWSDPRFLTALGHSLLICLGALLFSLLLVLPAMFVIAYYYPKLDAVMNVLILMPFAVPTVV

SEQ ID NO: 8527 - protein, 81 aa, Zea mays
  Coding DNA Sequence Number=SeqID_2161
MSGWLATWPPGCDRGSADLSVGQGQRGTAVLTAGAASARAVEQLELELDRLGPGRLELECWTPGVLDRQGPGAAERPSGGR

SEQ ID NO: 8528 - protein, 82 aa, Zea mays
  Coding DNA Sequence Number=SeqID_2163
YYHRKRHKASPGQPGRVRKQDRAGHRARTQPEQGHKGEHVGSPQPAGSSEGKSARPEPEPTTVRRKKADGERDGRPATDAQD

SEQ ID NO: 8529 - protein, 175 aa, Zea mays
  misc_feature (104)..(104): Xaa can be any naturally occurring amino acid
  misc_feature (139)..(139): Xaa can be any naturally occurring amino acid
  Coding DNA Sequence Number=SeqID_2165
  Gene Ontology: Mol. function=transferase activity; Cellular component= integral to membrane; Biological process=cell wall organization and biogenesis
  Homolog annotation: Hit_ID=Q7PC70; Match level="QueryCoverage=97%, HitCoverage=24%, E-value=2e-41, Identity=54%"; Hit description =Probable xyloglucan glycosyltransferase 2
ACRSSLWTKAHQALWFLLPRKLILPFYPFTLFRVIVPLSMFDHYAEMTVWIICYVRICMSFLNIVPSPGSLPFIGPYAVSKNTMSGTKCNAMMHVLFKLGSYYXWTGTKTSRRASDLYLLTSDESNRKCTALAELQNQXTEHSELVEINVRVEQREKVLTDAKRGNMICTREVAL

SEQ ID NO: 8530 - protein, 80 aa, Zea mays
  Coding DNA Sequence Number=SeqID_2166
TCRSAHHEGAEARIRRQPYSRHQPEGRPYASEPERRRRQRPEPRDRNILPGPAKPPLRGRQSSCRRRPEPGAAGPADRSQ

SEQ ID NO: 8531 - protein, 139 aa, Zea mays
  Coding DNA Sequence Number=SeqID_2168
  Gene Ontology: Mol. function=oxidoreductase activity; Cellular component=plasma membrane; Biological process=electron transport
  Homolog annotation: Hit_ID=A8GDC8; Match level="QueryCoverage=98%, HitCoverage=23%, E-value=2e-54, Identity=70%"; Hit description =Gluconate 2-dehydrogenase
MTIKKEPVDVVIVGFGWAGSLMAMELASTGLKIVALERGEQRDTYPDFAYPRIIDELTYGVRLKLFQNISKESVTVRHTTKDTALPYRRMGSFLPGDGVGGAGVHWNGLLWRPLEADLRQKTVVTEKYGASFIPEGMTL

SEQ ID NO: 8532 - protein, 137 aa, Zea mays
  Coding DNA Sequence Number=SeqID_2169
MVTTGSMVGRSKTGCGLCPALSFKDLHHPCWGGGRAEPELYLPYGPAGHLFLQHSGERALTGLAERADFNNAGPIGRKRRRCLPVHEDLSGDLPVQVGAAAIRWRSASAQVAAVVGAEVVVARGGFSANETVGATRG

SEQ ID NO: 8533 - protein, 130 aa, Zea mays
  Coding DNA Sequence Number=SeqID_205
  Subcellular localization annotation: CTP_CleavageSite=87; ConfidenceScore=5.03e-01
IQVSSSIGALTPFTKPGRQLPWYFGSASNGHGEACCAAQDQVLWPRRPHRQLRPAPAPLTRMPLVRRQRPRQWQLSLLRSGQGEVLRAWMEGPRVISTATLSRGGGGGGEEEEARGQDGAWTSSSRGGEA

SEQ ID NO: 8534 - protein, 90 aa, Zea mays
  Coding DNA Sequence Number=SeqID_207
  Gene Ontology: Mol. function=signal transducer activity; Cellular component=nucleus; Biological process=regulation of transcription, DNA-dependent
  Homolog annotation: Hit_ID=Q5Z8K3; Match level="QueryCoverage=100%, HitCoverage=14%, E-value=6e-24, Identity=62%"; Hit description =Adagio-like protein 1
MEWDSESDGAGSIGVDEQEEEQQEEEERGGERGGVDAGGMFTLATEGMLRASGPCGLVVTDALEPDCPIVYANRGFEEATGYRAEEFLDK

SEQ ID NO: 8535 - protein, 89 aa, Zea mays
  Coding DNA Sequence Number=SeqID_208
  Gene Ontology: Mol. function=acetyl-CoA C-acyltransferase activity; Cellular component=peroxisome; Biological process=metabolic process
  Homolog annotation: Hit_ID=Q84P96; Match level="QueryCoverage=44%, HitCoverage=8%, E-value=2e-13, Identity=90%"; Hit description=3 -ketoacyl-CoA thiolase-like protein
FFVCSGARCVATLLNEMNCRGRDCRFGVVTMCIGSGMGAAGVFELCSARVEVLTITRHCNPMVIGDRELPCCVLILETFIMTMYELITR

SEQ ID NO: 8536 - protein, 130 aa, Zea mays
  misc_feature (58)..(58): Xaa can be any naturally occurring amino acid
  Coding DNA Sequence Number=SeqID_209
  Homolog annotation: Hit_ID=A2X1N7; Match level="QueryCoverage=75%, HitCoverage=45%, E-value=2e-17, Identity=50%"; Hit description =Putative uncharacterized protein
AGARVTRKLFPRRALLVKGSERRKSDQRLPEMQQLVRSLAVDNERLREEMRDLQGACXALSKENDELETRLGQSSPQSEVASKEQRGKDLLDPRQPARDSFALPDLNLPPQDSADASTVSLIAPDRLQLC

SEQ ID NO: 8537 - protein, 110 aa, Zea mays
  Coding DNA Sequence Number=SeqID_210
  Subcellular localization annotation: CTP_CleavageSite=29; ConfidenceScore=5.21e-01
EQRMEPIRNNSVSVATRRNHHSRSRRDSRVSTRGSESDHTTDTTTRYKPSPPTKDTRSNRVPASSSMRSSSSRSKSTTSTSAFVAAAAIAAGTRLDRVGVGVGRVRKSLR

SEQ ID NO: 8538 - protein, 365 aa, Zea mays
  Coding DNA Sequence Number=SeqID_212
  Gene Ontology: Mol. function=oxidoreductase activity, acting on the CH-OH group of donors, NAD or NADP as acceptor; Cellular component =cytoplasm; Biological process=tricarboxylic acid cycle intermediate metabolic process
  Homolog annotation: Hit_ID=A3AW68; Match level="QueryCoverage=96%, HitCoverage=96%, E-value=1e-161, Identity=77%"; Hit description =Malate dehydrogenase
  Pfam annotation: Domain name=Ldh_1_C; Domain location=184-358; Score =180.5; E_value=4.4e-51; Accession=PF02866.8; Description =lactatemalate dehydrogenase, alphabe
  Pfam annotation: Domain name=Ldh_1_N; Domain location=33-182; Score =162.6; E_value=1.1e-45; Accession=PF00056.13; Description =lactatemalate dehydrogenase, NAD bin
  Pfam module annotation: Pfam domain module=Ldh_1_C::Ldh_1_N; Domain location=184-358::33-182
DQSIKSIMLPSSLLQRLASWCPWLLRDEPKQPVKVLVTGAAGQIGYAIVAMIARGLMLGPDQPVVLHMLDLPKSTDALSGVRMELIDAALPLLRGVVATSDEAEAFRGVSFAVLIGGWPRKEGMQRKDLIAKNVPIYQSQASALQQHAAPNCKVLVVANPANTNALVLKELAPAVPAKNITCLTRLDHNRALGQISEKLGVHIGDVRNAIVWGNHSSTQFPDASHAIARTQHGEKPVRELIADEKWFKEEFVSVVQQRGEAVIKARKQSSSLSAASAACDHMRDWILGTPKGTWVSMGVCSDGSYGVPKGIFYSFPVTCEKGEWSIVQGLEVDDFARSKMELSANELDEERSMAYEFVASSESHQ

SEQ ID NO: 8539 - protein, 136 aa, Zea mays
  Coding DNA Sequence Number=SeqID_213
  Gene Ontology: Mol. function=transferase activity, transferring glycosyl groups; Cellular component=membrane; Biological process =cell wall biogenesis
  Homolog annotation: Hit_ID=A2YAL4; Match level="QueryCoverage=88%, HitCoverage=21%, E-value=1e-41, Identity=72%"; Hit description =Putative uncharacterized protein
ASACLWAMYRRNPGRRPSEHLVSKLRRHEALQRRCGPGTAAYSSALEQLKSGKNTGVSPADPECRYLVSISYRGLGNRILAAASAFLYALLTDRVLIVDSSNEMGELFCEPFPDTTWLLPWRSFPMWNFSFDTRPQ

SEQ ID NO: 8540 - protein, 145 aa, Zea mays
  Coding DNA Sequence Number=SeqID_214
  Gene Ontology: Mol. function=oxidoreductase activity; Biological process=electron transport
  Homolog annotation: Hit_ID=A2XB72; Match level="QueryCoverage=37%, HitCoverage=10%, E-value=3e-18, Identity=78%"; Hit description =Putative uncharacterized protein
MLSLVSTFLYAVLFDRACSSTFPDFTDLFYCIAKVSWLLLFSDMYFVSSLLLAGTEEATDRRLTTRELVDECKTFFFGGHKTTPLALSWTLLMLAAHPDWQDAFAGSDWHGPLNGSCYSGRPGTVRPTPCHAREEIWTRRVARHG

SEQ ID NO: 8541 - protein, 172 aa, Zea mays
  Coding DNA Sequence Number=SeqID_215
  Subcellular localization annotation: CTP_CleavageSite=43; ConfidenceScore=5.48e-01
RTTKTRQADTRSSPLARRRRNRTPSPSRSVLRWEISSCRRRISSSSLPSTVGSTIDLFASILWYYFKALMIALQRRYGLPPKAVWYSEAGFGRWRRRRPWTWRWSRWRGRGRPRHRHWRWRRSRVGRGGRRRRRWRRWCGCCCWKPRALIHPSMSSLKKNASMQACVCSALE

SEQ ID NO: 8542 - protein, 101 aa, Zea mays
  misc_feature (79)..(101): Xaa can be any naturally occurring amino acid
  Coding DNA Sequence Number=SeqID_217
RSERGQRPNSISSVSCVSSVVFIGRETDSIHLLVPLLLTGGKGADLVIRGNVVLNTLSARSTSTLLRLDQICINSPSNXXXXXXXXXXXXXXXXXXXXXXX

SEQ ID NO: 8543 - protein, 400 aa, Zea mays
  Coding DNA Sequence Number=SeqID_219
  Homolog annotation: Hit_ID=A2WM50; Match level="QueryCoverage=80%, HitCoverage=84%, E-value=6e-78, Identity=45%"; Hit description =Putative uncharacterized protein
  Pfam annotation: Domain name=F-box; Domain location=107-159; Score =17.7; E_value=0.043; Accession=PF00646.23; Description=F-box domain
MGKAISLLLPPQPARKGETEMMELRKRPRPRRVDRDYFSSPHPLPPRKRARKEAAAQKLVEAAGAVKWQPPRKWGKRAVVGIGCPVAGLHPATCGRQPPLRTSTRVLFRPRLPFNWYEPDLWTEVAKHLCGFDLLRLSSTCRWFRRLLADDSIWHYAFFRDLNLSDANPRAHHPLCRSWRYLYFAAFNGSHAFSFCQNGEHRSSWRIGSFVLDTPSMVLIGKLPLPKWLPSDPEDVRLTIAILGACKLLNVRPGIWITDMHVMRCTLCNRNGCRGNKQILDARHSELFLEKAYWDETLEYESLGEHFQDEEVAAAFSAVVNAKQFASPSATMDGLVNPVLNMAWAGKRDDRMTRHCASTTAAAIHTNLQGNGGLLSTFEAMRDTARDGQIVSASISQVLF

SEQ ID NO: 8544 - protein, 112 aa, Zea mays
  Coding DNA Sequence Number=SeqID_220
LAVQWQRIVLRYSMELGRGGASAFFGKGGKRKVLIRVRKSYSVVVGGPILSKVLKTLWYKSFSSTFQMFRIYHEIIFVRSNVCKRMKLKSFDFVTAMRNRKHANAEKKDVEA

SEQ ID NO: 8545 - protein, 91 aa, Zea mays
  Coding DNA Sequence Number=SeqID_2170
  Gene Ontology: Mol. function=GTP binding; Cellular component =intracellular; Biological process=embryonic development ending in birth or egg hatching
  Homolog annotation: Hit_ID=A9NWU7; Match level="QueryCoverage=82%, HitCoverage=19%, E-value=2e-27, Identity=81%"; Hit description =Putative uncharacterized protein
ARYPDRSIFFRLCSILLSMQDLEFMEKKLEDLDKSMKRSNDKQLKIEHELCERVIAHLEERKDVRLGDWKAAEVEILNTFQLLSAKPVVYL

SEQ ID NO: 8546 - protein, 120 aa, Zea mays
  Coding DNA Sequence Number=SeqID_2171
  Gene Ontology: Mol. function=oxidoreductase activity; Cellular component=membrane; Biological process=electron transport
  Homolog annotation: Hit_ID=A8GJW3; Match level="QueryCoverage=94%, HitCoverage=16%, E-value=7e-43, Identity=76%"; Hit description =NADH:flavin oxidoreductase/NADH oxidase
  Pfam annotation: Domain name=Oxidored_FMN; Domain location=1-120; Score=-151.8; E_value=0.0053; Accession=PF00724.10; Description =NADH:flavin oxidoreductase  NADH oxid
MIERDLVAPSALQAPINPGTPQALSEAQIEQTIADFARCARLAQQAGYDGVEIMGSEGYLINQFLVAHTNQRDDRWGGDLARRQRFALEVTQAVRAAVGDAFIIIFRLSMLDLVNNGSSL

SEQ ID NO: 8547 - protein, 152 aa, Zea mays
  Coding DNA Sequence Number=SeqID_2172
LGTSTPAGGKSIPTRQSQPPRQHGRARRGEMGQGRHRPPHHRQLDTAIDMDNVDGHLHNNLPLPLATPILGCRPSVPQGECQGGGAGPVGAAVVCATGASGGAPATRVHELLEDPICTESTFPAHPSSWCLAPGAPILDWVSCGFRVLDWKG

SEQ ID NO: 8548 - protein, 162 aa, Zea mays
  misc_feature (143)..(143): Xaa can be any naturally occurring amino acid
  Coding DNA Sequence Number=SeqID_2173
  Gene Ontology: Mol. function=ATPase activity, coupled to transmembrane movement of substances; Cellular component=integral to membrane; Biological process=transport
  Homolog annotation: Hit_ID=A7CF49; Match level="QueryCoverage=100%, HitCoverage=26%, E-value=4e-78, Identity=91%"; Hit description=ABC transporter related
MSRDIERGTRGIQSLISYSLYSILPTLVEVGLVITYFFVKYDVWFALITFCALVSYIVFTVTVTNWRTHFRRKMNELDSRANQKAIDSLLNFETVKYFGNEDYEARRYDENLKHYRAAAIRSQNSLSVLNFGQQLIVATALIXILYRATQGVAAGHITLGDL

SEQ ID NO: 8549 - protein, 212 aa, Zea mays
  misc_feature (212)..(212): Xaa can be any naturally occurring amino acid
  Coding DNA Sequence Number=SeqID_2174
  Gene Ontology: Mol. function=hydrolase activity, acting on ester bonds; Biological process=lipid metabolic process
  Homolog annotation: Hit_ID=Q2QU40; Match level="QueryCoverage=99%, HitCoverage=41%, E-value=6e-26, Identity=62%"; Hit description=GDSL -motif lipase/hydrolase, putative
  Pfam annotation: Domain name=GRP; Domain location=12-114; Score= -29.2; E_value=0.078; Accession=PF07172.2; Description=Glycine rich protein family
GYSTQLTQLHGLGARKFVIAGVGLIGCIPYELARMNDDDSRPSGPNNNQSAASQEDIAISIGIGGGGGGGGVGVGGGGGGGDDWRSPSMPPPYADGGSGNGSGNGNADGGNGNGNSSGSRTGTGTTNPAPAGGGSCNETINSAIDIYNRGLLAMVKRLNNRGGLRGAKLVFLDTVQSGKDLMANAAAHGFAVLDRGCCGVGRNNGQITCLPX

SEQ ID NO: 8550 - protein, 159 aa, Zea mays
  misc_feature (42)..(42): Xaa can be any naturally occurring amino acid
  Coding DNA Sequence Number=SeqID_2175
  Gene Ontology: Mol. function=4 iron, 4 sulfur cluster binding; Biological process=nitrate assimilation
  Homolog annotation: Hit_ID=A7MNB0; Match level="QueryCoverage=99%, HitCoverage=17%, E-value=8e-38, Identity=52%"; Hit description =Putative uncharacterized protein
  Pfam annotation: Domain name=Fer2_BFD; Domain location=104-156; Score= 68.1; E_value=2.9e-17; Accession=PF04324.5; Description=BFD-like [2Fe- 2S] binding domain
YWARTPYEGVQRFSVAGDGSPEQWLMATIPLAGLQLQTAHAXGTAYRLLAWRNGELHLVFYAGASLPEINHDWVAQAFRQAPVNAADRHALLAGQSAQRAVAGRTICSCFGVGENTILQAIKQGCHSTQALGNALNCGTNCGSCLPELKHLLLSVAVPE

SEQ ID NO: 8551 - protein, 235 aa, Zea mays
  Coding DNA Sequence Number=SeqID_2176
  Gene Ontology: Mol. function=kinase activity; Cellular component =cytoplasm; Biological process=phosphatidylcholine biosynthetic process
  Homolog annotation: Hit_ID=A2WLF7; Match level="QueryCoverage=74%, HitCoverage=49%, E-value=2e-77, Identity=81%"; Hit description =Putative uncharacterized protein
  Pfam annotation: Domain name=APH; Domain location=8-231; Score=39.8; E_value=9.4e-09; Accession=PF01636.13; Description=Phosphotransferase enzyme family
  Pfam annotation: Domain name=Choline_kinase; Domain location=22-227; Score=197.2; E_value=4e-56; Accession=PF01633.10; Description =Cholineethanolamine kinase
  Pfam module annotation: Pfam domain module=APH::Choline_kinase; Domain location=8-231::22-227
PKEFFGSTWPGGGGGGQRPAQGARAHLRPGAVEVFFERADEVRTFECMSAPRPEGPASLGRFANGRVEEFINARTLSAADLRDPEMSALIARKLREFHDLDMPGPRDVSLWQRLKRWLGEARDRCSEEESNQFQLNKLGDEISVLEKTLSGLQQSVGFCHNDLQYGNIMIYEETRQVTLIDYEYASFNPVAFDIANHFCEMAADYPYLHHPVGVGFNKISLTPGETKKNSLEGNP

SEQ ID NO: 8552 - protein, 124 aa, Zea mays
  Coding DNA Sequence Number=SeqID_2177
TCSSVRPHLQHVAAEDLPENELETTSLYSTFGLTSKPQCEEAQRIRRMAQSRSYAQGSFGIPASRLHGCPRPSLQPPMHICLPPRNPPPCVIGVAVTRVMPTRLRPYHNSVLWSCMPSKTPTSQ

SEQ ID NO: 8553 - protein, 120 aa, Zea mays
  Coding DNA Sequence Number=SeqID_2179
  Gene Ontology: Cellular component=integral to membrane
  Homolog annotation: Hit_ID=A8G874; Match level="QueryCoverage=90%, HitCoverage=48%, E-value=5e-45, Identity=81%"; Hit description =Conserved hypothetical integral membrane protein
  Pfam annotation: Domain name=DUF165; Domain location=1-86; Score =36.1; E_value=1.4e-08; Accession=PF02592.5; Description =Uncharacterized ACR, YhhQ family COG1738
QEVNLFVARIACASFMAYALGQILDVHVFNRLRKLPQWWIAPACAMFLGNISDTLAFFFIAFYKSPDPFMASHWVEIALVDYSFKVLICMVFFLPAYGVLLNAALKRLAERSAQRQMNFG

SEQ ID NO: 8554 - protein, 73 aa, Zea mays
  Coding DNA Sequence Number=SeqID_2180
  Homolog annotation: Hit_ID=Q2QQC9; Match level="QueryCoverage=56%, HitCoverage=8%, E-value=2e-13, Identity=90%"; Hit description =Expressed protein
HYPHSVLFKARGVGFLRYFQVKQLPNFLLASPVLSLAVYSIVHYAKLLPQLYLWTGSSMATQRKPVATEMASA

SEQ ID NO: 8555 - protein, 78 aa, Zea mays
  Coding DNA Sequence Number=SeqID_2181
STPRVSLVDEPQDALHSAVQRHHHPHRPPLPIHVFGTHDKHVYQSINPSQDGTCNGCSSFRDLPQGAGPGLLFPQLGF

SEQ ID NO: 8556 - protein, 230 aa, Zea mays
  Coding DNA Sequence Number=SeqID_2183
  Gene Ontology: Mol. function=hydrolase activity; Biological process =sporulation
  Homolog annotation: Hit_ID=A9MUD1; Match level="QueryCoverage=72%, HitCoverage=76%, E-value=3e-61, Identity=67%"; Hit description =Putative uncharacterized protein
  Pfam annotation: Domain name=AHS1; Domain location=1-153; Score =271.9; E_value=1.4e-78; Accession=PF02682.7; Description=Allophanate hydrolase subunit 1
MNNLTLLLRDPQLKALDAIERLQRWWEESEVLLAEPRQVEIPVVYGGAGGPDLAEVARAAELTSQQVVELHSSADYVVYFIGFQPGFPYLGGLDERLHTPRRAEPRLVVPGGSVGIGGSQTGIYPLAAPGGWQLIGHTPLSLFDPQQQPPTLLRPGDSVRFVPQREGDRGRHGWRQYGISLSGALDEPSMRTANMLVGNAENSAVLEIVLGQFKAEFRRHGWFALTGASC

SEQ ID NO: 8557 - protein, 114 aa, Zea mays
  misc_feature (102)..(102): Xaa can be any naturally occurring amino acid
  Coding DNA Sequence Number=SeqID_2184
  Gene Ontology: Mol. function=oxidoreductase activity; Cellular component=cytoplasm; Biological process=metabolic process
  Homolog annotation: Hit_ID=A6T7L0; Match level="QueryCoverage=98%, HitCoverage=28%, E-value=3e-42, Identity=75%"; Hit description =Putative oxidoreductase
  Pfam annotation: Domain name=ADH_N; Domain location=25-106; Score =63.3; E_value=7.9e-16; Accession=PF08240.2; Description=Alcohol dehydrogenase GroES-like doma
MKALTYHGPHRVRVETVPDPILEHPADIILRVTAAAICGSDLHLYRGKIPGTDHGDIFGLEFMGEVVEAGSEVTNVKIGDRAVVPFVIACGDRIKSRVHQYXACENINTAGGGV

SEQ ID NO: 8558 - protein, 204 aa, Zea mays
  Coding DNA Sequence Number=SeqID_2185
KKKKRKRQLAPSKSVSTQITTEPSPGAAPADLSRSTGDEAYNVELNGKDETIVKESGCRLSSSELNDANQGGKSVQFVSDALASIDLICKQEKFGHSLKGCKDPSIANAIYSTSENVAIEGKTTKESCVPLDRGDKPEEKKQHNEGCHNEAVPEISHMEKGGRSTDVSNKRRTNQMILPKRKKKQLVISVSISIIDMQQKECRY

SEQ ID NO: 8559 - protein, 119 aa, Zea mays
  Coding DNA Sequence Number=SeqID_2186
RMANHTVALDDTGITEVIGASFYPLTWYSIFCEQAQKRLFMGSIKDCGTHPCGVLVKQEMLVPAWSASRPGALRAQIAPLRRGDDRSCSLGGGEALMGVLVGLGVAVHTARVTQRWAPR

SEQ ID NO: 8560 - protein, 185 aa, Zea mays
  Coding DNA Sequence Number=SeqID_2188
  Gene Ontology: Mol. function=transcription factor activity; Cellular component=nucleus; Biological process=regulation of transcription, DNA-dependent
  Homolog annotation: Hit_ID=A0J702; Match level="QueryCoverage=77%, HitCoverage=92%, E-value=2e-62, Identity=79%"; Hit description =Putative uncharacterized protein
  Pfam annotation: Domain name=DUF163; Domain location=2-145; Score =227.4; E_value=3.2e-65; Accession=PF02590.8; Description =Uncharacterized ACR, COG1576
DLQLVAVGTKMPDWVQTGFMEYLRRFPKDMPFELTEVPAGKRGKNADIKRILEKEGEAMLAAVGKGNRIVTLDIPGQPWETPQLAQQLERWKLDGRDVSLLIGGPEGLAPACKAAAEQSWSLSALTLPHPLVRVLVAESLYRAWTDEITEQRFSRLHCRTETVCPPRPGGLCRHPAALQRAGGQS

SEQ ID NO: 8561 - protein, 230 aa, Zea mays
  misc_feature (230)..(230): Xaa can be any naturally occurring amino acid
  Coding DNA Sequence Number=SeqID_2189
HACSFTSELTPSPSWLRTKVGREEWDGSPPPEKLSRLWVGSAHSEARRAYNCFGERAPIRSGGNPTSFVLLPAFWAVIHPWRWSPSRDSLAAPSLGYPLSQPNHALQVSTYQADPLLYSTGFPLPCSFADLSREIENLCTPASGLCVRGMCSAVTTRLEMYPRAPASQVEEEVAGEGGAREGGASGERGAQATSADLVCARHRRVAKVPAKPSARGAGWGWRSPDVALTX

SEQ ID NO: 8562 - protein, 97 aa, Zea mays
  Coding DNA Sequence Number=SeqID_2191
  Gene Ontology: Mol. function=tRNA isopentenyltransferase activity; Cellular component=intracellular; Biological process=tRNA processing
  Homolog annotation: Hit_ID=Q33CD8; Match level="QueryCoverage=71%, HitCoverage=19%, E-value=5e-25, Identity=86%"; Hit description =Adenylate isopentenyltransferase
LTSCRALLEPSTIKTETHARFGVNGATASGGDNKAKVVLVMGATATGKSKLAIDLALRFGGEVVNSDKIQVHDGLDVVTNKVTAAERQGVPHHLIDG

SEQ ID NO: 8563 - protein, 109 aa, Zea mays
  Coding DNA Sequence Number=SeqID_2192
  Gene Ontology: Mol. function=ATP binding; Cellular component=plasma membrane; Biological process=nitrate assimilation
  Homolog annotation: Hit_ID=Q6D2V0; Match level="QueryCoverage=95%, HitCoverage=24%, E-value=2e-41, Identity=73%"; Hit description =Nitrate-binding proteint
ENWQGQKWQDPHAMRFFHDGSVSFPYLSDGMWFLTQLKRWGMLTEDPDYLGVAKQINRIDIYKQAAIAVGNITLPGSEMRSSTLIDGKVWDGTNPAVYAASFAINHKER

SEQ ID NO: 8564 - protein, 106 aa, Zea mays
  Coding DNA Sequence Number=SeqID_2193
  Gene Ontology: Mol. function=nitrate transmembrane transporter activity; Cellular component=integral to membrane; Biological process=nitrate transport
  Homolog annotation: Hit_ID=A8GFW9; Match level="QueryCoverage=99%, HitCoverage=34%, E-value=4e-22, Identity=48%"; Hit description =Nitrate ABC transporter, inner membrane subunit
  Subcellular localization annotation: CTP_CleavageSite=40; ConfidenceScore=5.27e-01
EVVMKSQTRSLTQPETLATRATVVPLQVTPKKMRSPARLRAFLQRAIPALCGVMLLLLIWQIAALSSKGFAGPYATWEAAKILFADPFYNNGPNDQGIGWNVLASL

SEQ ID NO: 8565 - protein, 215 aa, Zea mays
  Coding DNA Sequence Number=SeqID_2194
  Gene Ontology: Cellular component=integral to membrane
  Homolog annotation: Hit_ID=P46136; Match level="QueryCoverage=100%, HitCoverage=73%, E-value=4e-60, Identity=54%"; Hit description=Inner membrane protein yddG
  Pfam annotation: Domain name=DUF6; Domain location=15-138; Score =20.6; E_value=0.0046; Accession=PF00892.11; Description=Integral membrane protein DUF6
MPQSKATLTGLLAILLWSTIVGLIKSVSESFGPVTGAALIYSASALLLLLTVGFPDLRQFPRRYLLIGSLLFVCYELCLSLSLGFTHSGHQAIEVGMVNYLWPAMTIVLTVMVNRQKTSPLIIPGLLLAVAGICRVLSGDRGFSLGEMIDNVMDIPLSYGLAFGGAMIWAVYCVVTKKSAKGSNGITLFFMLTALTLWLKSLLSPQPPVVFSLQV

SEQ ID NO: 8566 - protein, 116 aa, Zea mays
  Coding DNA Sequence Number=SeqID_2195
KGTVNFFPQKTAPGEFPWGPTLFKPGGGPQKPQFWGPLNRGGFPPKNFKLCALPNGKNPSQNFTTPGHFGPLVGINRENPHGGPLKGKCFFPRGPSGDRARQKRLKPPRGPPPNFL

SEQ ID NO: 8567 - protein, 73 aa, Zea mays
  misc_feature (60)..(60): Xaa can be any naturally occurring amino acid
  Coding DNA Sequence Number=SeqID_2197
  Gene Ontology: Mol. function=transferase activity; Biological process= metabolic process
  Homolog annotation: Hit_ID=Q2NQU9; Match level="QueryCoverage=86%, HitCoverage=17%, E-value=2e-18, Identity=68%"; Hit description =Putative lipopolysaccharide glucosyltransferase
MASPIPAHFAPQNILLIKLRHHGDMLLTTPAINALRQRYPQANIDVLLYKETRPMLEAHXAIRQLHIIDRNWK

SEQ ID NO: 8568 - protein, 65 aa, Zea mays
  Coding DNA Sequence Number=SeqID_2198
HHQADPPQNAEALFGYLPIADCPESIKTCAHWQTGSETITSASLVGVGDSLINYEELGCNDDRLG

SEQ ID NO: 8569 - protein, 173 aa, Zea mays
  Coding DNA Sequence Number=SeqID_2200
  Gene Ontology: Mol. function=3-hydroxyacyl-CoA dehydrogenase activity; Cellular component=glycerol-3-phosphate dehydrogenase complex; Biological process=fatty acid metabolic process
  Homolog annotation: Hit_ID=Q39NP5; Match level="QueryCoverage=91%, HitCoverage=55%, E-value=1e-58, Identity=75%"; Hit description=3 -hydroxyacyl-CoA dehydrogenase
  Pfam annotation: Domain name=3HCDH_N; Domain location=17-172; Score =208.5; E_value=1.6e-59; Accession=PF02737.8; Description=3 -hydroxyacyl-CoA dehydrogenase, NAD binding domain
  Pfam annotation: Domain name=NAD_binding_2; Domain location=15-151; Score=-75.3; E_value=0.0071; Accession=PF03446.5; Description=NAD binding domain of 6-phosphogluconate dehydrogenase
  Pfam annotation: Domain name=ThiF; Domain location=17-148; Score= -44.7; E_value=0.012; Accession=PF00899.11; Description=ThiF family
  Pfam module annotation: Pfam domain module=3HCDH_N::NAD_binding _2::ThiF; Domain location=17-172::15-151::17-148
MQRIATTEWEQRMAIESVGIVGAGTMGNGIAQAVAVAGLKAVMIDVSDDALKRGVATLAHSMERLVSKGKLATAVRDAALARIDTSTDYQRLASVDLVIEAATENAELKTRILKQIDAVAHAGAIVASNTSSISITALATMLQDPTRFIGMHFFNPVPMMPLVEVNRGLQACK

SEQ ID NO: 8570 - protein, 99 aa, Zea mays
  misc_feature (94)..(94): Xaa can be any naturally occurring amino acid
  Coding DNA Sequence Number=SeqID_2201
  Gene Ontology: Cellular component=intracellular
  Homolog annotation: Hit_ID=A2Y0D1; Match level="QueryCoverage=64%, HitCoverage=4%, E-value=1e-17, Identity=71%"; Hit description =Putative uncharacterized protein
AAAANHEIPSEVARPYKKRRIFRKDSRRRKDMAHVSILLSHHLDDDVVKRQKKILARLRGSEAFSMADATHFVADRFCRTKNMLEAITIGSQIXTSMWL

SEQ ID NO: 8571 - protein, 142 aa, Zea mays
  Coding DNA Sequence Number=SeqID_2202
  Gene Ontology: Mol. function=nucleotide binding; Cellular component =chromosome; Biological process=response to DNA damage stimulus
  Homolog annotation: Hit_ID=A7MHW6; Match level="QueryCoverage=83%, HitCoverage=32%, E-value=5e-47, Identity=77%"; Hit description =Putative uncharacterized protein
ASLSQIDEEVKRLAKSGQLLSTIQHALHILADSDDTNLQSLLYSARNMLSELVSLDDKVSGVFNLLEEAAIQLSEASDELRHYCERLDLDPNRLYELEQRLSRQIALARKHHVSPEALPVLYQQLLDEAEQLSQQESDQESL

SEQ ID NO: 8572 - protein, 81 aa, Zea mays
  Coding DNA Sequence Number=SeqID_2203
  Homolog annotation: Hit_ID=A2Y7Q5; Match level="QueryCoverage=41%, HitCoverage=13%, E-value=3e-08, Identity=88%"; Hit description =Putative uncharacterized protein
  Pfam annotation: Domain name=VQ; Domain location=16-47; Score=29.0; E_ value=1.8e-05; Accession=PF05678.4; Description=VQ motif
MSARQDGSPNNPVTVRIIETVYVEAGTAADFKSVVQRLTGKDATAELPEESSSRPQSAQSSRVMGQAGSLGDRKAAAGAST

SEQ ID NO: 8573 - protein, 102 aa, Zea mays
  misc_feature (60)..(60): Xaa can be any naturally occurring amino acid
  misc_feature (85)..(85): Xaa can be any naturally occurring amino acid
  Coding DNA Sequence Number=SeqID_2204
  Gene Ontology: Mol. function=hydrolase activity, acting on glycosyl bonds; Cellular component=beta-galactosidase complex; Biological process=carbohydrate metabolic process
  Homolog annotation: Hit_ID=A4D0F8; Match level="QueryCoverage=78%, HitCoverage=9%, E-value=1e-28, Identity=68%"; Hit description=Beta -galactosidase
ASCSIYSISKLVLSAFLFSFVLQTENEYHHIQRACTKEGEYYVQWAAKMAVSLDMSVPWXMCKQTDAPDPVINACNGRPCGDTFXGPNIPYKPAIWTENWTA

SEQ ID NO: 8574 - protein, 139 aa, Zea mays
  Coding DNA Sequence Number=SeqID_2205
LVWPVSLVAARLPALAPAWFLLPLACLALWALPSALVSSWARWGGCLPGLVGPCVRPPWAGPRVVRLSLSSGPRPCVALPGSVCRRGCPLLSGARVGPVPSAPAAAVCASRGSYNSANGVFRLLPRSLARSASSVPAGP

SEQ ID NO: 8575 - protein, 131 aa, Zea mays
  misc_feature (31)..(31): Xaa can be any naturally occurring amino acid
  Coding DNA Sequence Number=SeqID_2207
  Homolog annotation: Hit_ID=A3BY05; Match level="QueryCoverage=75%, HitCoverage=28%, E-value=2e-31, Identity=61%"; Hit description =Putative uncharacterized protein
LGCGHGLPGIFAGLKGADLIHFQDFNAEVLXCPSRIVGFFAGDWSEMDKLLFCGDAEQGKTAGADTEGKVSNGYDIILMAETVYALSSLPNLYRLIKKCANPGGGGLTMGGKKTITFGIGGGNKAIFCLLG

SEQ ID NO: 8576 - protein, 98 aa, Zea mays
  misc_feature (62)..(62): Xaa can be any naturally occurring amino acid
  Coding DNA Sequence Number=SeqID_2208
  Homolog annotation: Hit_ID=A7QAS2; Match level="QueryCoverage=81%, HitCoverage=22%, E-value=1e-15, Identity=55%"; Hit description =Chromosome chr5 scaffold_72, whole genome shotgun sequence
ACLQIRRSQHAVINPAITIFLRMGAGGFGVPPLGCPDGKIFITYEWFLNQWTPTCFSLIHYXKNHTFRALQRAVKNFQMMIEAEKQVQHTVVDYISCF

SEQ ID NO: 8577 - protein, 117 aa, Zea mays
  Coding DNA Sequence Number=SeqID_2209
PRGLPGPTRPHCLFPTCGWTPCCTLLYSSMRSFPCRLGIADDDGGSDPAGRLPGDGTSKEAPESSEPCAQVLVPRADTRIHSLKLTKDRQQTLQELQKRNITEELAERERTHYVFQG

SEQ ID NO: 8578 - protein, 117 aa, Zea mays
  Coding DNA Sequence Number=SeqID_2211
  Gene Ontology: Mol. function=ARF guanyl-nucleotide exchange factor activity; Cellular component=intracellular; Biological process =regulation of ARF protein signal transduction
  Homolog annotation: Hit_ID=A2X1Y6; Match level="QueryCoverage=94%, HitCoverage=6%, E-value=2e-46, Identity=79%"; Hit description =Putative uncharacterized protein
DLQQPRVLADKFLKCNETETTTFTDCVKCLITFTSSKFSSDASLNAIAFLRFCAVKLAEEGFISHEKDTEQQPSKIDSSDGNSMVHKDDHVYFWVPLLAGLARLTTDSRPTIRKGSA

SEQ ID NO: 8579 - protein, 142 aa, Zea mays
  Coding DNA Sequence Number=SeqID_2212
  Gene Ontology: Mol. function=transporter activity; Cellular component= integral to membrane; Biological process=transport
  Homolog annotation: Hit_ID=A2W2X4; Match level="QueryCoverage=100%, HitCoverage=29%, E-value=2e-54, Identity=78%"; Hit description =General substrate transporter:Major facilitator superfamily
QGAAVGGEVPGAWVFVSEHVPSRHIGYACGTLTAGLTAGILLGSLVAAGINSRYSGAEVTAFAWRIPFLLGGVFGLFSVYLRRWLHETPVFAEMKAKKALAAEIPLKAVLRDHGRAVIVSMLLTWMLSAAIVVVILMTPALL

SEQ ID NO: 8580 - protein, 117 aa, Zea mays
  misc_feature (109)..(109): Xaa can be any naturally occurring amino acid
  misc_feature (112)..(112): Xaa can be any naturally occurring amino acid
  Coding DNA Sequence Number=SeqID_2213
  Gene Ontology: Mol. function=5-amino-6-(5-phosphoribosylamino)uracil reductase activity; Biological process=riboflavin biosynthetic process
  Homolog annotation: Hit_ID=A1UDC1; Match level="QueryCoverage=100%, HitCoverage=61%, E-value=1e-55, Identity=88%"; Hit description =Bifunctional deaminase-reductase domain protein
  Pfam annotation: Domain name=RibD_C; Domain location=4-117; Score= -58.8; E_value=0.091; Accession=PF01872.8; Description=RibD C -terminal domain
MGRLIYGFNVSVDGYIADAQGSIDWSEPSEELHQYWNDFERETALAFYGRRLYELMSAYWPTADAAPDAEPMIVDFARIWRNMPKVVFSRTLDSVDWNSRLERGDPVEXVVXKLKAE

SEQ ID NO: 8581 - protein, 131 aa, Zea mays
  Coding DNA Sequence Number=SeqID_2214
  Gene Ontology: Mol. function=transferase activity
  Homolog annotation: Hit_ID=A8ARK4; Match level="QueryCoverage=100%, HitCoverage=38%, E-value=6e-39, Identity=54%"; Hit description =Putative uncharacterized protein
MLNVKRVRYTDRVLYRYYMHDASISNRKRTGQHNVDYQRHYLKIARMLEEINTRYRHKVKIYPSFHAQITREALSVCHAIRREPDAAARQAMIADLFSSQTHKRMLRNARGARQWYQLLLWLSRIYRWRNK

SEQ ID NO: 8582 - protein, 199 aa, Zea mays
  Coding DNA Sequence Number=SeqID_2215
  Gene Ontology: Mol. function=transporter activity; Cellular component= integral to membrane; Biological process=transport
  Homolog annotation: Hit_ID=Q395H9; Match level="QueryCoverage=100%, HitCoverage=33%, E-value=3e-92, Identity=87%"; Hit description=ABC Fe3+ siderophore transporter, inner membrane subunit
  Pfam annotation: Domain name=BPD_transp_1; Domain location=2-199; Score=1.2; E_value=0.0065; Accession=PF00528.12; Description=Binding- protein-dependent transport s
MLFISIPLGGILAFMMVRTDLPGRRWLEPLLLTPVFVSPMVLAFGYVVAAGPVGFYSVWFKELCGVQNVPWNVYSIFAITVIVGLTHVPHVYLYSSAALRNLGSDVEEAARVTGARPFRVALDVSLPMTMPALLFAGVLVFFLGFEVFGLPLVLGDPEGHLVLATYLYKLTNKLGVPSYHLMAAVAVCIVAITFPLVLL

SEQ ID NO: 8583 - protein, 104 aa, Zea mays
  Coding DNA Sequence Number=SeqID_2216
SYAATANRHGGGGTLAAAPKETEEEHAHPRNSADATRSAAQQRPQRGSQKRTSSESSERHARPQNKDAHITRTPPPARREQHGEQGLQDPRSRTKASDHGADKP

SEQ ID NO: 8584 - protein, 60 aa, Zea mays
  misc_feature (36)..(36): Xaa can be any naturally occurring amino acid
  Coding DNA Sequence Number=SeqID_2218
  Gene Ontology: Mol. function=calcium-dependent phospholipid binding
  Homolog annotation: Hit_ID=Q43864; Match level="QueryCoverage=65%, HitCoverage=12%, E-value=4e-12, Identity=94%"; Hit description =Annexin p35
MGISSFQRCWCMALVSAYRYYDGPEVNTSLAHSEAXILHEKIHKKAYSDEEIDHQDSPVF

SEQ ID NO: 8585 - protein, 155 aa, Zea mays
  misc_feature (117)..(117): Xaa can be any naturally occurring amino acid
  Coding DNA Sequence Number=SeqID_2219
  Gene Ontology: Cellular component=integral to membrane; Biological process=negative regulation of apoptosis
  Homolog annotation: Hit_ID=P0AAC7; Match level="QueryCoverage=99%, HitCoverage=70%, E-value=4e-49, Identity=66%"; Hit description=Inner membrane protein yccA
  Pfam annotation: Domain name=UPF0005; Domain location=13-155; Score =17.5; E_value=5.8e-07; Accession=PF01027.11; Description =Uncharacterised protein family UPF0005
  Subcellular localization annotation: CTP_CleavageSite=45; ConfidenceScore=5.48e-01
MMDRIISSSQQQSLLSTHKVLRNTYFLLGLTLAFSAVTATLSTVYAMPSPGLILMLVGFYGLMFLTYRLANSPAGILAAFAFTGFLGYCLGPILSSFLTAGMGDVIAMALGGTALVXFCCSAYVLTTRRDMSFLGGMMMAGFVVLLVAVVANIFL

SEQ ID NO: 8586 - protein, 186 aa, Zea mays
  Coding DNA Sequence Number=SeqID_2220
  Gene Ontology: Mol. function=pyridoxal phosphate binding; Cellular component=membrane; Biological process=two-component signal transduction system (phosphorelay)
  Homolog annotation: Hit_ID=A5FXC5; Match level="QueryCoverage=100%, HitCoverage=48%, E-value=2e-82, Identity=82%"; Hit description =DegT/DnrJ/EryC1/StrS aminotransferase
  Pfam annotation: Domain name=DegT_DnrJ_EryC1; Domain location=1-186; Score=-76.9; E_value=1.6e-08; Accession=PF01041.8; Description =DegTDnrJEryC1StrS aminotransferase family
MAEGIGRRDAVFLPAFTYTATAEVPLLLGATPVFVDVDPRTFQMDLASLEARIATVKKAGALRPRAIIGVDLFGQPADWAGIATIAAREGLFTLDDCAQSFGAAQGGVRLGKAADATATSFFPSKPLGAYGDGGALFTQSAERAALYRSLRTHGEGTTRYEVLRTGMNGRLDTMQAAVLLAKLEVF

SEQ ID NO: 8587 - protein, 212 aa, Zea mays
  misc_feature (139)..(139): Xaa can be any naturally occurring amino acid
  misc_feature (161)..(161): Xaa can be any naturally occurring amino acid
  Coding DNA Sequence Number=SeqID_2221
  Gene Ontology: Mol. function=transferase activity, transferring glycosyl groups; Cellular component=membrane; Biological process =cell wall biogenesis
  Homolog annotation: Hit_ID=A3ABN2; Match level="QueryCoverage=97%, HitCoverage=74%, E-value=6e-75, Identity=55%"; Hit description =Putative uncharacterized protein
  Pfam annotation: Domain name=XG_FTase; Domain location=1-212; Score= -51.7; E_value=7.5e-08; Accession=PF03254.4; Description=Xyloglucan fucosyltransferase
LSRILLARYLFHPTNRVWGLFTRFYRAYLARAELRLGVQVRNFYPWAQQSPVVLRQITSCLWREKLLPEVLDTEENAVPAPRPGGARTTAVLVTSLRSWYYERIKGMYWDQATATGEDLSVHQPSHEGQQQYGKRSHSXRAWSEMYQLSLCNVLVTSGWSXTFGYVAQGLGGITPWVLHKPSNATSPPDPPCFRHVSMELCFHAPHVYDCKL

SEQ ID NO: 8588 - protein, 124 aa, Zea mays
  Coding DNA Sequence Number=SeqID_2222
  Homolog annotation: Hit_ID=Q6I5J7; Match level="QueryCoverage=82%, HitCoverage=33%, E-value=2e-25, Identity=60%"; Hit description =Putative uncharacterized protein OSJNBa0009E21.8
  Pfam annotation: Domain name=CCT; Domain location=78-122; Score=78.0; E_value=3e-20; Accession=PF06203.4; Description=CCT motif
  Subcellular localization annotation: CTP_CleavageSite=47; ConfidenceScore=5.14e-01
VHAARLLRIPLPDLPRVPYPPCSPSGYLLEFSSAGAMRCVFSTGDLRVTQSQSTSQAGRLTSDHKQAHKVGRYSAEERREKIERYRTKRNQRNFHKKINYECRKTLPDSRPRVQGRFARNGETE

SEQ ID NO: 8589 - protein, 65 aa, Zea mays
  Coding DNA Sequence Number=SeqID_2223
IPFHQRKAGKTCLPGLFLFCCDCPVVNHRCVICCEAWVCPPIMQPAPYATDSSINNPPGARIFFV

SEQ ID NO: 8590 - protein, 103 aa, Zea mays
  Coding DNA Sequence Number=SeqID_2225
  Gene Ontology: Mol. function=protein binding
  Homolog annotation: Hit_ID=A0IZH7; Match level="QueryCoverage=94%, HitCoverage=22%, E-value=8e-26, Identity=60%"; Hit description=HipA -like
SSTQPFDLLAKVGGRFRLTPFYDILSIYPVIGGAGLHIRDAKLAMGLNGSKGRKAAIEHIFPRHFIETAKTTKFALTAMAHILDEFRARTPEVIQRVQEQIPA

SEQ ID NO: 8591 - protein, 195 aa, Zea mays
  misc_feature (66)..(66): Xaa can be any naturally occurring amino acid
  misc_feature (86)..(86): Xaa can be any naturally occurring amino acid
  Coding DNA Sequence Number=SeqID_2226
  Homolog annotation: Hit_ID=Q6QP51; Match level="QueryCoverage=86%, HitCoverage=59%, E-value=6e-30, Identity=47%"; Hit description =Putative growth-regulating factor 1
SEHTLGSAKGKPCRASDLGQIALQADRRSDRSHFALSLTDLTRKQRRPPRSSCCANHPGETDNSQXSLERNRKLRLARPWASASGXVSASPDPRARPSPRPQKVVSASPDPRARSQPRPRKLVSASPDPRTQPQPRPRKVVSASPDPRARPQPRAREESCPRPTPASASGGVSASPDLGLRPTTPQGVHHYPIPS

SEQ ID NO: 8592 - protein, 118 aa, Zea mays
  Coding DNA Sequence Number=SeqID_2227
  Gene Ontology: Mol. function=transcription factor activity; Biological process=regulation of transcription, DNA-dependent
  Homolog annotation: Hit_ID=A8GF46; Match level="QueryCoverage=92%, HitCoverage=36%, E-value=1e-28, Identity=58%"; Hit description =Transcriptional regulator, LysR family
QHERLSLHTLASQPLCLAEPTRYFRRYLDGQLRETGVLPRVIVESASVMQLIQSAQVGLGVMVSPCGHLLPEMLHHLARRPIDIAPMGRQAALVIAEPGRASPLSQHFFDEARRHLAD

SEQ ID NO: 8593 - protein, 99 aa, Zea mays
  Coding DNA Sequence Number=SeqID_2228
  Gene Ontology: Mol. function=aspartic-type endopeptidase activity; Cellular component=lysosome; Biological process=sphingolipid metabolic process
  Homolog annotation: Hit_ID=A2ZVQ0; Match level="QueryCoverage=92%, HitCoverage=16%, E-value=1e-39, Identity=81%"; Hit description =Putative uncharacterized protein
  Pfam annotation: Domain name=Asp; Domain location=17-99; Score= -190.8; E_value=0.026; Accession=PF00026.14; Description=Eukaryotic aspartyl protease
  Subcellular localization annotation: CTP_CleavageSite=34; ConfidenceScore=5.15e-01
WSGSIAIVALKNFLNAQYFGQIGVVCPPQNFTVVFDTGSANLWVPSAKCFFSLACLFHPKYDSRQSSTYKPNGTPASIHYGTGGIAGFYSQDQVAVGNL

SEQ ID NO: 8594 - protein, 266 aa, Zea mays
  Coding DNA Sequence Number=SeqID_2229
  Gene Ontology: Mol. function=G-protein coupled receptor activity; Cellular component=integral to membrane; Biological process=cellular response to phosphate starvation
  Homolog annotation: Hit_ID=Q6K991; Match level="QueryCoverage=94%, HitCoverage=30%, E-value=1e-126, Identity=89%"; Hit description =Putative phosphate transporter
VRIDVPPTSPGRAALKVWEELVNVLRKDGADPAAAFVHRKKVQHAEKSIRDAFLALYRGLDLLNKFSSLNVKAFTKILKKFVKVSEQQRKTDLFSEKVKRSPFSSSDKVLQLADEVECIFSRHFAGNDRKVAMKYLKPQQPRNTHMITFLVGLFTGTFVSLFIIYSVLALVAGIFSSTGNTAYMEIVYHVFSMFALISLHVFLYGCNLLAWKSSRISHNFIFDFSPSTALTHRDAFLVSASIMCTVVARLVSVLLKLTDERGAPTR

SEQ ID NO: 8595 - protein, 125 aa, Zea mays
  misc_feature (107)..(108): Xaa can be any naturally occurring amino acid
  Coding DNA Sequence Number=SeqID_2230
  Gene Ontology: Mol. function=transporter activity; Cellular component= periplasmic space; Biological process=transport
  Homolog annotation: Hit_ID=A7MLM5; Match level="QueryCoverage=99%, HitCoverage=20%, E-value=9e-46, Identity=70%"; Hit description =Putative uncharacterized protein
LLMCSAIAPVHAVTIHESYAFAKLGEPKYAVNFSHYDYVNPAAPKGGKITLAVVGTYDNFNRYASRGNPGIGTDTLYDGLFTTSDDEPGSYYPLIAESARYPSDYHXXRVSINPHAQFQDGTPIT

SEQ ID NO: 8596 - protein, 63 aa, Zea mays
  Coding DNA Sequence Number=SeqID_2231
ILHPHDATHALPLDHNVKRRLTSPIRAHARNEKLSMPLLTLIKFISTTIDMSTLPLALWIQVP

SEQ ID NO: 8597 - protein, 228 aa, Zea mays
  Coding DNA Sequence Number=SeqID_2233
  Gene Ontology: Mol. function=transporter activity; Cellular component= outer membrane-bounded periplasmic space; Biological process=transport
  Homolog annotation: Hit_ID=Q6MXU4; Match level="QueryCoverage=96%, HitCoverage=87%, E-value=1e-108, Identity=89%"; Hit description =Exported solute-binding protein
  Pfam annotation: Domain name=SBP_bac_3; Domain location=29-228; Score= 209.9; E_value=6.1e-60; Accession=PF00497.10; Description=Bacterial extracellular solute-binding proteins, family 3
MVMNGAQTPVTLALVACSASFIAAAQDKLTVGVDTAFVPFEFKQGDKYVGFDIDLWDAIAKKMHVSYELHPMDFGGLIPGLQSRNLDVAMAGITITDARKQVVDFSNGYYDADLLMAVKSDDNSIKKFSDLTGKKVGLKQGTAAASFMKSKYKANYVEFPNIDNAYLDLQAGNLDAVVHDSPNVLYYVKTAGDGKVKASGENDTILPQQYGFAMQKNSSLTPKINAAL

SEQ ID NO: 8598 - protein, 52 aa, Zea mays
  Coding DNA Sequence Number=SeqID_2234
KAGICRMNISLVALASFVSLITRLISTGFHALTPVWPSSASMRVRTARRMHH

SEQ ID NO: 8599 - protein, 118 aa, Zea mays
  misc_feature (28)..(28): Xaa can be any naturally occurring amino acid
  misc_feature (38)..(38): Xaa can be any naturally occurring amino acid
  misc_feature (55)..(55): Xaa can be any naturally occurring amino acid
  misc_feature (65)..(65): Xaa can be any naturally occurring amino acid
  Coding DNA Sequence Number=SeqID_2236
  Gene Ontology: Cellular component=integral to membrane; Biological process=response to sucrose stimulus
  Homolog annotation: Hit_ID=Q10PI5; Match level="QueryCoverage=60%, HitCoverage=17%, E-value=1e-27, Identity=84%"; Hit description =Haemolysin-III related family protein, expressed
QLINPIARWPFYAFLGGAMICLLASSTXHLLSCHSRRXAYIMFRLDYAGMAAVIXATSFYPPVCXSFMCYPICLQTCTTGFITSPREWQIIAVLLYFRVFLKSGSSEAMQKHSLLLWA

SEQ ID NO: 8600 - protein, 103 aa, Zea mays
  Coding DNA Sequence Number=SeqID_2237
  Gene Ontology: Mol. function=signal transducer activity; Cellular component=membrane; Biological process=signal transduction
  Homolog annotation: Hit_ID=A7MFN8; Match level="QueryCoverage=87%, HitCoverage=13%, E-value=3e-24, Identity=56%"; Hit description =Putative uncharacterized protein
AFFVVLMLVTVLVINQFIAPQLSQNESRLVRYEVDGLAGRIVEQMNRVQAQQRAITEAAGVMDSAAIDTLLPALVNQYQDSNVFGGGIWPLPNRRDPAKEKDS

SEQ ID NO: 8601 - protein, 74 aa, Zea mays
  Coding DNA Sequence Number=SeqID_2238
  Homolog annotation: Hit_ID=A7PJN3; Match level="QueryCoverage=86%, HitCoverage=13%, E-value=9e-22, Identity=71%"; Hit description =Chromosome chr12 scaffold_18, whole genome shotgun sequence
MNYLPFAGLKNPITLMSHVTPVMAIATMILSLLLDPWSEFQKNSYFDSPWHVMRSCLLMLIGGSLAFFMVMSLT

SEQ ID NO: 8602 - protein, 121 aa, Zea mays
  Coding DNA Sequence Number=SeqID_2239
  Gene Ontology: Mol. function=prephenate dehydratase activity; Cellular component=cytoplasm; Biological process=aromatic amino acid family biosynthetic process
  Homolog annotation: Hit_ID=Q02286; Match level="QueryCoverage=100%, HitCoverage=31%, E-value=2e-55, Identity=90%"; Hit description=P -protein [Includes: Chorismate mutase (EC 5.4.99.5) (CM); Prephenate dehydratase (EC 4.2.1.51) (PDT)]
  Pfam annotation: Domain name=PDT; Domain location=1-115; Score=101.4; E_value=2.8e-27; Accession=PF00800.9; Description=Prephenate dehydratase
QQTSLSIVGELTIPIEHCVLVSGNTDLQQIETVYSHPQPFQQCSQFIIRFPQWKIEYTESTAAAMEKVAAMNSPHVAALGSEAGGELYGLQVLERNLANQQQTHTRFIVLARKPIEVSSQV

SEQ ID NO: 8603 - protein, 329 aa, Zea mays
  Coding DNA Sequence Number=SeqID_2240
  Gene Ontology: Mol. function=hydrolase activity, acting on carbon -nitrogen (but not peptide) bonds; Cellular component=chitosan layer of spore wall; Biological process=carbohydrate metabolic process
  Homolog annotation: Hit_ID=A8GA82; Match level="QueryCoverage=83%, HitCoverage=88%, E-value=1e-130, Identity=78%"; Hit description =Chitin deacetylase
  Pfam annotation: Domain name=Polysacc_deac_1; Domain location=120 -241; Score=44.1; E_value=5e-10; Accession=PF01522.11; Description =Polysaccharide deacetylase
MVLGCRGIFSLSQDLTKELGLPVIDGVSAAVKMVESLLALGFGTCRMSDVSEKKEYSFNKNYPRDLIGYAGQPPHAQWPGEARVAVQFVLNYEEGAENNVLHGDAGSEQFLSDIIGAASYADRHMSMDSLYEYGSRAGFWRIHQEFQQRGLPLTIFGVAMALARHPQIVEAIKAADYDVVSHGWRWIHYQGMDAKTERQHMQQAVDVLTELFGKAPTGWYTGRDSPNTRRLVVEQGGFSYDSDYYGDDLPFWTQVTCQDGTVKPHLIIPYTLECNDMRFATPQGFNTAEQFYTYLRDTFDVLYEEGATAPKMMSIGMHCRLLGRPGNCR

SEQ ID NO: 8604 - protein, 196 aa, Zea mays
  misc_feature (23)..(23): Xaa can be any naturally occurring amino acid
  misc_feature (77)..(77): Xaa can be any naturally occurring amino acid
  Coding DNA Sequence Number=SeqID_2241
  Gene Ontology: Mol. function=pyridoxal phosphate binding; Cellular component=cytoplasm; Biological process=metabolic process
  Homolog annotation: Hit_ID=A7MR13; Match level="QueryCoverage=63%, HitCoverage=30%, E-value=1e-31, Identity=56%"; Hit description =Putative uncharacterized protein
  Pfam annotation: Domain name=Aminotran_5; Domain location=1-179; Score=-200.0; E_value=0.091; Accession=PF00266.9; Description =Aminotransferase class-V
VIVDGAQGVVHCPPDVQALDIDXYAFSAHKLYGPMGTGVLYGKAELLYAIPVAGGGQMLTQVEFNGFTPQPGPWRFXAGTPELAGVVRLNSALGLVTPVQSGKTGSLKPQVANPAEKAISPNSGLPQVSGSGQAPRLCGGLKIRRVIPPQREYSVTAAWREQGHRGCGAGPRTCAPRRLMTAPWRQRHAARLICPL

SEQ ID NO: 8605 - protein, 91 aa, Zea mays
  Coding DNA Sequence Number=SeqID_2242
  Subcellular localization annotation: CTP_CleavageSite=49; ConfidenceScore=5.34e-01
GRSTHKGPGKQATNHDTQPSTDAGGRPKNSDRINTGHRHKRTRTVHSPCAKARRNRTNRCKKCRKKQQRGLKRAKRAQHTRGSRRTTPNTR

SEQ ID NO: 8606 - protein, 51 aa, Zea mays
  Coding DNA Sequence Number=SeqID_2244
  Gene Ontology: Mol. function=protein-tyrosine kinase activity; Biological process=protein amino acid phosphorylation
  Homolog annotation: Hit_ID=A2XLG6; Match level="QueryCoverage=100%, HitCoverage=14%, E-value=4e-13, Identity=66%"; Hit description =Putative uncharacterized protein
MTGKLTQKSDVYSFGIILLELLTGRKPIDHTMPIDQHNLRAWVCPLVAPQK

SEQ ID NO: 8607 - protein, 95 aa, Zea mays
  Coding DNA Sequence Number=SeqID_2245
  Gene Ontology: Mol. function=binding; Biological process=cell redox homeostasis
  Homolog annotation: Hit_ID=A3A242; Match level="QueryCoverage=71%, HitCoverage=10%, E-value=3e-23, Identity=77%"; Hit description =Putative uncharacterized protein
DVKHPTPERDELDDLRFEFDEHHARKIVQSDHDDPPQRIGKATFVVTEENRDASQEAKGKAMEAISEGKLEDAIEHLTNAIVLNPLSAIMYGTRG

SEQ ID NO: 8608 - protein, 74 aa, Zea mays
  Coding DNA Sequence Number=SeqID_2246
  Gene Ontology: Mol. function=signal transducer activity; Cellular component=myosin complex; Biological process=signal transduction
  Homolog annotation: Hit_ID=Q10F06; Match level="QueryCoverage=100%, HitCoverage=4%, E-value=7e-14, Identity=51%"; Hit description =Unconventional myosin heavy chain, putative, expressed
  Pfam annotation: Domain name=IQ; Domain location=17-37; Score=19.3; E_ value=0.014; Accession=PF00612.17; Description=IQ calmodulin-binding motif
QSQWRCHRDYSNFMKLKRAALTYQCAWRRSVARKELRKLKMAARDTQALKVAKEKLEEYVEELKSCLGREKKLR

SEQ ID NO: 8609 - protein, 142 aa, Zea mays
  Coding DNA Sequence Number=SeqID_2247
  Gene Ontology: Mol. function=endopeptidase inhibitor activity; Cellular component=plasma membrane; Biological process=metabolic process
  Homolog annotation: Hit_ID=A8GHX1; Match level="QueryCoverage=99%, HitCoverage=8%, E-value=8e-50, Identity=64%"; Hit description=Alpha -2-macroglobulin domain protein
  Pfam annotation: Domain name=A2M_N_2; Domain location=54-142; Score= -31.4; E_value=0.029; Accession=PF07703.4; Description=Alpha-2 -macroglobulin family N-termin
RISFRGGGPQKVSFPVEWGTYRLEVHAVDNVVSSVRFQAGYWWQDNTNGTGALRPDQVKLKIDKAAYQPGDTARVTVESPAAGKGYLLVESSSGTLWWQPLDVPAGGATINVPVSAEWKRHDLYLSAIVVRARDKANGTTPK

SEQ ID NO: 8610 - protein, 70 aa, Zea mays
  Coding DNA Sequence Number=SeqID_2248
LFKVLKVYSKPSYLGLQGGGQVHLYSKWLFSLLTNPLPFPNKTSQIMMTWKAILKQMEMEPLFTKNTREG

SEQ ID NO: 8611 - protein, 168 aa, Zea mays
  misc_feature (106)..(106): Xaa can be any naturally occurring amino acid
  misc_feature (157)..(157): Xaa can be any naturally occurring amino acid
  Coding DNA Sequence Number=SeqID_2250
  Gene Ontology: Mol. function=transcription regulator activity; Cellular component=intracellular; Biological process=regulation of transcription, DNA-dependent
  Homolog annotation: Hit_ID=A0TB24; Match level="QueryCoverage=98%, HitCoverage=63%, E-value=9e-83, Identity=98%"; Hit description =Transcriptional regulator, GntR family
  Pfam annotation: Domain name=GntR; Domain location=1-61; Score=61.8; E_value=2.3e-15; Accession=PF00392.11; Description=Bacterial regulatory proteins, gntR fa
  Pfam annotation: Domain name=UTRA; Domain location=81-165; Score =12.3; E_value=0.00055; Accession=PF07702.3; Description=UTRA domain
  Pfam module annotation: Pfam domain module=GntR::UTRA; Domain location=1-61::81-165
QLARKLGDAIHDNRWAAGEALPSERVLSEALGVSRITARKAIALLVEQGLIRRTQGAGNFIQPRYEDPLSRLSSFSEMLERRGFKPSSQWLEREIQPANRDEVIQXLGLSPAASVTRLKRLRLADGIVMAVENSTFPATLIPDPQAIGGSLYSYLEXARGTPIVRRAG

SEQ ID NO: 8612 - protein, 103 aa, Zea mays
  Coding DNA Sequence Number=SeqID_2251
  Gene Ontology: Mol. function=DNA primase activity; Biological process= DNA replication
  Homolog annotation: Hit_ID=Q69RL2; Match level="QueryCoverage=81%, HitCoverage=13%, E-value=9e-30, Identity=73%"; Hit description =Putative uncharacterized protein P0003B09.27
PRILYSRPAVYSRNRCFRLVFSSKSGKKSFLVPTKRFKCQELNDKDVFMESLICRLDDNCEKLLICKLDLECKKTLHFDSEISMSQLIRPIKGNRGSISNHSA

SEQ ID NO: 8613 - protein, 85 aa, Zea mays
  Coding DNA Sequence Number=SeqID_2252
LMPVPPRRSRRGSRLACVGVRVPARLLRARPRVLGGVGAACAGGRVVGWLCACSACGGLWCGGRGAVHAGVGGVGRVGGGSVGQG

SEQ ID NO: 8614 - protein, 98 aa, Zea mays
  Coding DNA Sequence Number=SeqID_2254
  Subcellular localization annotation: CTP_CleavageSite=39; ConfidenceScore=5.68e-01
MPGSRRRVSSSTTESGPMGLFHLPLVLARRSSTAVVLTSAARSPSRHSTRRAVTGVSLHKHGGRAGAWTVVGACLLHRCPKRITRRRAWRKRVSGCAC

SEQ ID NO: 8615 - protein, 67 aa, Zea mays
  Coding DNA Sequence Number=SeqID_2256
RGDWEGKKKRVESIWEEKPLAVQVATVSTNREDSWIKQHQATMNKLLRTNGDLEGEGELKGELGTVQ

SEQ ID NO: 8616 - protein, 148 aa, Zea mays
  Coding DNA Sequence Number=SeqID_2258
  Gene Ontology: Mol. function=sugar:hydrogen symporter activity; Cellular component=integral to membrane; Biological process =carbohydrate transport
  Homolog annotation: Hit_ID=Q2R0P9; Match level="QueryCoverage=69%, HitCoverage=21%, E-value=3e-31, Identity=68%"; Hit description=Sugar transporter family protein
MGSFSAPESARWAGDRTDAYVHCARVRRAGSRQPAQAVAVACAFLQDLGLSDVQVEVLTGSMNLFMLVSILGAGWAADLLGRRGTLVLANAFLMAGALAMSAGGSYAALVAARFVTSVGVGFARVVAPVYNAEISPASTRGVLSSLLD

SEQ ID NO: 8617 - protein, 197 aa, Zea mays
  misc_feature (35)..(35): Xaa can be any naturally occurring amino acid
  misc_feature (60)..(60): Xaa can be any naturally occurring amino acid
  misc_feature (96)..(96): Xaa can be any naturally occurring amino acid
  misc_feature (134)..(134): Xaa can be any naturally occurring amino acid
  misc_feature (161)..(161): Xaa can be any naturally occurring amino acid
  Coding DNA Sequence Number=SeqID_2259
  Gene Ontology: Mol. function=ribulose-bisphosphate carboxylase activity; Cellular component=chloroplast ribulose bisphosphate carboxylase complex; Biological process=carbon utilization by fixation of carbon dioxide
  Homolog annotation: Hit_ID=O98727; Match level="QueryCoverage=85%, HitCoverage=35%, E-value=2e-30, Identity=45%"; Hit description =Ribulose bisphosphate carboxylase large chain
QNLRSRVLLHWPLSTVMADGLTILDKDKGLCYHLXPGTGDPNQDMWHVPYTFYLREEGFXTNTFICIEGYGFRSIPSLPLEEVDIRTASAYTKTVXGHGHGVQRDRDNLYRRPLPLWASTPKPRLCLYDYNYAXSEYVRRRRGLAYTDDDENSHPHTLLRXRDRFCSCAESISQAQPGTVKCMGFTRMRAWALKPGP

SEQ ID NO: 8618 - protein, 158 aa, Zea mays
  Coding DNA Sequence Number=SeqID_2260
  Gene Ontology: Mol. function=catalytic activity; Biological process =phospholipid biosynthetic process
  Homolog annotation: Hit_ID=A3MM56; Match level="QueryCoverage=99%, HitCoverage=42%, E-value=1e-73, Identity=89%"; Hit description=Fatty acid/phospholipid synthesis protein plsX
  Pfam annotation: Domain name=FA_synthesis; Domain location=2-158; Score=-45.5; E_value=8.4e-09; Accession=PF02504.6; Description=Fatty acid synthesis protein
TVKLTIDCMGGDHGPSVTVPAAVKFVRAHPDAHLMLVGIESAIRAQLKKLKALDDPALTIVPATEVVAMDDPVEVALRKKKDSSMRVALNHVKEGAAQACISAGNTGALMAVSRYVLKTLPGIERPAIAFALPNPTGYKMMLDLGANVDCEPQHLLRV

SEQ ID NO: 8619 - protein, 121 aa, Zea mays
  Coding DNA Sequence Number=SeqID_2261
  Gene Ontology: Mol. function=aspartate kinase activity; Cellular component=chloroplast; Biological process=amino acid biosynthetic process
  Homolog annotation: Hit_ID=A3RL74; Match level="QueryCoverage=92%, HitCoverage=19%, E-value=8e-42, Identity=83%"; Hit description =Aspartokinase
  Pfam annotation: Domain name=ACT; Domain location=43-105; Score=17.4; E_value=0.056; Accession=PF01842.15; Description=ACT domain
PDEFSVSFVLIPFLFFTMLWQELDHVVEELENFAVVHLLQRRSIISLIGNVQRSSLILEKAFNVLRRNGVNVQMISQGASKVNISLVVNDSEAKQCVQALHSAFFENGLLLSEVARELMFA

SEQ ID NO: 8620 - protein, 133 aa, Zea mays
  Coding DNA Sequence Number=SeqID_2262
  Gene Ontology: Mol. function=2-dehydro-3-deoxy-phosphogluconate aldolase activity; Biological process=phosphoenolpyruvate-dependent sugar phosphotransferase system
  Homolog annotation: Hit_ID=A7MND7; Match level="QueryCoverage=52%, HitCoverage=28%, E-value=7e-27, Identity=82%"; Hit description =Putative uncharacterized protein
  Pfam annotation: Domain name=DUF1341; Domain location=1-62; Score= -94.3; E_value=0.00077; Accession=PF07071.2; Description=Protein of unknown function (DUF1341)
  Pfam annotation: Domain name=HTH_11; Domain location=71-127; Score =53.9; E_value=5.5e-13; Accession=PF08279.2; Description=HTH domain
  Pfam annotation: Domain name=HTH_DeoR; Domain location=71-122; Score =0.4; E_value=0.057; Accession=PF08220.3; Description=DeoR-like helix- turn-helix domain
  Pfam module annotation: Pfam domain module=DUF1341::HTH_11::HTH_DeoR; Domain location=1-62::71-127::71-122
MGGLKAVEEYRAVADACAHHDFWLEPTGGIDLSNFEEIVRIALEAGVSKVIPHVYSSIIDSASGDTRIDDRLAQLFAALQSETLPQDELARRFSVSTRTVRTDITALNALLEQHGAQFVLARGAGYQLKIDDA

SEQ ID NO: 8621 - protein, 97 aa, Zea mays
  Coding DNA Sequence Number=SeqID_2263
VPDCNHPSEAGEIMKKINSLLAAFALTAASHALADSQVTVHPAHDQRSFQIDHASTLSELVTNPALHSWWPGTVIAERGATAVAQQQHAQLLADLRA

SEQ ID NO: 8622 - protein, 115 aa, Zea mays
  Coding DNA Sequence Number=SeqID_2265
MACSKAELLAALLAVAGALSSAAVWEDYDHHMYHRCYRSCMRKCDDDDADDALKNSISPVATSVSDDHDHDHNHDDHHDDHDHDHDHDDHHDDHDHDHDYDDHHDHDHDDHNDNH

SEQ ID NO: 8623 - protein, 81 aa, Zea mays
  Coding DNA Sequence Number=SeqID_2266
TRPGAAHQAQQMWRSRAAVTDTLASAQADATRPYNPSKIATIAGNPRQAQKQRLHKRIRPNAIHELDPKKRNEGDGSRRGP

SEQ ID NO: 8624 - protein, 79 aa, Zea mays
  Coding DNA Sequence Number=SeqID_2268
SCDWLPGVRPSRFLSSSICSQCACWLVLTGFFAICWESHGPPIPFSSLLGSSCWPPGGPSVLVGRLVRVLSFSSWRSIR

SEQ ID NO: 8625 - protein, 156 aa, Zea mays
  misc_feature (87)..(87): Xaa can be any naturally occurring amino acid
  misc_feature (89)..(89): Xaa can be any naturally occurring amino acid
  misc_feature (111)..(111): Xaa can be any naturally occurring amino acid
  misc_feature (118)..(118): Xaa can be any naturally occurring amino acid
  Coding DNA Sequence Number=SeqID_2270
  Gene Ontology: Mol. function=electron transporter, transferring electrons within the cyclic electron transport pathway of photosynthesis activity; Cellular component=plasma membrane light -harvesting complex; Biological ...
  Gene Ontology: Cellular component=process=photosynthesis, light reaction
  Homolog annotation: Hit_ID=P83755; Match level="QueryCoverage=91%, HitCoverage=40%, E-value=2e-28, Identity=46%"; Hit description =Photosystem Q(B) protein precursor
TPEDAVVPIDPIGPGRSSVDRPIGICGTSKRMNESQAVHTILMHASHMVGASGVYGGCLFRDTHGPLETYGLIKKAGKNAYAHEGYXLXTDKETYHTEAVDGFIETLIIPXASLNTCXNIHLFLAGWPVLRIWYTALGITSFSIEPNWKHCQPIRK

SEQ ID NO: 8626 - protein, 87 aa, Zea mays
  misc_feature (17)..(17): Xaa can be any naturally occurring amino acid
  misc_feature (77)..(77): Xaa can be any naturally occurring amino acid
  Coding DNA Sequence Number=SeqID_2271
  Gene Ontology: Biological process=regulation of transcription
  Homolog annotation: Hit_ID=A2WXB7; Match level="QueryCoverage=98%, HitCoverage=18%, E-value=2e-23, Identity=68%"; Hit description =Putative uncharacterized protein
  Subcellular localization annotation: CTP_CleavageSite=51; ConfidenceScore=5.02e-01
VLSPESCGKLTLPAFLXQPGPRDGNTMVQRFIKRNKSKSTYHLYLCLSNAVSMSIVNLVPLLKRHRITTCTEYTISXMDSGTISRSK

SEQ ID NO: 8627 - protein, 125 aa, Zea mays
  Coding DNA Sequence Number=SeqID_2272
  Gene Ontology: Cellular component=cell outer membrane
  Homolog annotation: Hit_ID=P0A903; Match level="QueryCoverage=88%, HitCoverage=32%, E-value=3e-31, Identity=60%"; Hit description =Lipoprotein 34 precursor
QQQGQTVTTPVQVQRYTGQMLNDISTGLDKIDTASQDAAAGRASGQIDVQSGADDTGLPLLVLRSPFNVTWQRLPAALKRMGMEVTDDNRSQGSLKVTYKQPGSSAFDAIGAKDPELPNGDYKLQ

SEQ ID NO: 8628 - protein, 120 aa, Zea mays
  Coding DNA Sequence Number=SeqID_2273
  Subcellular localization annotation: CTP_CleavageSite=48; ConfidenceScore=5.53e-01
PLKSAPSIFSSISSDCCFFFFCFFFSFFSFFFFFLINQEKARFYSESRTTEVDGRCIYICMNITHAIIFIFLKGAAAHFVLHAFVTPATVLETLGATDQAAVLVAHANRTRSPGPLGSDP

SEQ ID NO: 8629 - protein, 106 aa, Zea mays
  Coding DNA Sequence Number=SeqID_2274
MFDAHNRLAAGATGSGSRQMVVMSVVETTHAKSALEVSLDPWAQFCAAVDGSGGIANASTAGGVAASIARQLQAAAFTDQVAFGALVDIATSQLRSKRKCLEDKIE

SEQ ID NO: 8630 - protein, 341 aa, Zea mays
  Coding DNA Sequence Number=SeqID_2276
  Homolog annotation: Hit_ID=Q7XIT1; Match level="QueryCoverage=87%, HitCoverage=54%, E-value=3e-22, Identity=36%"; Hit description =OsIre1p
MRSLRRVLIPLVLLAGLVFRVDDGGGAFLPPPPPALPAPPPRLALNGEAAPEDDGAAVSRSTEIVAAEARSTEFVAPARPKKQSFRELLVRPQPARHEPASLVTDEAKAESSSVLQFWDNGTIQLVDKLSQSPLWEITTGPPLSDQINTAEHSIPAVLNELEGPGIEGTPSKLNAPNVIVLKEGTPFISIHGSDALEPVQTPRKLPNTAGKSDIVLDDSQNQTQFVIQLIKPFTRDKKSVDIRGRSEGSPKRRKTRKKDGLVNSPETLTASDKECSETGGSTEAPMENSALKDALGGRHIESVSNNEASFSIKSKISNVKGMDVELWTHDGLPSAQLLKLM

SEQ ID NO: 8631 - protein, 105 aa, Zea mays
  Coding DNA Sequence Number=SeqID_2277
  Subcellular localization annotation: CTP_CleavageSite=86; ConfidenceScore=5.50e-01
YLLEPLLLISILRGASSSFCSSAILPAPPRFLPTRSGLPFLPAAPLVARSSSLSQSSPAPISMAGFLCLALPLTSSSRDLLKPLSMATRFSSLVRFPSQRSRFNL

SEQ ID NO: 8632 - protein, 79 aa, Zea mays
  Coding DNA Sequence Number=SeqID_2279
  Subcellular localization annotation: CTP_CleavageSite=42; ConfidenceScore=5.47e-01
QKNNRAGGRASSKQRRASSKQQQQTEEGGAQSSSKGRVAALRAAARGGRRRSQQQQPAEGGDAQSSSSKQRRAAALNSS

SEQ ID NO: 8633 - protein, 106 aa, Zea mays
  misc_feature (10)..(10): Xaa can be any naturally occurring amino acid
  Coding DNA Sequence Number=SeqID_2281
  Homolog annotation: Hit_ID=O48967; Match level="QueryCoverage=46%, HitCoverage=10%, E-value=1e-15, Identity=75%"; Hit description =Putative uncharacterized protein
ATGARGVRNXRPRPQKGNSGSCPIHPNSRHSAAECREIIDLAKHVSVRREQSSGDGSHLVADLVRKGSTTKRSYYSTRTRTPSASSDVKRQPEMHYGAWRPYPAAN

SEQ ID NO: 8634 - protein, 117 aa, Zea mays
  Coding DNA Sequence Number=SeqID_2282
MALGTDGAANLCGPHHSLFSLLKKDCPNLHLVKCICHGLDKCSSKASAALPGTLEALLRDSRNWFRNSACRKYEYQQEYQALTQYGADPPKLVKIGDTRWLSWHSAVRAHTEQYDWI

SEQ ID NO: 8635 - protein, 201 aa, Zea mays
  Coding DNA Sequence Number=SeqID_2284
  Homolog annotation: Hit_ID=A7PZQ7; Match level="QueryCoverage=73%, HitCoverage=24%, E-value=1e-35, Identity=50%"; Hit description =Chromosome chr15 scaffold_40, whole genome shotgun sequence
SAAARRSSASARQLGASLWEIHDVAREVRRSRRRGGRAIAAGREHGGGGELDQPQSSGGIRRHVADSSMKHHKFDQERSHRIQPFSPASYTSSVGDSNVNLTRSPTRSLGIMGRSMGEGYSLKTSTELLKVLNRIWSLEEQHTANLSVVNGLKLELQQAQTHIQELLQERRQYRHEVSSLMRQLSENKLVRKNKDHMKVDT

SEQ ID NO: 8636 - protein, 83 aa, Zea mays
  Coding DNA Sequence Number=SeqID_2285
  Gene Ontology: Mol. function=sugar:hydrogen symporter activity; Cellular component=integral to membrane; Biological process =carbohydrate transport
  Homolog annotation: Hit_ID=Q6ZD70; Match level="QueryCoverage=100%, HitCoverage=23%, E-value=9e-28, Identity=77%"; Hit description =Putative GDP-Mannose transporter
  Subcellular localization annotation: CTP_CleavageSite=37; ConfidenceScore=5.10e-01
AVAGGTTYLLFHAVGYIWQTSNCFLTASYSLTLRHVMDGAKQATKPRNLNELSMVLLNNVFFSLPSGIILVLGLNEVEYLLET

SEQ ID NO: 8637 - protein, 86 aa, Zea mays
  misc_feature (20)..(20): Xaa can be any naturally occurring amino acid
  Coding DNA Sequence Number=SeqID_2286
  Homolog annotation: Hit_ID=O48967; Match level="QueryCoverage=98%, HitCoverage=18%, E-value=2e-18, Identity=61%"; Hit description =Putative uncharacterized protein
  Subcellular localization annotation: CTP_CleavageSite=46; ConfidenceScore=5.07e-01
TAAVHFARQHTPAQTSRASXTRVALGALSAARELLHHPPSSTASPEAMKQWRDDVDRLLGMAHSGSIRPRRRSSRRQHEERTAARG

SEQ ID NO: 8638 - protein, 75 aa, Zea mays
  Coding DNA Sequence Number=SeqID_2287
GELGTTAMDEVGELEAGKQGRALEEGDSGGEETDAMAGQSRRRSSTGKGAQGRKCAQPEEEEKRAGDLHREQEQK

SEQ ID NO: 8639 - protein, 109 aa, Zea mays
  Coding DNA Sequence Number=SeqID_2289
MATHRPGAAEERAATRQPNTPANRDPAPHARPPKSQRRTQTARQRYGDERGPNQGPQNRRPASYPTGEQPGDYRRDTGAHGADHQTPNETRQQNARHCQRATRTGHRHV

SEQ ID NO: 8640 - protein, 142 aa, Zea mays
  misc_feature (114)..(114): Xaa can be any naturally occurring amino acid
  Coding DNA Sequence Number=SeqID_2291
  Homolog annotation: Hit_ID=A5BTW4; Match level="QueryCoverage=52%, HitCoverage=6%, E-value=1e-14, Identity=49%"; Hit description =Putative uncharacterized protein
MTRLVARTPPDSYPLCIFVMVLYLVKSSRYLYYCPRPHGEEREEQEGEAGQQVALSTGTKSACTRRSCWTRTTLMTPRTQRLNGIDFLERLHGKRMLLMGDSMNWNQFESMLCXGFTEQGQMFEMHEHRISKGQGFFIFEFT

SEQ ID NO: 8641 - protein, 127 aa, Zea mays
  misc_feature (36)..(36): Xaa can be any naturally occurring amino acid
  Coding DNA Sequence Number=SeqID_2292
  Gene Ontology: Cellular component=integral to membrane
  Homolog annotation: Hit_ID=A4WFG1; Match level="QueryCoverage=100%, HitCoverage=18%, E-value=5e-46, Identity=70%"; Hit description =Integral membrane protein, YccS/YhfK family
MMDTLMGCLIALAGMIWLWPHRQSGLLRNNAHDALXAYQEALRLLLGPEQAPEKLAYQRVKVNQALNALFNSLNQASTEPGFNFQYLQHMRLWVTHSQSIVQHMIAMTILAREHSMLTPNLAERYLQ

SEQ ID NO: 8642 - protein, 230 aa, Zea mays
  Coding DNA Sequence Number=SeqID_2293
MHGGEWKDGVDESNGASGRDVGVCDAGGNPRARAHPVPVRDREARALTMTLPTPAHVGAGTRTREGQTVSGKEGRNGDTDHGCDRRVRVPPIGRRIDRCRLCLCPLPIIFISDCMLWAWAWASRVGETEQIKGRHGLEGSTTSDKKDVRWHTRHHVMMAKARCGGALPGVEYGEDAPGRATDRSIYREEEMETASVHACGAKEGTYGVGAPTNHHQQATVLEVQVQPSRG

SEQ ID NO: 8643 - protein, 90 aa, Zea mays
  misc_feature (40)..(40): Xaa can be any naturally occurring amino acid
  misc_feature (63)..(63): Xaa can be any naturally occurring amino acid
  Coding DNA Sequence Number=SeqID_2295
  Gene Ontology: Mol. function=protein serine/threonine kinase activity; Cellular component=cytoplasm; Biological process=protein amino acid phosphorylation
  Homolog annotation: Hit_ID=Q5J4W4; Match level="QueryCoverage=94%, HitCoverage=22%, E-value=1e-21, Identity=62%"; Hit description =Mitogen-activated protein kinase 2
IPLFKNLSHSACMLNAKCDLKIEDFGFARTTTQTDFMIDXVVLYRAHQFELNSSEYTQAIDMXSVGCIFGEMVIREPSFSGKNYVNQGYR

SEQ ID NO: 8644 - protein, 86 aa, Zea mays
  misc_feature (60)..(60): Xaa can be any naturally occurring amino acid
  Coding DNA Sequence Number=SeqID_2296
  Gene Ontology: Mol. function=glyceraldehyde-3-phosphate dehydrogenase (phosphorylating) activity; Biological process=metabolic process
  Homolog annotation: Hit_ID=A6T970; Match level="QueryCoverage=97%, HitCoverage=25%, E-value=3e-17, Identity=58%"; Hit description =Glyceraldehyde-3-phosphate dehydrogenase
  Pfam annotation: Domain name=Gp_dh_C; Domain location=1-86; Score =0.2; E_value=3.8e-07; Accession=PF02800.10; Description =Glyceraldehyde 3-phosphate dehydrogenase, C-
  Subcellular localization annotation: CTP_CleavageSite=27; ConfidenceScore=5.06e-01
TINTAPLHQLPQKALLGARTAALSIVPYSSGTAKALVRVIPELEGRLTGYSLRVPVPVVXKVDLTVTLKRHVTAEEVNDAFKPTAA

SEQ ID NO: 8645 - protein, 249 aa, Zea mays
  Coding DNA Sequence Number=SeqID_2297
  Gene Ontology: Mol. function=zinc ion binding; Biological process=RNA- dependent DNA replication
  Homolog annotation: Hit_ID=Q8LNC1; Match level="QueryCoverage=97%, HitCoverage=23%, E-value=2e-50, Identity=44%"; Hit description =Putative transposable element
  Pfam annotation: Domain name=SWIM; Domain location=10-42; Score=27.4; E_value=5.3e-05; Accession=PF04434.8; Description=SWIM zinc finger
PDSSSTHNRHVVKSYLHHCTCEEWQQTVKPCQHALALITAQQTVDVNMEDFVHEYYSVERFRKAYSRLIEPLPDRTQWPEVDLPFVVGAPLDKRLAGRQRKLRIKSCLEGGGGGKPKKDAKVAAVEAEWGTKKQMIRGKRKCKRCGELGHGETSYKCSLNGTKKRKRKPRKNTTKYGENAKLPTKRRGQNVEETNAAVDQTAQETANAYQDVQETNAIISSPIRPNRETILQDSPVRLTRRPALFCEVI

SEQ ID NO: 8646 - protein, 100 aa, Zea mays
  misc_feature (17)..(17): Xaa can be any naturally occurring amino acid
  misc_feature (60)..(60): Xaa can be any naturally occurring amino acid
  Coding DNA Sequence Number=SeqID_2298
  Gene Ontology: Mol. function=carbohydrate binding; Biological process= carbohydrate metabolic process
  Homolog annotation: Hit_ID=Q40784; Match level="QueryCoverage=100%, HitCoverage=30%, E-value=7e-20, Identity=48%"; Hit description =Putative apospory-associated protein C
AMGGGTPRAHSQTETHXNLEQHGSGRNRVGTMDTSPAPIPENTETQAYNTLIWKPTKKDXKIWPTRLEYRLRAPLGPCGDMRQTYTSTKPHTDGGPFSYT

SEQ ID NO: 8647 - protein, 171 aa, Zea mays
  Coding DNA Sequence Number=SeqID_2299
  Gene Ontology: Mol. function=tetracycline:hydrogen antiporter activity; Cellular component=integral to membrane; Biological process=response to antibiotic
  Homolog annotation: Hit_ID=A4W4V3; Match level="QueryCoverage=100%, HitCoverage=33%, E-value=3e-68, Identity=72%"; Hit description=Drug resistance transporter, EmrB/QacA subfamily
MAAVADVIPPADRGRYQGLFGGVFGLATVIGPLLGGFIVQHMSWRWIFYINLPLGLLALLIINAVFKADSRRKPHEIDYPGAVFLSLALVGVTLFTSEGGTLREWSDPQLWCILAMGLVGVLGFVYEERRAWEPIIPLDLFRNRSFSLASLMAFIIGMALFGSVTFLPLYL

SEQ ID NO: 8648 - protein, 88 aa, Zea mays
  Coding DNA Sequence Number=SeqID_2300
  Gene Ontology: Mol. function=protein serine/threonine kinase activity; Cellular component=cytoplasm; Biological process=protein amino acid phosphorylation
  Homolog annotation: Hit_ID=A2YQ36; Match level="QueryCoverage=96%, HitCoverage=19%, E-value=4e-37, Identity=84%"; Hit description =Putative uncharacterized protein
NLLLDVAGNLKISDFGLSALSDQVKNDGLLHTTCGTPNYVAPEVIDDKGYDGALADLWSCGVILFVMLAGCLPFEDDNMASLYKKAYT

SEQ ID NO: 8649 - protein, 195 aa, Zea mays
  Coding DNA Sequence Number=SeqID_2301
PFKATNQRPSRVIGKNRPFAPLVLPQAIANQIASQNPSTLWATLRWPWWWPPGTLGSIGSAPPFLKGPWVFLRVFFSPPRNESIFNVKVLRNFFGVLALVQATTVLPGRVRKPLKVQKVSTQNRVKKVGWVALAKVRVPVFRAPPEAAGLVAEAGPPLVGTAFQAAAAAAAGRTGLVPGPRYPGFFFFFFFFFFF

SEQ ID NO: 8650 - protein, 88 aa, Zea mays
  Coding DNA Sequence Number=SeqID_2303
KWKLHAVLVGISRDEDKMEYFYLLYEIKSSYVYICTLLKENCGRQQLAKTHCVHIRPTETNLRSQGLMCVIVSVNLISQMLSASSCRF

SEQ ID NO: 8651 - protein, 142 aa, Zea mays
  Coding DNA Sequence Number=SeqID_2305
  Gene Ontology: Mol. function=ATPase activity, coupled to transmembrane movement of substances; Cellular component=integral to membrane; Biological process=transport
  Homolog annotation: Hit_ID=Q3KGD6; Match level="QueryCoverage=98%, HitCoverage=22%, E-value=4e-65, Identity=90%"; Hit description=ABC transporter-like
  Pfam annotation: Domain name=ABC_tran; Domain location=1-109; Score =31.6; E_value=1.9e-09; Accession=PF00005.17; Description=ABC transporter
QAAIVRARADEFIPLLSDPQGRTGLDAHVGERGVKLSGGQRQRIAIARVLLKDAPVLIMDEATSALDSEVEAAIQESLETLMQGKTVIAIAHRLSTIAKMDRLVVLENGGIVEMGNHRELLAHGGLYARLWQHQTGGFVGVD

SEQ ID NO: 8652 - protein, 206 aa, Zea mays
  Coding DNA Sequence Number=SeqID_2306
  Gene Ontology: Mol. function=ATPase activity, coupled to transmembrane movement of substances; Cellular component=integral to membrane; Biological process=transport
  Homolog annotation: Hit_ID=Q82MU1; Match level="QueryCoverage=100%, HitCoverage=33%, E-value=6e-47, Identity=53%"; Hit description =Putative ABC transporter permease protein
  Pfam annotation: Domain name=ABC_membrane; Domain location=1-206; Score=-42.6; E_value=0.088; Accession=PF00664.13; Description=ABC transporter transmembrane region
  Subcellular localization annotation: CTP_CleavageSite=30; ConfidenceScore=5.07e-01
IALGDTMLHRTAVTNWITAAARVQQLLARRAALVGAALTRRVAAGEIVSVSTGDVEKIGWLVESVSRFTAAAVTVVAVCVALLVYQPALGVIVALGVPVLALAVLPLLPRATRRADVQREKAGRATELASDTVAGLRVLRGIGGEALFLDRYRKASQEVRRAAVHNARMWSLISAIQVLLPGLLLIGVVWRGVVLAREGRIDVGEL

SEQ ID NO: 8653 - protein, 108 aa, Zea mays
  Coding DNA Sequence Number=SeqID_2307
  Homolog annotation: Hit_ID=A3AXB6; Match level="QueryCoverage=63%, HitCoverage=16%, E-value=8e-08, Identity=44%"; Hit description =Putative uncharacterized protein
  Subcellular localization annotation: CTP_CleavageSite=37; ConfidenceScore=5.14e-01
HSRTAMAPKDRAPLVSAGLAVASLLLLLLCATRCEARAMAATARRLSSSSPLLNALYKLNFIRTVEPARRIPTAGDEEAASDINSPFCVNPPDAPSATTPPFKPFTPS

SEQ ID NO: 8654 - protein, 66 aa, Zea mays
  Coding DNA Sequence Number=SeqID_2308
PEFYNVSTRKTLTLPNSINLQTSHFHQLVKERLCSYRSYLLTPAHTEWPMAHEAISSSYAYARYPT

SEQ ID NO: 8655 - protein, 118 aa, Zea mays
  Coding DNA Sequence Number=SeqID_2310
  Gene Ontology: Cellular component=periplasmic space
  Homolog annotation: Hit_ID=A7MHB5; Match level="QueryCoverage=97%, HitCoverage=62%, E-value=7e-28, Identity=51%"; Hit description =Putative uncharacterized protein
MRNLVKYAGIGLLVLGLAACDQKKDDTAANSNGTSASQSAQTVNLMDGKLSFSLPAGMSDKSGKLGSESTNMHVYADETGQRAIIVIAGDPTSEGLDALAQRLEQQQRNREPQLQACK

SEQ ID NO: 8656 - protein, 288 aa, Zea mays
  misc_feature (142)..(142): Xaa can be any naturally occurring amino acid
  Coding DNA Sequence Number=SeqID_2311
  Gene Ontology: Mol. function=protein serine/threonine kinase activity; Cellular component=cell cortex; Biological process=protein amino acid phosphorylation
  Homolog annotation: Hit_ID=A2Z4S4; Match level="QueryCoverage=73%, HitCoverage=72%, E-value=3e-70, Identity=64%"; Hit description =Putative uncharacterized protein
  Pfam annotation: Domain name=APH; Domain location=14-188; Score=-5.8; E_value=0.016; Accession=PF01636.13; Description=Phosphotransferase enzyme family
  Pfam annotation: Domain name=Pkinase; Domain location=12-289; Score =145.4; E_value=1.6e-40; Accession=PF00069.15; Description=Protein kinase domain
  Pfam annotation: Domain name=Pkinase_Tyr; Domain location=12-230; Score=37.7; E_value=1.1e-14; Accession=PF07714.7; Description =Protein tyrosine kinase
  Pfam module annotation: Pfam domain module=APH::Pkinase::Pkinase_Tyr; Domain location=14-188::12-289::12-230
MMADAGISGRHLTRLRTLGRGASGAVVSLFAAGEGELVAVKSAGGAAAAAQLRREGGIMASLSSPHVLPCLGFRAAAGGEFQLLLEFAPGGSLVDAVGRNGGRLEEPAVRAYAADVARGIAYLHGEEGVVHGDVKARNVVIXADGRAMLADFGCARRAGSGGPIGGTPAFMAPEVARGEDQGPAADVWALGCTVIEMATGRAPWTHVDDVPAAVRLIGYTDVVSEAPEWLSAETKESRRHRNEGEPPPQPRRRCPNHKSCQAGPSTAHDGVPGYLGRRAASRSTAQPV

SEQ ID NO: 8657 - protein, 171 aa, Zea mays
  Coding DNA Sequence Number=SeqID_2312
  Gene Ontology: Mol. function=asparaginase activity
  Homolog annotation: Hit_ID=A0T774; Match level="QueryCoverage=100%, HitCoverage=48%, E-value=5e-69, Identity=78%"; Hit description=L -asparaginase II
  Pfam annotation: Domain name=Asparaginase_II; Domain location=1-171; Score=-10.4; E_value=6.9e-11; Accession=PF06089.3; Description=L -asparaginase II
KHVGMLAGARAIGAAIADYHLPDHPMQVRVKHVVADACGLRDDEVDWAIDGCNLPTPAFSLDRLARLYASLADGADAVDARGADTASARVRALARIHHAMTAHPELVAGEGRYCTVLMDAFDGQVVGKLGADACYGIGVRTSARTRALGADGALGISVKIGDGNIDVLYMM

SEQ ID NO: 8658 - protein, 187 aa, Zea mays
  Coding DNA Sequence Number=SeqID_2313
  Gene Ontology: Mol. function=gamma-glutamyltransferase activity; Cellular component=periplasmic space; Biological process=glutathione biosynthetic process
  Homolog annotation: Hit_ID=A2W479; Match level="QueryCoverage=93%, HitCoverage=28%, E-value=2e-86, Identity=89%"; Hit description=Gamma- glutamyltranspeptidase
  Pfam annotation: Domain name=G_glu_transpept; Domain location=1-187; Score=-183.5; E_value=1e-07; Accession=PF01019.11; Description=Gamma- glutamyltranspeptidase
PSSAGVTMCKTLNVLEGYDLRKMGYQSASVVHYMTEEMRHAYEDRNTLLGDPNFIDNPVVKLTSKQYAAEIRKQISGDTATASVHVQPGVGVHEKPETTHYSIVDRDGNAVSTTYTVNGRFGAVVIAPGTGFFLNDEMDDFTVKVGAQNLFGLVQGTRNSIAPDKRPLSSMAPTIVKKDGKVVMVVG

SEQ ID NO: 8659 - protein, 168 aa, Zea mays
  misc_feature (150)..(168): Xaa can be any naturally occurring amino acid
  Coding DNA Sequence Number=SeqID_2314
  Subcellular localization annotation: CTP_CleavageSite=43; ConfidenceScore=5.28e-01
TRAAPAAPARRASSSSGSPAEAPAGPAVPIGPRRLGSTLPYTASAAKMDPPQGLDMDLTETEIERNTAIVCSACARAACTAPERSREARWTAGSSSVASSSIQATGGRKEESSHGAEEEERMNWTGLFPFFFSFFFAGTLLLHLCCCCCXXXXXXXXXXXXXXXXXXX

SEQ ID NO: 8660 - protein, 106 aa, Zea mays
  misc_feature (56)..(56): Xaa can be any naturally occurring amino acid
  Coding DNA Sequence Number=SeqID_2316
  Gene Ontology: Mol. function=structural constituent of ribosome; Cellular component=ribonucleoprotein complex; Biological process =translation
  Homolog annotation: Hit_ID=A1EA53; Match level="QueryCoverage=95%, HitCoverage=64%, E-value=1e-15, Identity=49%"; Hit description =Chloroplast 30S ribosomal protein S7
QQKRETHPQTRERTGAHPVTPTRGARTRRKKQGGTHKGPPERGTKQGRAQAHRETXEPAQNRPEQRKAKAHTNEQPEADKGSGRAIRQPEATKRRAKANHAGGQNR

SEQ ID NO: 8661 - protein, 111 aa, Zea mays
  Coding DNA Sequence Number=SeqID_2317
  Gene Ontology: Mol. function=oxidoreductase activity; Cellular component=periplasmic space; Biological process=electron transport
  Homolog annotation: Hit_ID=Q7W8I6; Match level="QueryCoverage=61%, HitCoverage=8%, E-value=2e-17, Identity=57%"; Hit description =Putative biotin sulfoxide reductase
MVIVTHEIGFAREVADNIVFYEGGRIVAAGPTQQVLDDPENGRGDRLTIEPFHGDPDPSPLLQNLHNVLHHPARVAQPMVRRGWLENGPGANPRRGNDDYVAVSWEQAYTL

SEQ ID NO: 8662 - protein, 81 aa, Zea mays
  Coding DNA Sequence Number=SeqID_2318
  Subcellular localization annotation: CTP_CleavageSite=25; ConfidenceScore=5.34e-01
MGRAGLYNLVTDVTSSAAARSPETRQMRPPGSLRSSGRARTGQEGLANSLADYRLQERDQKRENDEGKTLRAGRATPARNS

SEQ ID NO: 8663 - protein, 148 aa, Zea mays
  Coding DNA Sequence Number=SeqID_2320
  Gene Ontology: Mol. function=isoquinoline 1-oxidoreductase activity; Cellular component=cytoplasm; Biological process=electron transport
  Homolog annotation: Hit_ID=A8GE75; Match level="QueryCoverage=95%, HitCoverage=78%, E-value=1e-48, Identity=66%"; Hit description=(2Fe -2S)-binding domain protein
  Pfam annotation: Domain name=Fer2; Domain location=7-67; Score=26.7; E_value=8.3e-05; Accession=PF00111.17; Description=2Fe-2S iron -sulfur cluster binding domain
  Pfam annotation: Domain name=Fer2_2; Domain location=75-148; Score =111.0; E_value=3.7e-30; Accession=PF01799.10; Description=[2Fe-2S] binding domain
  Pfam module annotation: Pfam domain module=Fer2::Fer2_2; Domain location=7-67::75-148
STCHYALEVNGATHPISSYRDTSLLLVLRNHLQLNGPKYGCGLGECGACTVLIDGVAARACVIPAYGVRQRAITTLEGLGNREALHPVQQAFIEAQAAQCGYCLNGMIMTTAALLRAQPCPDDRQIRAALSGNLCRCGTHQEILCAVK

SEQ ID NO: 8664 - protein, 69 aa, Zea mays
  Coding DNA Sequence Number=SeqID_2321
  Gene Ontology: Mol. function=protein-N(PI)-phosphohistidine-sugar phosphotransferase activity; Cellular component=integral to membrane; Biological process=phosphoenolpyruvate-dependent sugar phosphotransferase system
  Homolog annotation: Hit_ID=A8GE24; Match level="QueryCoverage=100%, HitCoverage=14%, E-value=2e-14, Identity=62%"; Hit description=PTS system, maltose and glucose-specific IIBC subunit precursor
VAAVWFVGCNAIFCLAICGFNIKTPGREAETSRVEQQVSRAGVGKSGYNTPAILAALGGVVFITGLDNC

SEQ ID NO: 8665 - protein, 103 aa, Zea mays
  misc_feature (10)..(10): Xaa can be any naturally occurring amino acid
  Coding DNA Sequence Number=SeqID_2322
  Gene Ontology: Mol. function=pyruvate kinase activity; Cellular component=cytoplasm; Biological process=glycolysis
  Homolog annotation: Hit_ID=Q5NBQ0; Match level="QueryCoverage=99%, HitCoverage=20%, E-value=6e-29, Identity=59%"; Hit description =Pyruvate kinase
  Pfam annotation: Domain name=PK_C; Domain location=1-101; Score=38.3; E_value=2.4e-08; Accession=PF02887.6; Description=Pyruvate kinase, alphabeta domain
ATARLMAKYXPNNPVITVVFPEIKTGNNFNWTCSNEHPARHNMILRDMIPMLSAATTKPFDIEEAISFAIDHAKKLKICKSGDLVVALHHIGASSVIKILTVN

SEQ ID NO: 8666 - protein, 165 aa, Zea mays
  Coding DNA Sequence Number=SeqID_2323
  Subcellular localization annotation: CTP_CleavageSite=36; ConfidenceScore=5.34e-01
FFFFFFFFFFFFFFFFFFFFFFFFLRRTVFFFFDPKGGPHWERHLPGQKNIPGGGPTIGWTKGPPAGNGQPFFNKKGPYPRGKTPKNHGGILLQRLTGKKGTPFFFWHPKINSWISGALSQNQLGGIGLQIPLPQGEALQSQLGGFQMAKGQQSPSALAPRAGHP

SEQ ID NO: 8667 - protein, 123 aa, Zea mays
  Coding DNA Sequence Number=SeqID_2325
  Gene Ontology: Mol. function=DNA binding; Cellular component =mitochondrion
  Homolog annotation: Hit_ID=Q53PX7; Match level="QueryCoverage=79%, HitCoverage=23%, E-value=2e-28, Identity=67%"; Hit description =Expressed protein
  Pfam annotation: Domain name=DUF296; Domain location=36-123; Score =11.1; E_value=6.6e-05; Accession=PF03479.5; Description=Domain of unknown function (DUF296)
HKRSAREESPSTGNHKVHRSANATGEWYALSAGGSFTPHVIIVGTGEVRHALHLHLIAASDVAARVMSFSQKGPRSVCMLSANGTISNVTLRQPGSSGSTFTYEVHTVKLSMTGVFVCGSSGP

SEQ ID NO: 8668 - protein, 82 aa, Zea mays
  misc_feature (30)..(30): Xaa can be any naturally occurring amino acid
  Coding DNA Sequence Number=SeqID_2326
  Gene Ontology: Mol. function=protein methyltransferase activity; Biological process=protein amino acid methylation
  Homolog annotation: Hit_ID=Q2QM99; Match level="QueryCoverage=96%, HitCoverage=22%, E-value=5e-28, Identity=75%"; Hit description =Modification methylase, HemK family protein, expressed
MIEIRHGSWFEPLEDLKGKLMGVISNPPYXIPTDDLPGLQPGVGWHEPKLALDGGKDGLEHLLHFLERLFLNLKPGGFFVLR

SEQ ID NO: 8669 - protein, 182 aa, Zea mays
  Coding DNA Sequence Number=SeqID_2327
  Gene Ontology: Mol. function=transporter activity; Cellular component= cell outer membrane; Biological process=transport
  Homolog annotation: Hit_ID=A6T9R9; Match level="QueryCoverage=100%, HitCoverage=25%, E-value=6e-71, Identity=68%"; Hit description =Probable tonB-dependent receptor
  Pfam annotation: Domain name=TonB_dep_Rec; Domain location=7-181; Score=1.9; E_value=0.046; Accession=PF00593.14; Description=TonB dependent receptor
QPATSNTVELGSKKRLGNGLLTVALFQTDTKNEIVSDSSYEGRTSYKNAGETRRRGLELGLDQQFGYDWHLKAAWTLLDVRYRSNACGSDSCDGKRIPGIARNMVYAGLAYAPEQGWYAGGDLRYLSDIAANDQNDVKAPAYTVVGLNSGYKWLVQNWTLDLFGRVDNLLDRHYIGSVIVNE

SEQ ID NO: 8670 - protein, 211 aa, Zea mays
  Coding DNA Sequence Number=SeqID_2328
  Gene Ontology: Mol. function=hydrolase activity, acting on glycosyl bonds; Cellular component=extracellular region; Biological process =cell wall organization and biogenesis
  Homolog annotation: Hit_ID=A2ZSL0; Match level="QueryCoverage=64%, HitCoverage=18%, E-value=5e-62, Identity=79%"; Hit description =Putative uncharacterized protein
  Subcellular localization annotation: CTP_CleavageSite=58; ConfidenceScore=5.82e-01
AAQPPRCSTANPPASKPIPPPPIPPAANNSSSAWGNVFDVRAFGASGSGSGNDTRAFRAAWKAACSSNSTTPTLLVPSDGVFTISSTIFAGPCKSAVTFQIDGVLMPPDGPASWPATDSRKQWIVFYKADRLTLAGEGTIEGNGEEWWDLPCKPHRGPNGSTLRGPCDSPAVKLARRQTWISPHHHVVCVFFFWSKSLTVSLCSWNLCGVC

SEQ ID NO: 8671 - protein, 226 aa, Zea mays
  Coding DNA Sequence Number=SeqID_2329
  Gene Ontology: Mol. function=penicillin binding; Cellular component =peptidoglycan-based cell wall; Biological process=peptidoglycan -based cell wall biogenesis
  Homolog annotation: Hit_ID=A8GHX0; Match level="QueryCoverage=99%, HitCoverage=29%, E-value=4e-78, Identity=61%"; Hit description =Penicillin-binding protein 1C precursor
SPGAAWIVRRILAGEAQPAASGAVADIVPLAWKTGTSYGYRDAWSVGITPRYLIGVWVGRPDATPVAGQFGYASAVPVMQQVNHLLAGHLPARGVPGDPRPATVSPVSICWPGGQPLPAGDENCRQRRYSWVLNQTVPPTLLAPGQEGVNGLRQRFWQNSKGLRVAADCPDAQSRERVMWPLPLEPWLPPGERRAQRLPPVDATCPPLNQGDSAPLAVTGVINGQR

SEQ ID NO: 8672 - protein, 195 aa, Zea mays
  Coding DNA Sequence Number=SeqID_222
  Homolog annotation: Hit_ID=A2Z3D4; Match level="QueryCoverage=65%, HitCoverage=8%, E-value=2e-16, Identity=40%"; Hit description =Putative uncharacterized protein
LDPSSPDVARWHLQGTQRRAHQRHLRHLQARRILCLCRQDCYFIHRRLTPRTVPAATNAEMVNSDLTSKDQISSLPQTDDRLADGIEYKSGEDVSHGRVSSSAEVGTRNQMSSTNVSNLTMPSKVMSTPSAASVQPSLTTIADNDNQSNEWVVPTQVVNISGCTTWTRTTEHNNLKVLVAHQGKWEVAAHPPSLS

SEQ ID NO: 8673 - protein, 327 aa, Zea mays
  misc_feature (31)..(31): Xaa can be any naturally occurring amino acid
  misc_feature (196)..(196): Xaa can be any naturally occurring amino acid
  Coding DNA Sequence Number=SeqID_223
  Gene Ontology: Mol. function=calcium:sodium antiporter activity; Cellular component=integral to membrane; Biological process=calcium ion transport
  Homolog annotation: Hit_ID=Q2R041; Match level="QueryCoverage=90%, HitCoverage=56%, E-value=1e-111, Identity=69%"; Hit description =Magnesium/proton exchanger, putative, expressed
  Pfam annotation: Domain name=Na_Ca_ex; Domain location=47-209; Score =62.0; E_value=2e-15; Accession=PF01699.14; Description=Sodiumcalcium exchanger protein
  Subcellular localization annotation: CTP_CleavageSite=34; ConfidenceScore=5.32e-01
MAGAAPPPPSSASCGTDAAYLLFRGETLLPXGVRASLYTVALAYFFVGLSTVAARFFKSMEQIMRHSREVVVGVDPRTGAPVVRRGKVWNYTVADIALLAFGTSFPKISLATIDAIRNLGQLTAGGLGPGTLIGSVVFDLFLIHAVCVVMPRAGSKKISDLGVWLVELFWSFWAYIWLYVILKVWTPRVITLWEAXLTVLQYGLLLLHAYAQDKRWPFVARGERPEDWVPPEDVSAVYYAKCDGIDETLPMGADGNDGIVDIFSAHSYYDAAECSQLAEEDMEGSSTMDQVVKNTQENMFWLSIWWQQFVDASTVIWFVVGLFMCTE

SEQ ID NO: 8674 - protein, 98 aa, Zea mays
  Coding DNA Sequence Number=SeqID_224
  Gene Ontology: Mol. function=nucleic acid binding
  Homolog annotation: Hit_ID=Q7XGX3; Match level="QueryCoverage=100%, HitCoverage=35%, E-value=7e-25, Identity=52%"; Hit description =Putative uncharacterized protein
LELCQENQLRVLVVASLAIWLRFSIWLAYLGSDAVPIYALATLFNSHRCDTGSSSRAGVEFLWASIMLVHLGGQDSITAYNIEDNELWRRHVFTAVSQ

SEQ ID NO: 8675 - protein, 90 aa, Zea mays
  misc_feature (72)..(90): Xaa can be any naturally occurring amino acid
  Coding DNA Sequence Number=SeqID_225
FCSTAQKKPLLVDYNLQFQFQLEYLSPTPVQVGCVMGGRMSIEHPHISHNKPYSEETVQSHLEVISKSLGPXXXXXXXXXXXXXXXXXXX

SEQ ID NO: 8676 - protein, 218 aa, Zea mays
  misc_feature (107)..(107): Xaa can be any naturally occurring amino acid
  Coding DNA Sequence Number=SeqID_226
  Gene Ontology: Mol. function=peptidase activity; Cellular component =chloroplast thylakoid membrane; Biological process=lipid transport
  Homolog annotation: Hit_ID=Q108Z8; Match level="QueryCoverage=37%, HitCoverage=49%, E-value=3e-37, Identity=86%"; Hit description =Protease inhibitor/seed storage/LTP family protein, expressed
  Pfam annotation: Domain name=GRP; Domain location=1-125; Score=-24.4; E_value=0.024; Accession=PF07172.2; Description=Glycine rich protein family
  Pfam annotation: Domain name=Tryp_alpha_amyl; Domain location=136 -217; Score=81.9; E_value=2.1e-21; Accession=PF00234.12; Description =Protease inhibitorseed storageLTP f
  Pfam module annotation: Pfam domain module=GRP::Tryp_alpha_amyl; Domain location=1-125::136-217
MASTKVPLFLVLNLLLFAAANACPYCPGNNGHGSSGHHGGSGHGGGGSGGSGGGSSGGGYGPIGGGGSGGGGGGGYGPIGDGGSGGGIGVGPIGGGSGGIGPIGGGXGGGYGPIGGGGGGIGGGGSDGTSGWYGHCPTNALKLGVCANVLDLIKAKVGVPVNEPCCPLLNGLVELEAAVCLCTAIKANVLGLNLNIPVNLSLVLNFCGKGVPTGFKCL

SEQ ID NO: 8677 - protein, 139 aa, Zea mays
  Coding DNA Sequence Number=SeqID_227
  Gene Ontology: Mol. function=transferase activity, transferring nitrogenous groups; Cellular component=endoplasmic reticulum membrane; Biological process=biosynthetic process
  Homolog annotation: Hit_ID=Q2R3K3; Match level="QueryCoverage=89%, HitCoverage=24%, E-value=4e-52, Identity=85%"; Hit description =Serine palmitoyltransferase 2, putative, expressed
IILSVFAWDVLLAGAQKLARIRENSNFFRSELKKMGFEVLGDNDSPVMPIMLYNPAKIPAFSRECFRQKVAVITVAFPVTPLLLARARFCISASHTREDLFLVCATPIYYQVISRVGDLVGIKYFPAQRPKIAEAGHGN

SEQ ID NO: 8678 - protein, 113 aa, Zea mays
  Coding DNA Sequence Number=SeqID_228
  Subcellular localization annotation: CTP_CleavageSite=75; ConfidenceScore=5.08e-01
ATNVVLVPPVPTSLPVQGALAGSTPDAYLIVMPSLVFVLREILVAGVTPPSKASTVDEATLVVLPPPPTSGAAVLAVQSKAAPPLITTSSTLARLAVPLPPRERHEDCPSAPC

SEQ ID NO: 8679 - protein, 77 aa, Zea mays
  Coding DNA Sequence Number=SeqID_230
SAPHPRPWKRPEGITTEAPACGTEENRRHKTSSTTLLGMRDRTRVLHRAIRGRSRRFLARSTTLRLVIAHRSDSIAV

SEQ ID NO: 8680 - protein, 98 aa, Zea mays
  Coding DNA Sequence Number=SeqID_232
  Subcellular localization annotation: CTP_CleavageSite=75; ConfidenceScore=5.01e-01
RDGSPLLRETGAPSTTRRRSTTNHGLRRGAPLPWMSLALDQALHTTPHSLANPSSHLPRPSFLIVDGDGSLKRRRGETLSSLPLCRGWWLGVWKYRLD

SEQ ID NO: 8681 - protein, 82 aa, Zea mays
  Coding DNA Sequence Number=SeqID_234
  Gene Ontology: Mol. function=iron-sulfur cluster binding; Cellular component=mitochondrion; Biological process=biotin biosynthetic process
  Homolog annotation: Hit_ID=Q69U93; Match level="QueryCoverage=81%, HitCoverage=17%, E-value=1e-23, Identity=80%"; Hit description =Putative biotin synthase
  Pfam annotation: Domain name=BATS; Domain location=1-75; Score=19.7; E_value=0.00032; Accession=PF06968.3; Description=Biotin and Thiamin Synthesis associated doma
CSTEIWGMICMVVTARIVMPRATVRLSAGRIWFSMPDQALCFLGGANSIFANEKLLTTANNDFDVDQAMFTFCSPIYAYAIY

SEQ ID NO: 8682 - protein, 100 aa, Zea mays
  misc_feature (38)..(38): Xaa can be any naturally occurring amino acid
  Coding DNA Sequence Number=SeqID_235
  Gene Ontology: Mol. function=5-methyltetrahydropteroyltriglutamate -homocysteine S-methyltransferase activity; Cellular component =cytoplasm; Biological process=methionine biosynthetic process
  Homolog annotation: Hit_ID=Q8W0Q7; Match level="QueryCoverage=97%, HitCoverage=11%, E-value=3e-32, Identity=72%"; Hit description =Methionine synthase protein
IHTHMCYSNFNDIIHSIDMDADVITIQNSQSDEKIRSXNTELKYGAKIGREGVNYGAGISPGLYAIHSLRIPSTEEIEDRIDKMLVVLDTNILWVNPSLS

SEQ ID NO: 8683 - protein, 319 aa, Zea mays
  misc_feature (35)..(35): Xaa can be any naturally occurring amino acid
  Coding DNA Sequence Number=SeqID_236
  Gene Ontology: Biological process=response to stress
  Homolog annotation: Hit_ID=A7Q8T7; Match level="QueryCoverage=84%, HitCoverage=89%, E-value=2e-91, Identity=60%"; Hit description =Chromosome chr5 scaffold_64, whole genome shotgun sequence
MGAPAPSVTVVAAVVVCLCGAFARAQDMDNEWQRXPYRGFFGGPGSLLPQSDVDLLEFPLNLEYLETEFFCWAALGYGLDAIDANLTGGGPPSIGGQSASLTPFIRDVATQFCYQEVGHLRAIKQTVRGFPRPLLDISAANFGKIIEQALNATLDPPFNPYENSVNFLVASYIIPYVGLTGYVGANPRLFTPQARKLLAGLLAVESAQDAVIRTLLYERGMARVAGYAVGVAEVTAHISDLRNSLGRRGVKDEGLVVAAELGPEGLTVGNVIAGDHLSLAYDRTPEEILGIVYGTGNPAQHGGFFPQGADGRIARGLLA

SEQ ID NO: 8684 - protein, 453 aa, Zea mays
  misc_feature (73)..(73): Xaa can be any naturally occurring amino acid
  misc_feature (85)..(85): Xaa can be any naturally occurring amino acid
  misc_feature (94)..(94): Xaa can be any naturally occurring amino acid
  misc_feature (242)..(242): Xaa can be any naturally occurring amino acid
  misc_feature (256)..(256): Xaa can be any naturally occurring amino acid
  misc_feature (280)..(280): Xaa can be any naturally occurring amino acid
  misc_feature (296)..(296): Xaa can be any naturally occurring amino acid
  misc_feature (316)..(316): Xaa can be any naturally occurring amino acid
  misc_feature (330)..(330): Xaa can be any naturally occurring amino acid
  misc_feature (337)..(337): Xaa can be any naturally occurring amino acid
  Coding DNA Sequence Number=SeqID_237
  Gene Ontology: Mol. function=aspartic-type endopeptidase activity; Cellular component=chromatin; Biological process=RNA-dependent DNA replication
  Homolog annotation: Hit_ID=Q10KN1; Match level="QueryCoverage=100%, HitCoverage=45%, E-value=1e-117, Identity=47%"; Hit description =Retrotransposon protein, putative, unclassified
  Pfam annotation: Domain name=RVT_1; Domain location=100-269; Score =154.7; E_value=2.5e-43; Accession=PF00078.17; Description=Reverse transcriptase (RNA-dependent
VFKWERGNDIWACALVFSPVCPSDMAIPKEADHLLHQFVDIFASPTALPPHRSYDHYIPLIPRAAPVNSKPYXYSLLHKDEIEKXVKVLLDQGXIVHSTSPFASPVLLVQKKNGSWRLCVDYRRLNALTIKNRFHIPLVEDILHELASTKYFTELALTVGYHQVRMAPKDEHTTAFKTHHDHYQFKVMSFGLSNAPATFQCIMDDILSPFLRKLVLVFMDNILVYSPSLELHLTHLQAVFSXLRVHHFYLKPSKCXIAQLQIEYLGHVISVAGVATDPTXAKVMQHWPTPTSISAXRLVRLFLIHMDWRGLIRIGXDYDLLGIETPSIPXNPYGLGXEPNKPLRGFWGLIGYYRMFIRDYGIIARPLTLLLCKNAFLWSPQAETSFLHIKRAMQQTPVLALPDFQCPFVVETNTYDLDVGAILMQHDKPIDFLSNALSEKHRHISIYEKEFHA

SEQ ID NO: 8685 - protein, 204 aa, Zea mays
  Coding DNA Sequence Number=SeqID_238
  Gene Ontology: Mol. function=binding
  Homolog annotation: Hit_ID=A2YN66; Match level="QueryCoverage=83%, HitCoverage=34%, E-value=4e-73, Identity=81%"; Hit description =Putative uncharacterized protein
  Pfam annotation: Domain name=IFRD; Domain location=1-185; Score= -76.0; E_value=0.00023; Accession=PF05004.4; Description=Interferon -related developmental regulator (IFRD)
MSGWDRMEESHPQLCRVLQAWSDASKMISELDCLAVITFVGASDMAETELSLKVVWNVIHPKSGSNVGNVRKPRPPVLAAAVSTWTFLLTTIGSWRINKNSWKERIAFLSTLLEADDRAVRMAAGEALALCFELNLLDVSSREDDDVNTGGTTGSKNKLFLDMQALKAKISGHHRMFWALQRPNQGALCFLCMLAFPVFPVILL

SEQ ID NO: 8686 - protein, 172 aa, Zea mays
  misc_feature (45)..(45): Xaa can be any naturally occurring amino acid
  misc_feature (101)..(101): Xaa can be any naturally occurring amino acid
  misc_feature (116)..(116): Xaa can be any naturally occurring amino acid
  Coding DNA Sequence Number=SeqID_2330
  Gene Ontology: Mol. function=RNA-directed DNA polymerase activity; Cellular component=intracellular; Biological process=RNA-dependent DNA replication
  Homolog annotation: Hit_ID=Q8SA85; Match level="QueryCoverage=97%, HitCoverage=12%, E-value=2e-37, Identity=50%"; Hit description=Prpol
PLQKVKEVQKLTGRFTALNMFILKSVKRCLPFLKVLRGGRGFAWXPEQGTAFEDIKSYSTDLATLSSPTLGANLLLYLVASRHTMSAVLIQEKLAEGRLIXSLMYFIYEVLTESKXHMPEIEKITYVVVMVSRNLRHYFEAHKIKVLTEQSLSDIYNNPEASVRIGKWAMEL

SEQ ID NO: 8687 - protein, 156 aa, Zea mays
  Coding DNA Sequence Number=SeqID_2331
  Gene Ontology: Mol. function=nucleoside-triphosphatase activity; Cellular component=intracellular; Biological process=regulation of transcription, DNA-dependent
  Homolog annotation: Hit_ID=A2VXU0; Match level="QueryCoverage=100%, HitCoverage=23%, E-value=4e-59, Identity=76%"; Hit description =Transcriptional activator of acetoin/glycerol metabolism
SPDNRDSQRLVYQLVRQSAALIEDGYFVHSTAQHWILFGHPNRHYVEAQPEWLIAFDECGNIVAANRHARDALPALREPRHIDEIFDATEMPLRDAARLDAIVALRLRATGAPLYARLRAPLRRAGRETGTAARRPGTAQRHVGALTAVLQSSDAR

SEQ ID NO: 8688 - protein, 125 aa, Zea mays
  Coding DNA Sequence Number=SeqID_2332
  Gene Ontology: Mol. function=tetracycline:hydrogen antiporter activity; Cellular component=integral to membrane; Biological process=response to antibiotic
  Homolog annotation: Hit_ID=A4W4V3; Match level="QueryCoverage=62%, HitCoverage=15%, E-value=2e-31, Identity=83%"; Hit description=Drug resistance transporter, EmrB/QacA subfamily
MAQSVPRPRYPAVTRATENSNSAIRLLMGALMLVMLLSALDQTIVSTALPTIVGELGGLDRLSWIVTAYMLASTLVVPLYGKFGDLFGRRTVLQISVVLFLLGSALCGLAQNMPQLILPARCRHA

SEQ ID NO: 8689 - protein, 106 aa, Zea mays
  Coding DNA Sequence Number=SeqID_2333
  Homolog annotation: Hit_ID=Q2QX78; Match level="QueryCoverage=98%, HitCoverage=10%, E-value=4e-44, Identity=83%"; Hit description=Nrap protein, expressed
PLDFSLLVDGQDPVSSSGALLEAFDTIAKQLRLLDDIPLKISTVQPLDSAFRHTSVFPPEPHPLAYGRNSQRLPKFATTCIRSLEVMIQLEGSGNWPLDPVAMEKG

SEQ ID NO: 8690 - protein, 228 aa, Zea mays
  Coding DNA Sequence Number=SeqID_2334
  Gene Ontology: Mol. function=nucleoside-triphosphatase activity; Cellular component=plasma membrane; Biological process=peptide transport
  Homolog annotation: Hit_ID=A1B1Q5; Match level="QueryCoverage=100%, HitCoverage=47%, E-value=1e-62, Identity=54%"; Hit description=ABC transporter related
  Pfam annotation: Domain name=ABC_tran; Domain location=125-226; Score= -48.1; E_value=0.0066; Accession=PF00005.17; Description=ABC transporter
  Pfam annotation: Domain name=oligo_HPY; Domain location=58-105; Score= -3.6; E_value=0.0027; Accession=PF08352.2; Description=Oligopeptidedip eptide transporter, C-
  Pfam module annotation: Pfam domain module=ABC_tran::oligo_HPY; Domain location=125-226::58-105
LIADEPTKGLDVARRDEVSQLLQREVADGGMLLTITHDIALARQLGGDVLVIHKGSVIEQGPAQQVLQSPQQPYTRALLAADPAVWPARQQTVIGARPVISTQDIVLARGGKRLGVPRDFTLHAGEIVGLHGASGSGKSSFGDVLLGLLAPQQGRVTHHADADALKYQKIYQDPSALFPPQRTLGQSINDVLRRHALPPAQRDALMARLALHPALLTRRPEALSGGEL

SEQ ID NO: 8691 - protein, 106 aa, Zea mays
  misc_feature (38)..(39): Xaa can be any naturally occurring amino acid
  misc_feature (62)..(62): Xaa can be any naturally occurring amino acid
  misc_feature (71)..(71): Xaa can be any naturally occurring amino acid
  misc_feature (75)..(75): Xaa can be any naturally occurring amino acid
  misc_feature (83)..(83): Xaa can be any naturally occurring amino acid
  misc_feature (98)..(99): Xaa can be any naturally occurring amino acid
  Coding DNA Sequence Number=SeqID_2335
  Gene Ontology: Mol. function=ATP-dependent helicase activity
  Homolog annotation: Hit_ID=Q6Z4K6; Match level="QueryCoverage=69%, HitCoverage=11%, E-value=7e-11, Identity=54%"; Hit description=DEAD -box ATP-dependent RNA helicase 52B
PPRHRTTGHSTDATRKAPPNGPPETPQPREPERGAETXXATPGRQKDPPERARDPPQTTKKXAPDEPDRRXDTGXEPQTPKTXEGTDTPQRGERQTKXXRATHPKE

SEQ ID NO: 8692 - protein, 108 aa, Zea mays
  Coding DNA Sequence Number=SeqID_2336
  Homolog annotation: Hit_ID=Q10NT0; Match level="QueryCoverage=78%, HitCoverage=9%, E-value=5e-12, Identity=48%"; Hit description =Expressed protein
  Subcellular localization annotation: CTP_CleavageSite=71; ConfidenceScore=5.05e-01
MVSQAPMAGAGAGAGANLTAALCRKSNRVARVLAYALLEWVLIALLLADGVFSYLISRFAAFFGLAPPCALCSRLGVDSLFETHPRHRGVGAEPLRRLLCDVHAAELS

SEQ ID NO: 8693 - protein, 79 aa, Zea mays
  Coding DNA Sequence Number=SeqID_2337
  Subcellular localization annotation: CTP_CleavageSite=45; ConfidenceScore=5.73e-01
SRSGGAAGVAASALVALGAPAPASVLVRLRRRALVPRRVPWSCASAGARSGVALRACARSWASLAGPQRRGSALAGSGP

SEQ ID NO: 8694 - protein, 126 aa, Zea mays
  misc_feature (96)..(96): Xaa can be any naturally occurring amino acid
  Coding DNA Sequence Number=SeqID_2339
  Gene Ontology: Mol. function=oxidoreductase activity, acting on CH-OH group of donors; Biological process=alcohol metabolic process
  Homolog annotation: Hit_ID=A2XBT6; Match level="QueryCoverage=84%, HitCoverage=19%, E-value=4e-34, Identity=69%"; Hit description =Putative uncharacterized protein
MVCGVALALATVLLGSSCITAVTASPEAQRYSFRFVRHTRDAPLVSYYNYIVVGGGTAGCPLAATLSERSRVLLLERGGQPYGSRNVSSEYHLADXKPLSPAQRFVSEDGVVNARGGGLCGWQGTS

SEQ ID NO: 8695 - protein, 399 aa, Zea mays
  misc_feature (116)..(116): Xaa can be any naturally occurring amino acid
  misc_feature (224)..(224): Xaa can be any naturally occurring amino acid
  misc_feature (278)..(278): Xaa can be any naturally occurring amino acid
  misc_feature (366)..(366): Xaa can be any naturally occurring amino acid
  Coding DNA Sequence Number=SeqID_2340
  Gene Ontology: Mol. function=ribonuclease H activity; Biological process=DNA integration
  Homolog annotation: Hit_ID=O48967; Match level="QueryCoverage=99%, HitCoverage=85%, E-value=1e-146, Identity=68%"; Hit description =Putative uncharacterized protein
  Pfam annotation: Domain name=Retrotrans_gag; Domain location=181-273; Score=73.2; E_value=8.8e-19; Accession=PF03732.7; Description =Retrotransposon gag protein
  Subcellular localization annotation: CTP_CleavageSite=61; ConfidenceScore=5.21e-01
CTQELLRHPPSSTASPGAMKQWRDDVVRLLGMAHSGSARPRPRSSQRQHEASASVHSPSVKASPTEDLRVELNRRRAGEDARLSLERAPERQQNIEGRNLDLDFTVVALQTPRGAXIQASVPLAGVGCAALADHLRAATWPSKFRPHLPEKYDGTSNPSEFLLVYVTAITAAGGDTAIMATYFHVALSGPIRTWLMNLTPGSIYYWEQLCAWLTANFTSAYQQXGVEAHLHAVRQESGETHRAFISRFTKVRRTIPRISDASICTAFRQGVRDEKMLXKLATHDVETVTTLFTLADKCARAAKGRAWHSAPQIGVDQTGGTGAVSQDGKKKKKKNRGHEKPQSVAPIVAAATGGQGERNKSPTIGXNSGSCPVHPNARHSASECHEIIKLTKRVSERSE

SEQ ID NO: 8696 - protein, 112 aa, Zea mays
  Coding DNA Sequence Number=SeqID_2341
  Gene Ontology: Mol. function=transferase activity; Biological process= metabolic process
  Homolog annotation: Hit_ID=Q3EBR8; Match level="QueryCoverage=75%, HitCoverage=22%, E-value=3e-35, Identity=88%"; Hit description =Uncharacterized protein At2g30200.2
LDYNLKACTLAPGNYAISGGVKGIEVVEAKAKFFKARMTVRLALAGALHTSFMQPAVSRLEPALAATEIRTPRIPVISNVDAQPHSDPDTIKKKTDFSAANKLYAKLELLLQ

SEQ ID NO: 8697 - protein, 123 aa, Zea mays
  Coding DNA Sequence Number=SeqID_2342
LGDDDLDLSRTRHSILQAPHLVVPALDLGFEIPSTRMIFKMTRDLAAQISLGNALPATRDGQTMASFGCSRFRHSCPQFSPAAGTRSSQRALPSAQDNRRPAAGHDAAATSSLVLSLPCLFRR

SEQ ID NO: 8698 - protein, 243 aa, Zea mays
  Coding DNA Sequence Number=SeqID_2344
  Gene Ontology: Mol. function=oxidoreductase activity; Cellular component=integral to membrane; Biological process=electron transport
  Homolog annotation: Hit_ID=Q3KE89; Match level="QueryCoverage=100%, HitCoverage=34%, E-value=2e-66, Identity=51%"; Hit description=Twin -arginine translocation pathway signal precursor
  Pfam annotation: Domain name=Ald_Xan_dh_C; Domain location=66-144; Score=-33.0; E_value=0.024; Accession=PF01315.12; Description =Aldehyde oxidase and xanthine dehydrogenase, ab hammerhead domain
RFGVEAGQCRTENGVVIAGDQRATYGELADDAAKLETPKNVALKDPKDWKIIGRATKRLDSSEKTDGTAKFGQDVQFDGLLTAVVARSPVFGGKLKSFDASAAKQVPGVRQVVEVPTGVAVVADNFWAAKKGRDVLKAEWDLGPNAGMSTQALVEEYRQAAGSEGAVAAQAGNVQQALGQAAKTVEAEYVLPYLAHAPMEPLNCTVKIGDNGCDIWTGTQMPRVDQASAAEILGLKPEQVNVH

SEQ ID NO: 8699 - protein, 113 aa, Zea mays
  Coding DNA Sequence Number=SeqID_2345
  Gene Ontology: Mol. function=transcription factor activity; Cellular component=cytoplasm; Biological process=regulation of transcription, DNA-dependent
  Homolog annotation: Hit_ID=Q0KB06; Match level="QueryCoverage=70%, HitCoverage=25%, E-value=4e-18, Identity=57%"; Hit description =Transcriptional regulator, LysR-family
  Pfam annotation: Domain name=HTH_1; Domain location=37-96; Score =68.8; E_value=1.8e-17; Accession=PF00126.17; Description=Bacterial regulatory helix-turn-helix protein, lysR family
  Pfam annotation: Domain name=MarR; Domain location=26-98; Score=-2.8; E_value=0.068; Accession=PF01047.13; Description=MarR family
  Pfam module annotation: Pfam domain module=HTH_1::MarR; Domain location=37-96::26-98
MDVARLCYACLTLQIDRIVVVTSVIFDRVETRIVMDIKILRAFATVAALEHIGQAAERLHISPSPLSRQIQQLESELGMVLFHREKKRLRLTDEGKRFLTEVTPFLQHHERLK

SEQ ID NO: 8700 - protein, 75 aa, Zea mays
  Coding DNA Sequence Number=SeqID_2346
  Homolog annotation: Hit_ID=Q8LF24; Match level="QueryCoverage=58%, HitCoverage=15%, E-value=2e-12, Identity=75%"; Hit description =Putative uncharacterized protein
KGVPLIFISGLKWNGARKPPLYLVATVAIFRLCNMGLLSKVPQVVCFAFHDSKLLMETCPGAQNLWKIVTLFYLG

SEQ ID NO: 8701 - protein, 123 aa, Zea mays
  misc_feature (117)..(117): Xaa can be any naturally occurring amino acid
  Coding DNA Sequence Number=SeqID_2347
  Gene Ontology: Mol. function=nucleotidyltransferase activity; Biological process=metabolic process
  Homolog annotation: Hit_ID=Q9LY42; Match level="QueryCoverage=93%, HitCoverage=13%, E-value=1e-44, Identity=70%"; Hit description =Putative uncharacterized protein F27K19_220
PLVPVVNAKDGKWLISKSLFPVGKPGGHGAIWKLAYDRGVLQWLQNCGRKGATVRQVSNVVAATDLTMMALAGIGLRRPAATEGVNVLIEKQNLDGLWSYGITCIEYTEFEKYGIPXPTLTNR

SEQ ID NO: 8702 - protein, 186 aa, Zea mays
  Coding DNA Sequence Number=SeqID_2348
CWVVAAFFFGWAGGGFWGCPLVRGCRRSGCFWHLFFVAGGCLLAFLWLPRVLLRVGACGCALAGLGGCSGCMGWLWWCCLVARVCGLPGWLLVVLGLSWWCRWVLLVGAAPVLGLVLVVGVVRVGGGLCGRRAGWGLLLSVLGCWLVHGFGCWVPVVVAASPAPLGWLAAFWWRWKVLLWFLGPWL

SEQ ID NO: 8703 - protein, 71 aa, Zea mays
  Coding DNA Sequence Number=SeqID_2350
  Gene Ontology: Mol. function=serine-type endopeptidase activity; Cellular component=cell wall; Biological process=negative regulation of catalytic activity
  Homolog annotation: Hit_ID=Q5Z852; Match level="QueryCoverage=98%, HitCoverage=8%, E-value=2e-11, Identity=54%"; Hit description =Putative meiotic serine proteinase
TEPYPLIPRIPPKVPLEVTPPAVPVVPGASRKITVTLPARSVTGPYSLGEIPMKGGPGPLVRIPVVVMGFK

SEQ ID NO: 8704 - protein, 62 aa, Zea mays
  Coding DNA Sequence Number=SeqID_2351
  Subcellular localization annotation: CTP_CleavageSite=50; ConfidenceScore=5.17e-01
VGAFSKLWQLTKVGIGARRVSWIKSGFSRSLRCKTMYQCREVQGLGAGTVALKAWRERLLFF

SEQ ID NO: 8705 - protein, 98 aa, Zea mays
  misc_feature (20)..(20): Xaa can be any naturally occurring amino acid
  Coding DNA Sequence Number=SeqID_2353
  Subcellular localization annotation: CTP_CleavageSite=16; ConfidenceScore=5.00e-01
ASLAQSFQGGTKLRCMCSTXYSSTQTHMRVCGLRARVQHFHTHEKKPVGVENQNPYSYPQVQTSHRKPAVDRGFTRGHVGKNVPVAKATSIDKFDLPK

SEQ ID NO: 8706 - protein, 171 aa, Zea mays
  Coding DNA Sequence Number=SeqID_2355
  Gene Ontology: Mol. function=sulfuric ester hydrolase activity; Cellular component=integral to membrane; Biological process =metabolic process
  Homolog annotation: Hit_ID=A8GDW5; Match level="QueryCoverage=100%, HitCoverage=31%, E-value=2e-65, Identity=65%"; Hit description =Putative uncharacterized protein precursor
  Pfam annotation: Domain name=Sulfatase; Domain location=1-168; Score=- 22.9; E_value=0.00024; Accession=PF00884.13; Description=Sulfatase
IIVLHQMGSHGPAYFKRYSAAFQRFTPTCDSNQIQDCDHQALVNTYDNSLLYTDDMLSRTIDKLKGMSDRFNVALVYLSDHGESLGEHGMYLHGAPYLFAPSQQTHIPLLLWMSPGYAAAYHIDQACLRQQAAETAVSQDNLFHTVLGLFNIQTQQYQPQLDMIKSCQNRA

SEQ ID NO: 8707 - protein, 51 aa, Zea mays
  Coding DNA Sequence Number=SeqID_2356
  Gene Ontology: Mol. function=protein-tyrosine kinase activity; Biological process=recognition or rejection of self pollen
  Homolog annotation: Hit_ID=A5JS87; Match level="QueryCoverage=92%, HitCoverage=5%, E-value=2e-08, Identity=61%"; Hit description=Stress- induced receptor-like kinase 1
DFIWVLKMFRGTVGYFDQEWMRGVLIMIKVEVYRLGMVVLEIVSGKRKKLK

SEQ ID NO: 8708 - protein, 174 aa, Zea mays
  Coding DNA Sequence Number=SeqID_2357
  Gene Ontology: Mol. function=transferase activity; Cellular component= cytoplasm; Biological process=D-ribose metabolic process
  Homolog annotation: Hit_ID=A6TG56; Match level="QueryCoverage=98%, HitCoverage=55%, E-value=4e-53, Identity=63%"; Hit description =Ribokinase
  Pfam annotation: Domain name=Phos_pyr_kin; Domain location=2-164; Score=-118.2; E_value=0.00054; Accession=PF08543.2; Description =Phosphomethylpyrimidine kinase
FVSADALLMQLESPLDSVLAAARIARASHTQVILNPAPATQLSDELLALIDIITPNETEAEILTGIAVNDDDDAARAAQALHAKGIDTVLITLGRRGVWLSEQGQGQRIPGFSVQAVDTIAAGDTFNGAFITARLEGVAMQDAVRFAHAAAAIAVTRPGAQPSVPWRTEIDAFL

SEQ ID NO: 8709 - protein, 250 aa, Zea mays
  misc_feature (72)..(72): Xaa can be any naturally occurring amino acid
  misc_feature (128)..(128): Xaa can be any naturally occurring amino acid
  misc_feature (206)..(206): Xaa can be any naturally occurring amino acid
  Coding DNA Sequence Number=SeqID_2358
  Gene Ontology: Mol. function=oxidoreductase activity; Cellular component=cytoplasm; Biological process=hydrogen peroxide catabolic process
  Homolog annotation: Hit_ID=A4JQW7; Match level="QueryCoverage=100%, HitCoverage=35%, E-value=1e-111, Identity=78%"; Hit description =Catalase
  Pfam annotation: Domain name=Catalase; Domain location=2-249; Score =215.3; E_value=1.4e-61; Accession=PF00199.9; Description=Catalase
YVRSSTVQGPRGSADTGRDVLCFVLKFYTEEGNYDLVGNNMPVFFIQDAIKLPDFVHAVKPEAPNEMPTGAXAHDTFWDFVSLVPETTHTELWLMSDRALPASYRAMDSLGVHTYRFVNAAGAEHFVXFHWRPESGAYSLLWDEAQCIARHDPDFDQLDLWMAIERGGYQELEHGEQLIDPSDASKFDFDMLDPSKLVPPELVPVXPIGRMMLCRNPGILFAQTEQVAFHPAHVVPGLDVPNDPRLQVEL

SEQ ID NO: 8710 - protein, 82 aa, Zea mays
  Coding DNA Sequence Number=SeqID_2359
KEGTVTCPCEHTIAGYDSAYRTSVTSRGFGSRLDSLDGDNRTALLVKTSCFDKSYERLTLWPYWIDTPPACWDAIHRETRTE

SEQ ID NO: 8711 - protein, 120 aa, Zea mays
  Coding DNA Sequence Number=SeqID_2361
  Gene Ontology: Mol. function=two-component response regulator activity; Cellular component=intracellular; Biological process=two -component signal transduction system (phosphorelay)
  Homolog annotation: Hit_ID=Q1LCE1; Match level="QueryCoverage=94%, HitCoverage=51%, E-value=1e-27, Identity=56%"; Hit description=Two component transcriptional regulator, winged helix family
  Pfam annotation: Domain name=Trans_reg_C; Domain location=46-117; Score=69.4; E_value=1.2e-17; Accession=PF00486.18; Description =Transcriptional regulatory protein, C ter
TQTLYLQEVLARIRAITGRRHGAADSLLGNGDVQLDMMTREVLYKGQREQLTAREYALLYALLERPGAILSREQLENRIYGWGEEVTSNAVDVLIHGMRRKLDNEVIRNVRGLGWRVPAI

SEQ ID NO: 8712 - protein, 118 aa, Zea mays
  misc_feature (31)..(31): Xaa can be any naturally occurring amino acid
  misc_feature (70)..(70): Xaa can be any naturally occurring amino acid
  misc_feature (81)..(81): Xaa can be any naturally occurring amino acid
  Coding DNA Sequence Number=SeqID_2362
  Gene Ontology: Mol. function=pyruvate kinase activity; Cellular component=chloroplast; Biological process=glycolysis
  Homolog annotation: Hit_ID=Q0D867; Match level="QueryCoverage=89%, HitCoverage=18%, E-value=5e-25, Identity=61%"; Hit description =Pyruvate kinase
  Subcellular localization annotation: CTP_CleavageSite=37; ConfidenceScore=5.18e-01
CRQMNKAVRVASQFRQSSIEHSAPSRSKVAXVSEPVRQRADAQMLSGEPAMARSPGKALSVLSIVSLSIXKCLMEEKRHQXLELRRVSSSFSDKISEEIAISASKMGILIAWRTSGGA

SEQ ID NO: 8713 - protein, 172 aa, Zea mays
  misc_feature (43)..(43): Xaa can be any naturally occurring amino acid
  misc_feature (57)..(57): Xaa can be any naturally occurring amino acid
  misc_feature (78)..(78): Xaa can be any naturally occurring amino acid
  misc_feature (86)..(86): Xaa can be any naturally occurring amino acid
  misc_feature (91)..(91): Xaa can be any naturally occurring amino acid
  misc_feature (109)..(109): Xaa can be any naturally occurring amino acid
  misc_feature (120)..(120): Xaa can be any naturally occurring amino acid
  misc_feature (133)..(133): Xaa can be any naturally occurring amino acid
  misc_feature (140)..(140): Xaa can be any naturally occurring amino acid
  Coding DNA Sequence Number=SeqID_2363
  Gene Ontology: Mol. function=hydrogen ion transporting ATP synthase activity, rotational mechanism; Cellular component=proton -transporting ATP synthase complex, catalytic core F(1); Biological process=ATP synthesis coupled proton transport
  Homolog annotation: Hit_ID=Q9MRJ6; Match level="QueryCoverage=99%, HitCoverage=36%, E-value=8e-32, Identity=48%"; Hit description=ATP synthase subunit beta
  Pfam annotation: Domain name=ATP-synt_ab; Domain location=1-172; Score=-75.0; E_value=0.0079; Accession=PF00006.15; Description=ATP synthase alphabeta family, nucleotide-binding domain
HGNKVVDSLGPQRRERKIGLVGGAGISKTGLLKELIQNHGKGXGRGTGIGGIRERNXKEKIFKRKIRNSEVINKKIIXESKVSLIXAQINXPPGSWNKSGLTAPTKAKXFQKVINQKGLXFMKKIFGLVQPGXEGTALIXRRPPPVGNHPPLSPERGSWQEKITSTKKGSIT

SEQ ID NO: 8714 - protein, 151 aa, Zea mays
  misc_feature (96)..(96): Xaa can be any naturally occurring amino acid
  misc_feature (136)..(136): Xaa can be any naturally occurring amino acid
  Coding DNA Sequence Number=SeqID_2364
  Gene Ontology: Mol. function=binding; Cellular component=nucleus; Biological process=activation of protein kinase C
  Homolog annotation: Hit_ID=Q9SN39; Match level="QueryCoverage=97%, HitCoverage=38%, E-value=1e-36, Identity=44%"; Hit description =Putative uncharacterized protein F28A21.160
  Pfam annotation: Domain name=PPR; Domain location=65-99; Score=33.9; E_value=6e-07; Accession=PF01535.11; Description=PPR repeat
DPRDPSAASISYLERGREIHAYALRLGFFWKIVMQSNALVDMYVKCGAPLVARDSFDRLTNKTLILWTIMIAGYGMHGFGKHAISLFEQMRGRAIXPEAASLSAILNARCHSGLAAEGQKFFNAMQKVYKIVPMLXSYTCIVDLLSRTGDL

SEQ ID NO: 8715 - protein, 77 aa, Zea mays
  misc_feature (11)..(11): Xaa can be any naturally occurring amino acid
  misc_feature (17)..(17): Xaa can be any naturally occurring amino acid
  Coding DNA Sequence Number=SeqID_2365
  Gene Ontology: Mol. function=anthranilate synthase activity; Biological process=glutamine metabolic process
  Homolog annotation: Hit_ID=A3AUL0; Match level="QueryCoverage=97%, HitCoverage=31%, E-value=4e-24, Identity=73%"; Hit description =Putative uncharacterized protein
GEPQDSGISLXIVFELXPPILIFRVCMGLRCITEAFGGKVIRAPSGMTHEKISPVHYDEELGNSLFNGLPNSSSAGM

SEQ ID NO: 8716 - protein, 70 aa, Zea mays
  misc_feature (30)..(30): Xaa can be any naturally occurring amino acid
  Coding DNA Sequence Number=SeqID_2366
  Gene Ontology: Mol. function=3'-5' exonuclease activity; Cellular component=intracellular; Biological process=nucleobase, nucleoside, nucleotide and nucleic acid metabolic process
  Homolog annotation: Hit_ID=A4TJI4; Match level="QueryCoverage=100%, HitCoverage=18%, E-value=3e-16, Identity=60%"; Hit description =Ribonuclease D
VNCTLLAHNDQLSPVRQQVRQHRSLAMDTXLVRTRTYYPQLGLIQLFDDKQLVLIDPLTITAWAPFTALL

SEQ ID NO: 8717 - protein, 125 aa, Zea mays
  Coding DNA Sequence Number=SeqID_2367
  Gene Ontology: Mol. function=enoyl-CoA hydratase activity; Cellular component=mitochondrion; Biological process=metabolic process
  Homolog annotation: Hit_ID=Q88N06; Match level="QueryCoverage=100%, HitCoverage=33%, E-value=2e-41, Identity=69%"; Hit description=Enoyl- CoA hydratase/isomerase family protein
MPEISIGLYPDVGASWFLARLPGKLGLFLGLTGAPINAHDALDLGLADRFLGEYQQEALIEELLQLNWQEQTALQLNSLLKAEQHRACAELPEAQWLPRRQMIDQLLDVADAAAAWRALEGLKHH

SEQ ID NO: 8718 - protein, 85 aa, Zea mays
  Coding DNA Sequence Number=SeqID_2368
  Gene Ontology: Mol. function=protein serine/threonine kinase activity; Biological process=protein amino acid phosphorylation
  Homolog annotation: Hit_ID=A7QE13; Match level="QueryCoverage=64%, HitCoverage=4%, E-value=1e-10, Identity=54%"; Hit description =Chromosome chr4 scaffold_83, whole genome shotgun sequence
  Pfam annotation: Domain name=LRRNT_2; Domain location=35-76; Score =52.1; E_value=1.9e-12; Accession=PF08263.3; Description=Leucine rich repeat N-terminal domain
MPPSRSLFLLLMLALAPLASLTAQAPAPVARTAGVQAEIDALLAFRRGLRDPYGAMSGWDAASPSAPCSWRGVACAQGGRVVELQ

SEQ ID NO: 8719 - protein, 99 aa, Zea mays
  Coding DNA Sequence Number=SeqID_2369
  Gene Ontology: Mol. function=4-aminobutyrate transaminase activity; Biological process=gamma-aminobutyric acid metabolic process
  Homolog annotation: Hit_ID=Q6F767; Match level="QueryCoverage=97%, HitCoverage=22%, E-value=4e-37, Identity=73%"; Hit description=4 -aminobutyrate aminotransferase, PLP-dependent
MNALPRGTGNLCQWYVDQAENATLRDVEGNSWIDFAGGIAVLNTGHRHPRIVQAIADQLAKFTHTAFQVTPYESYVALAERINQRVPIAGKAKTAFFTT

SEQ ID NO: 8720 - protein, 112 aa, Zea mays
  misc_feature (9)..(9): Xaa can be any naturally occurring amino acid
  misc_feature (38)..(38): Xaa can be any naturally occurring amino acid
  misc_feature (50)..(50): Xaa can be any naturally occurring amino acid
  misc_feature (66)..(66): Xaa can be any naturally occurring amino acid
  misc_feature (93)..(93): Xaa can be any naturally occurring amino acid
  Coding DNA Sequence Number=SeqID_2370
  Gene Ontology: Mol. function=long-chain-fatty-acid-CoA ligase activity; Cellular component=membrane; Biological process=fatty acid metabolic process
  Homolog annotation: Hit_ID=A8GFH1; Match level="QueryCoverage=98%, HitCoverage=19%, E-value=8e-24, Identity=52%"; Hit description=AMP -dependent synthetase and ligase
GFIRIVDRXKDMTLVSDFNVYPIVIKDVLMQHAKVPLXDTISVPNDLSAXSVKVCIMKKALSLSKXQLLYHCRRQLSDYIVLMIIQFRNELLXSNVGIILRRVLRDEPKRIE

SEQ ID NO: 8721 - protein, 189 aa, Zea mays
  Coding DNA Sequence Number=SeqID_2371
  Gene Ontology: Mol. function=kinase activity
  Homolog annotation: Hit_ID=A8GAJ8; Match level="QueryCoverage=93%, HitCoverage=54%, E-value=4e-34, Identity=46%"; Hit description=PfkB domain protein
RRPRRTDRAAGVHARGANAQPDEAHFAHLATAHRIRHRGYQLALDKHEQPDAHARPLAERQQRGYLTTLEQETRAGEKQAQVKPALRWLDDLVRNELEAQALTGSELRSRGTQASPAAYAAAARRLLAQGERQREGTHAPEGAWGQQSAGDGPWQTAWRSTAEEKVGSDRAGDAYCAGVLYASHQNYNL

SEQ ID NO: 8722 - protein, 96 aa, Zea mays
  Coding DNA Sequence Number=SeqID_2372
SGCVCRRGSRRFVPRNGVRRVGVPALAPVVVGDGWVALRDCATGRAGVVPRGGYGRSGPCLLSYQCCLGSPSPLLCLGATADGACRARAGLALVPG

SEQ ID NO: 8723 - protein, 172 aa, Zea mays
  Coding DNA Sequence Number=SeqID_2374
  Subcellular localization annotation: CTP_CleavageSite=34; ConfidenceScore=5.17e-01
RAEGREPSAATIFRSHTTTAAACARPTAITTGAVAAAGVAAAATTTCASLPRPLEGSWSQVLIHPLPVRASSSSASMDVPSPPAAMPAGGSGSHRHTPTGDVADDPSAATMDAPSSSAAMPAGGSGSHQHTSAGNVAGDPSMATATPSASAPSPPSAAAEEVSVAFAPTVQD

SEQ ID NO: 8724 - protein, 52 aa, Zea mays
  Coding DNA Sequence Number=SeqID_2376
  Gene Ontology: Mol. function=farnesyl-diphosphate farnesyltransferase activity; Cellular component=integral to membrane; Biological process= lipid biosynthetic process
  Homolog annotation: Hit_ID=O22106; Match level="QueryCoverage=84%, HitCoverage=10%, E-value=5e-10, Identity=70%"; Hit description =Squalene synthase
VYCCNEIIMAIGTCALCYNNVHVFRGVVKMRRGLRFIIVNLTSSINCKLQVD

SEQ ID NO: 8725 - protein, 260 aa, Zea mays
  Coding DNA Sequence Number=SeqID_2377
  Gene Ontology: Mol. function=catalytic activity; Cellular component =anchored to plasma membrane; Biological process=cell wall organization and biogenesis
  Homolog annotation: Hit_ID=Q2HC89; Match level="QueryCoverage=99%, HitCoverage=57%, E-value=1e-107, Identity=74%"; Hit description =Putative uncharacterized protein
  Pfam annotation: Domain name=Glyco_hydro_76; Domain location=1-206; Score=-46.7; E_value=1.3e-09; Accession=PF03663.5; Description =Glycosyl hydrolase family 76
ARYTRNETYAQWAEKTFQWLWDVQYIDHEDWRVYDGAHIQSNCTDIHKAQFSYNAGLLLHGAAFMYNYTESDVWKSRIDNLIIGMKRDFFELNIAYELPCEGRHGACSADMLSFKGYVHRWLSVVTQLAPHTKPALLPMLRTSAEAAVRQCTGGETGRRCGFYWTEGVYVDVAVDKTSGAGEQMNVLAAVSSLLIEEADPPATMLDGGISKGDVNAGERGGFISDPLPPITAADRAGAGILTFITLAGGSALWYVMNTGL

SEQ ID NO: 8726 - protein, 94 aa, Zea mays
  Coding DNA Sequence Number=SeqID_2378
  Gene Ontology: Mol. function=protein dimerization activity; Cellular component=nucleus; Biological process=regulation of transcription, DNA-dependent
  Homolog annotation: Hit_ID=A2YG67; Match level="QueryCoverage=59%, HitCoverage=5%, E-value=6e-11, Identity=66%"; Hit description=Auxin response factor 17
  Subcellular localization annotation: CTP_CleavageSite=65; ConfidenceScore=5.16e-01
GDDPWQEKGSTVSCKKILSGHKVQQMGKHGLELLSSAPARRVGSNCAVSVSRQELRSLSPGVGAVGSSGGGISRKIGRPQQRQQQARGLQPQGR

SEQ ID NO: 8727 - protein, 84 aa, Zea mays
  Coding DNA Sequence Number=SeqID_2379
SRRGRVPALLPELRVPEDRIPLPRNKALGKLAHNDQWIHGAIGTSVSNPPWPQAPVPRNPPRVRVTTPDASLGLLPNPRATAQA

SEQ ID NO: 8728 - protein, 96 aa, Zea mays
  Coding DNA Sequence Number=SeqID_2381
  Subcellular localization annotation: CTP_CleavageSite=74; ConfidenceScore=5.27e-01
VRAEIVRHSCRPAAAAVATVLPSSHASHLLAASAAASRGLHAGSTKSVGARAATLAAAAAVGPAASSSSSSAVYAAAASSSTDYSSVTNENIPYFG

SEQ ID NO: 8729 - protein, 167 aa, Zea mays
  Coding DNA Sequence Number=SeqID_2383
  Gene Ontology: Mol. function=argininosuccinate lyase activity; Cellular component=cytoplasm; Biological process=arginine biosynthetic process via ornithine
  Homolog annotation: Hit_ID=A2W895; Match level="QueryCoverage=98%, HitCoverage=34%, E-value=4e-86, Identity=97%"; Hit description =Argininosuccinate lyase
  Pfam annotation: Domain name=Lyase_1; Domain location=14-167; Score= -128.4; E_value=0.0074; Accession=PF00206.10; Description=Lyase
MTSQLHKKGEAWSARFSEPMSELVKRYTSSVFFDKRLALVDIAGSLAHASMLAAQQIISADDLAAIERGMTQIKGEIERGEFEWQLDLEDVHLNIEARLTALIGDAGKRLHTGRSRNDQVATDIRLWLRGEIDRIGGLLNDLRGALIDLAEQNADTIMPGYTHLQAC

SEQ ID NO: 8730 - protein, 145 aa, Zea mays
  Coding DNA Sequence Number=SeqID_2384
SDYKSLLEREPTPSTEDFSDSEYLEEEFSFESEGSPVHASPRRRPMIRTIPRGSLPRCGHTSGPSSALGSRARMSRRSPRTRRTPLTRPRRGAAVAMTTRATAMVTATVARATARAMAARAMARVAARPIHIMDELQLVLCAFLA

SEQ ID NO: 8731 - protein, 128 aa, Zea mays
  Coding DNA Sequence Number=SeqID_2386
  Gene Ontology: Mol. function=acid phosphatase activity
  Homolog annotation: Hit_ID=A3CEZ9; Match level="QueryCoverage=57%, HitCoverage=17%, E-value=9e-25, Identity=72%"; Hit description =Putative uncharacterized protein
MYCGVELGVNIVGDACSSGLGLAVSTYILVRCGLLRLQSGCGCGFYSICRMGPHSVHDVSARVPVHISLVGPDKVRVSWITAADAPATVDYGTASGQYPFSATGNTTSYSYVLYHSGSIHDAVIGPLQ

SEQ ID NO: 8732 - protein, 238 aa, Zea mays
  Coding DNA Sequence Number=SeqID_2387
  Subcellular localization annotation: CTP_CleavageSite=82; ConfidenceScore=5.57e-01
CSTAAPALGLATHQLPPPAPVASGSEGAAGVAVGNGIVAVGFTTGTVARGDVTSRSSLFVAPAPRSLPPPAARARSMQQLTVAVAVAGQEDEEQKKKGRQAMDWPQRQSHDKLASSGWASGSQRSSSRHRDTNKRNHKSGRRGITGNLAGQAGRQAAWSAHIEISKESTHCLTGREGRFGHLYIGARLPTRRHPFHLEVWNRGIPECPQPQGAIEICFRARLVYNFACVQKLYKILGQ

SEQ ID NO: 8733 - protein, 97 aa, Zea mays
  Coding DNA Sequence Number=SeqID_2389
  Gene Ontology: Mol. function=two-component response regulator activity; Cellular component=cytoplasm; Biological process=two -component signal transduction system (phosphorelay)
  Homolog annotation: Hit_ID=Q6DB90; Match level="QueryCoverage=98%, HitCoverage=43%, E-value=7e-36, Identity=79%"; Hit description=Two -component system response regulator
  Pfam annotation: Domain name=Trans_reg_C; Domain location=22-93; Score=92.6; E_value=1.2e-24; Accession=PF00486.18; Description =Transcriptional regulatory protein, C ter
QPELRHGRLVMAPGSHSVMLDGEPLSLKSRELALLELFLRNPGRVLTRAQLEEKLYSWDDDVSSNAVEVHIHHLRKKLGSQFIRTVHGIGYTLGAAE

SEQ ID NO: 8734 - protein, 665 aa, Zea mays
  Coding DNA Sequence Number=SeqID_2390
  Gene Ontology: Mol. function=protein binding; Cellular component =integral to membrane; Biological process=defense response to fungus
  Homolog annotation: Hit_ID=A2Y1Z7; Match level="QueryCoverage=93%, HitCoverage=85%, E-value=1e-114, Identity=33%"; Hit description =Putative uncharacterized protein
  Pfam annotation: Domain name=LRRNT_2; Domain location=42-81; Score =59.7; E_value=9.7e-15; Accession=PF08263.3; Description=Leucine rich repeat N-terminal domain
  Pfam annotation: Domain name=LRR_1; Domain location=126-151; Score =12.0; E_value=1.8; Accession=PF00560.23; Description=Leucine Rich Repeat
  Pfam annotation: Domain name=LRR_1; Domain location=153-175; Score =5.4; E_value=31; Accession=PF00560.23; Description=Leucine Rich Repeat
  Pfam annotation: Domain name=LRR_1; Domain location=230-253; Score =7.4; E_value=13; Accession=PF00560.23; Description=Leucine Rich Repeat
  Pfam annotation: Domain name=LRR_1; Domain location=255-280; Score =6.2; E_value=22; Accession=PF00560.23; Description=Leucine Rich Repeat
  Pfam annotation: Domain name=LRR_1; Domain location=283-305; Score =7.4; E_value=13; Accession=PF00560.23; Description=Leucine Rich Repeat
  Pfam annotation: Domain name=LRR_1; Domain location=307-329; Score =16.7; E_value=0.089; Accession=PF00560.23; Description=Leucine Rich Repeat
  Pfam annotation: Domain name=LRR_1; Domain location=331-353; Score =4.8; E_value=40; Accession=PF00560.23; Description=Leucine Rich Repeat
  Pfam annotation: Domain name=LRR_1; Domain location=360-382; Score =9.4; E_value=5.5; Accession=PF00560.23; Description=Leucine Rich Repeat
  Pfam annotation: Domain name=LRR_1; Domain location=384-406; Score =16.3; E_value=0.12; Accession=PF00560.23; Description=Leucine Rich Repeat
  Pfam annotation: Domain name=LRR_1; Domain location=408-431; Score =11.6; E_value=2.1; Accession=PF00560.23; Description=Leucine Rich Repeat
  Pfam annotation: Domain name=LRR_1; Domain location=433-459; Score =12.7; E_value=1.4; Accession=PF00560.23; Description=Leucine Rich Repeat
  Pfam annotation: Domain name=LRR_1; Domain location=481-504; Score =10.9; E_value=2.9; Accession=PF00560.23; Description=Leucine Rich Repeat
  Pfam annotation: Domain name=LRR_1; Domain location=506-528; Score =15.4; E_value=0.22; Accession=PF00560.23; Description=Leucine Rich Repeat
  Pfam annotation: Domain name=LRR_1; Domain location=529-548; Score =0.5; E_value=2.5e+02; Accession=PF00560.23; Description=Leucine Rich Repeat
  Pfam annotation: Domain name=LRR_1; Domain location=550-572; Score =5.6; E_value=28; Accession=PF00560.23; Description=Leucine Rich Repeat
  Pfam annotation: Domain name=LRR_1; Domain location=573-595; Score =3.8; E_value=60; Accession=PF00560.23; Description=Leucine Rich Repeat
  Pfam annotation: Domain name=LRR_1; Domain location=597-618; Score =11.5; E_value=2.2; Accession=PF00560.23; Description=Leucine Rich Repeat
  Pfam annotation: Domain name=LRR_1; Domain location=642-663; Score =8.7; E_value=7.6; Accession=PF00560.23; Description=Leucine Rich Repeat
  Pfam module annotation: Pfam domain module=LRRNT_2::LRR_1::LRR_1::LRR_ 1::LRR_1::LRR_1::LRR_1::LRR_1::LRR_1::LRR_1::LRR_1::LRR_1::LRR_1::LRR_ 1::LRR_1::LRR_1::LRR_1::LRR_1::LRR_1; Domain location=42-81::126 -151::153-175::...
  Pfam module annotation: Domain location=230-253::255-280::283 -305::307-329::331-353::360-382::384-406::408-431::433-459::481 -504::506-528::529-548::550-572::573-595::597-618::642-663
  Subcellular localization annotation: CTP_CleavageSite=31; ConfidenceScore=5.60e-01
MHHPRLPAICSLPAMAVAAVVLVFTSTTAVAASLAVVRSSCVPAERAALLSFKASITSDPAGRLRSWRGHDCCQWRGVSCGNRSHAVVGLDLRNDYWQHDSFFSDHDSGNHWLRGQISPSITALRRLRRLDLSGNLLGGPGVTIPGFLGSLSSLVYLNLSAMDFDGMVPPQLGNLSRLVRLDLNNPLLGNQYSPDLSWLSRLSLLEHLNLNIVNLSTVADPTQAINALANLRVLHLDECSISIYSLLSRLTNLTAVEELDLSNNFLFSGPFSSRWWFWDLGSRLRSLQLDACGLFGSFPRELGYMTSLEVLDLGNNDLNGMLPETFRNMCSLNTLTLAYTNIGLDIARLLDRLPSCPERKLRELDLSQANLTGTMLNWLPNQTSLTLLDVSGNHLTGPVPVEIGELAALSSLDVSGNNLNGVMSEEHFSKLTSLTSLDLSDNNLQIRVDPDWVPPFQLNVAEFSSCQLGSRFPAWLRWQNQVNVLDISYSNLTGTIPEWFWAVFANASSLDLSYNKITGELPRDLEFMSVGILQLRSNQLTGSVPRLPRSIVTFDISRNSLNGPLSLNFEAPLLQLVVLYSNRITGLIPNQICQWKQLRVLDLSDNLLAGELPDCGTKVAKQGNSSSTSMPHSSPASPPSLNIRTLLLSSNSLSGEFPRTRGSAH

SEQ ID NO: 8735 - protein, 138 aa, Zea mays
  Coding DNA Sequence Number=SeqID_2391
LPDADKAVGLDSRHEANARDRESAGHPYVTDLGDGHRVAIHRLHPRPSGASRRSERRLGWGHAPRGHRRLNPTGALATAAVAAKSFHRHRVLAAVLMRMQLPAFLFHPPAPDSAAAAARARDGFRAGRCVHEQGRIDA

SEQ ID NO: 8736 - protein, 102 aa, Zea mays
  Coding DNA Sequence Number=SeqID_2393
  Gene Ontology: Mol. function=ligase activity; Biological process =response to auxin stimulus
  Homolog annotation: Hit_ID=A7PZS7; Match level="QueryCoverage=97%, HitCoverage=31%, E-value=1e-16, Identity=40%"; Hit description =Chromosome chr15 scaffold_40, whole genome shotgun sequence
  Subcellular localization annotation: CTP_CleavageSite=16; ConfidenceScore=5.26e-01
LACLQFIFSSWQYTTRGGLATTTTTTNPTNVYRSKEFIPTMRTIESQACSPEAVIFGLYRCHLEDVVKVAGFYNSTPKLKFVCRLNLMLSINVDKNSEQDLQ

SEQ ID NO: 8737 - protein, 199 aa, Zea mays
  misc_feature (14)..(14): Xaa can be any naturally occurring amino acid
  Coding DNA Sequence Number=SeqID_2394
  Subcellular localization annotation: CTP_CleavageSite=18; ConfidenceScore=5.20e-01
PLPPPPPPHPPPPXPPLPAPPPPPPHCPPPPPTPPPPHTPDPGPTPPVPPPGPKAGAFCSVFPPKKTSCAALPPNPRDHQPFFLKKGVKGNPRVANPLAKVVLQGKAPLIPPSSFSRSVSRERSAGSARCGRPRWVIRYALYLPLSELVFFVYFELVEPYGCVPCPPLCSFCAIFLMLSCYCGFELGNLVYKIIRKKKK

SEQ ID NO: 8738 - protein, 96 aa, Zea mays
  Coding DNA Sequence Number=SeqID_2396
FMSIYVGGIATTNMGVLVQRTDAANWGRRSPAERDRERRRSLRAIEAANMADVRTYVPVSRRRLVVRAADAEPGPLRRHGSSVHAVAHLSRRTAAA

SEQ ID NO: 8739 - protein, 56 aa, Zea mays
  Coding DNA Sequence Number=SeqID_2398
  Gene Ontology: Mol. function=protein serine/threonine kinase activity; Cellular component=cytoplasm; Biological process=protein amino acid phosphorylation
  Homolog annotation: Hit_ID=Q6I5I9; Match level="QueryCoverage=98%, HitCoverage=11%, E-value=6e-21, Identity=87%"; Hit description =Putative uncharacterized protein OSJNBa0009E21.16
CFLSDNLNLYVQSRSYRSPEVILGLPYDQKIDIWSLGCILAELYTGEVSFKLETVS

SEQ ID NO: 8740 - protein, 189 aa, Zea mays
  Coding DNA Sequence Number=SeqID_2399
  Gene Ontology: Mol. function=identical protein binding; Cellular component=extracellular region; Biological process=negative regulation of catalytic activity
  Homolog annotation: Hit_ID=A7QKB9; Match level="QueryCoverage=97%, HitCoverage=35%, E-value=3e-54, Identity=58%"; Hit description =Chromosome chr2 scaffold_112, whole genome shotgun sequence
  Pfam annotation: Domain name=PA; Domain location=1-75; Score=20.3; E _value=0.0027; Accession=PF02225.12; Description=PA domain
PPSVDGFNVRGKIVLCFCDDFCGRVDRGAVVKRAGGFGMVLANQFCNGYSTFADAHVLPASHVSYVAGVAIKKYISSAANPTAQISFRGTVLGTSPAPAITSFSSRGPSQRNPGILKPDVTGPGVSVLAAWPTQVGPSSSSVSTGPTFNFEFGTSMSAPHLAGVAALMKSQHPSWTPAAIKFAIVTTRP

SEQ ID NO: 8741 - protein, 78 aa, Zea mays
  Coding DNA Sequence Number=SeqID_2400
  Gene Ontology: Mol. function=nucleoside-triphosphatase activity; Cellular component=intracellular; Biological process=protein transport
  Homolog annotation: Hit_ID=Q6Z7F0; Match level="QueryCoverage=92%, HitCoverage=10%, E-value=2e-20, Identity=72%"; Hit description =Putative ATP-dependent Clp protease ATP-binding subunit ClpX1
PQRQLNTVLTEPKNALRKQLKKSFNTEDAKLHYTDGALRIIAQKAMAKNTGARRLRTIAENNLMDHMYEIPDAKNRGE

SEQ ID NO: 8742 - protein, 77 aa, Zea mays
  Coding DNA Sequence Number=SeqID_2401
  Gene Ontology: Mol. function=thiosulfate sulfurtransferase activity; Cellular component=mitochondrion; Biological process=sulfate transport
  Homolog annotation: Hit_ID=A2ZMK2; Match level="QueryCoverage=100%, HitCoverage=19%, E-value=2e-30, Identity=83%"; Hit description =Putative uncharacterized protein
AVSALGIYNKDGIVADDGKGLFSAARVWWMFRVFGHDNAWVMDGGLTLWRAAGYDAGSSASNDAILKASAAGEAIEK

SEQ ID NO: 8743 - protein, 142 aa, Zea mays
  Coding DNA Sequence Number=SeqID_2402
  Homolog annotation: Hit_ID=Q3RBP6; Match level="QueryCoverage=92%, HitCoverage=22%, E-value=4e-23, Identity=47%"; Hit description =Putative uncharacterized protein
EKSAHPALGYYLRQVRSGLQDAANRSMGPQDAAELAKLNGQYNSLKVLQQAVTKRAAGAGGDVAPSNLWSLVNGRHGSTSDMRDLAKLGQTVLKDPIPDSGTAQRLISYGALTGGAAMPHTALALAVAGATIGRILNSSLAA

SEQ ID NO: 8744 - protein, 223 aa, Zea mays
  Coding DNA Sequence Number=SeqID_2403
  Gene Ontology: Mol. function=superoxide dismutase activity; Cellular component=mitochondrial inner membrane; Biological process =superoxide metabolic process
  Homolog annotation: Hit_ID=Q9NB66; Match level="QueryCoverage=90%, HitCoverage=92%, E-value=2e-88, Identity=76%"; Hit description =Mitochondrial manganese superoxide dismutase precursor
  Pfam annotation: Domain name=Sod_Fe_C; Domain location=112-218; Score= 223.5; E_value=5e-64; Accession=PF02777.8; Description=Ironmanganese superoxide dismutases, C-term
  Pfam annotation: Domain name=Sod_Fe_N; Domain location=27-108; Score =159.2; E_value=1.1e-44; Accession=PF00081.12; Description =Ironmanganese superoxide dismutases, alpha-
  Pfam module annotation: Pfam domain module=Sod_Fe_C::Sod_Fe_N; Domain location=112-218::27-108
MLRTAVNSINTIVFRSNKLGLLSCRSKHTLPDLPYDYNALEPFISAEIMQLHHSKHHAAYVNNLNIAEEKLAEAQHKKAISETIALAPALRFNGGGHINHSIFWQNLSPNGGEPSAELLHCIERCFGSLENLQTQLSGAAVAVQGSGWAWLGYNKDRKHLQIAACANQDPLQATTRLIPLLGIDVWEHAYYLQYKNVRPDYVKQIWNVVNWKDVSERFNNAKN

SEQ ID NO: 8745 - protein, 244 aa, Zea mays
  Coding DNA Sequence Number=SeqID_2404
  Gene Ontology: Mol. function=[protein-PII] uridylyltransferase activity; Biological process=nitrogen compound metabolic process
  Homolog annotation: Hit_ID=A8GIE8; Match level="QueryCoverage=97%, HitCoverage=26%, E-value=1e-107, Identity=80%"; Hit description =[Protein-PII] uridylyltransferase
  Pfam annotation: Domain name=HD; Domain location=145-243; Score=49.7; E_value=1e-11; Accession=PF01966.12; Description=HD domain
PGSSLVDLQPFDEAILALSTTEKPFCIFEDFQLRGNLIDLRDPTLFEREPQAILRMFYVMVRNETITGIYSTTLRQLRYARRHLQQPLCQIPEARRTFMAILRHPGAVKRALLPMHRHSVLWAYTPLWGNIVGQMQFDLFHAYTVDEHTIRVLQKLESFADEATRPMHPLCVELWPRMPQPELLLMAALLHDIATGRGGDHSILGAQDALDFAELHGLNSREMQLVAWLVRHHLLKSGTAQRRD

SEQ ID NO: 8746 - protein, 204 aa, Zea mays
  misc_feature (195)..(195): Xaa can be any naturally occurring amino acid
  Coding DNA Sequence Number=SeqID_2405
  Homolog annotation: Hit_ID=Q5VPR0; Match level="QueryCoverage=100%, HitCoverage=24%, E-value=2e-28, Identity=41%"; Hit description =Putative uncharacterized protein OSJNBa0062J13.37
LSITILLFVIYLYEEMWEFFVFLLSNWFMVSLLYNYISKPRWLRHNSFRGTMFSVGFSVIMWLRSKMTQPSLTLKQFTVLNVRLPLKLPFFPAFTGLAVEKKPVPNSVMRSVIDYLAKRGHGAPNYDYDLDRGRSALRMNGVFYKLSWACESDSVAETILTWHIDTSIMEVKCRPLTTAVSSATDETTSSSRVAXMLSKYCAYL

SEQ ID NO: 8747 - protein, 169 aa, Zea mays
  Coding DNA Sequence Number=SeqID_2406
  Gene Ontology: Mol. function=transporter activity; Cellular component= integral to membrane; Biological process=cell division
  Homolog annotation: Hit_ID=Q4J2V6; Match level="QueryCoverage=100%, HitCoverage=16%, E-value=3e-59, Identity=66%"; Hit description =Acriflavin resistance protein precursor
VITLAASSDTLPLTEVQDLVNTRVALKLSQINGVGMVTLAGGNQPAIRVQMDPKALAAHKLSLEDVNTLIANSNVNGSKGGFDGKYHSVTIDANDQLRTAAEYGNLILTWQNGAALRLKDIAHIEQGPENRFQSAWANNRPAIVISVQRQPGANVIQVVDSIKKQLPVL

SEQ ID NO: 8748 - protein, 99 aa, Zea mays
  Coding DNA Sequence Number=SeqID_2407
  Gene Ontology: Mol. function=precorrin-3B C17-methyltransferase activity; Biological process=cobalamin biosynthetic process
  Homolog annotation: Hit_ID=A2VQD4; Match level="QueryCoverage=100%, HitCoverage=31%, E-value=7e-46, Identity=93%"; Hit description =Precorrin-3B C17-methyltransferase
MARMTTPPAIVILGAGALDTARRIQARYPGAVVHGLASRVDADVPFDELGTHLRELYARGLPIVALCAAGIVIRCVAPALADKGVEPPVLAVEEEGSTV

SEQ ID NO: 8749 - protein, 367 aa, Zea mays
  misc_feature (1)..(130): Xaa can be any naturally occurring amino acid
  misc_feature (345)..(367): Xaa can be any naturally occurring amino acid
  Coding DNA Sequence Number=SeqID_2408
XXXXXXXXXXXXXXXXXXXXXXXXXXXXXXXXXXXXXXXXXXXXXXXXXXXXXXXXXXXXXXXXXXXXXXXXXXXXXXXXXXXXXXXXXXXXXXXXXXXXXXXXXXXXXXXXXXXXXXXXXXXXXXXXXXIFLLKLSRDILLRIRRFTRSTIADDDELEAGVINGPLIRQRHLGHTRGGARLMLRPSELGVGEQQPPTSKRQARAHTKRNCNCRCKSTPQQKPTVPHEARKGDPHLCRFPSAGASSVTDQTMDKILAFSILSSSPADISAAGLSSSSSARLSWRPRPQAAAADAAPTPRQEKAADQRAPAAERRREARPRFAPEFDGLHCFESIGLRLNFEGPPXXXXXXXXXXXXXXXXXXXXXXX

SEQ ID NO: 8750 - protein, 180 aa, Zea mays
  Coding DNA Sequence Number=SeqID_2409
  Subcellular localization annotation: CTP_CleavageSite=85; ConfidenceScore=5.76e-01
QHSVSSSSEGAATSHGASPNEGRVMSSHRRHAMMSSHRRSFCPASRSLRARSARLGRVTVTLHDAHMASSGRVPCKCSGNLNPIRSMRAWLPPCLRPPGVRNAITKARGGEGRAIWGAWGVQGTGLLHLSAPRSPARGERSGRHSSMIVSSTTRARRGRAGAHHGGAGMQGPAVPLGGSF

SEQ ID NO: 8751 - protein, 70 aa, Zea mays
  misc_feature (27)..(27): Xaa can be any naturally occurring amino acid
  Coding DNA Sequence Number=SeqID_2410
  Gene Ontology: Mol. function=aspartic-type endopeptidase activity; Biological process=DNA integration
  Homolog annotation: Hit_ID=Q2QXX8; Match level="QueryCoverage=65%, HitCoverage=17%, E-value=1e-10, Identity=73%"; Hit description =Retrotransposon protein, putative, unclassified
QLNTPFYLQGTLGHGLLLHSSTTSDLXCITYADWVGCLDTSKSTSGYVVFLRDNLVSWSSKWQNIVSCSS

SEQ ID NO: 8752 - protein, 137 aa, Zea mays
  Coding DNA Sequence Number=SeqID_2411
VERQASSEEAPGPHGTPPTAGEETKRRRRGPAEQGEHPTARKSDARTPSGSKERSKGAHGERLTAEGQRGTKARARGAAEAPKGATKAGTGRRTQKRPGRTTPGGPAIKTKETDANRNAMPTAEPKHRGNGRNPTDE

SEQ ID NO: 8753 - protein, 154 aa, Zea mays
  Coding DNA Sequence Number=SeqID_2413
  Gene Ontology: Mol. function=transporter activity; Cellular component= integral to membrane; Biological process=transport
  Homolog annotation: Hit_ID=A0GPH0; Match level="QueryCoverage=88%, HitCoverage=31%, E-value=6e-42, Identity=59%"; Hit description=Major facilitator superfamily MFS_1
SLSHSAPLSGVKPNLHKTLFATCIGNALEWFDIAVYGFFASYIAHAFFPTSDASVSLLLTFGSFGVSFLIRPLGAVVLGNYADRHGRKKALLLSINLMMLGGAIITFMPGYDSIGLLAPLLILLARLIQGFSAGGEFGSSTAFLVEHFPERKAF

SEQ ID NO: 8754 - protein, 118 aa, Zea mays
  Coding DNA Sequence Number=SeqID_2414
  Subcellular localization annotation: CTP_CleavageSite=51; ConfidenceScore=5.63e-01
TAPPNRNTSTDTQRGGTGSPNPRRAHRAPRTTQRHRTGTRPTRNPEARHTNKAHGQAARPTAPSHQQPRGHDTHGGAQDRRRQRHRTAPERAQTPGARHHAGHDTGPPLTESARQDPT

SEQ ID NO: 8755 - protein, 186 aa, Zea mays
  misc_feature (58)..(58): Xaa can be any naturally occurring amino acid
  misc_feature (83)..(83): Xaa can be any naturally occurring amino acid
  misc_feature (94)..(94): Xaa can be any naturally occurring amino acid
  misc_feature (126)..(126): Xaa can be any naturally occurring amino acid
  Coding DNA Sequence Number=SeqID_2416
  Gene Ontology: Mol. function=ATPase activity, coupled to transmembrane movement of substances; Cellular component=integral to membrane; Biological process=carbohydrate transport
  Homolog annotation: Hit_ID=P0A2V0; Match level="QueryCoverage=100%, HitCoverage=31%, E-value=2e-79, Identity=85%"; Hit description=Beta -(1-->2)glucan export ATP-binding/permease protein ndvA
FMRTHLATFVAVVMLIPTAMAMYLRLRFVLIGLGIVYWFIGQWVMVRTKDDQASVEEXYHSVFAHVSDSISKVSVLHSYNRIXDEKKMLKSFTXKLLSAQDPVLDSWAFSSAMNRTASTVSMMIIXLVIGTVLVKNGELRVEDVIAFIGFANLLIGCMDQMRQFVTQSFEARAKLEDFLVLEEAFR

SEQ ID NO: 8756 - protein, 152 aa, Zea mays
  Coding DNA Sequence Number=SeqID_2417
HRRHSDQTFFRATPREGGAQQESPPPNRTDREGPRQATDRARRDTTRPHGGTPRRTPRQGGAQAGNGKGHKPARAQKRRTQENQRDTGQRRVEARPPPRRRRTGHRHPTGRAATRRRRKEKTKQPDHTKRQPEHSWPDLRLPRKTPHSQQNV

SEQ ID NO: 8757 - protein, 185 aa, Zea mays
  Coding DNA Sequence Number=SeqID_2419
  Homolog annotation: Hit_ID=Q7ZXT2; Match level="QueryCoverage=83%, HitCoverage=25%, E-value=3e-08, Identity=25%"; Hit description=B52 -prov protein
GKGKQAPPTKPGRGNPSRGCKGPDQHKKGAPTEGKHQQGDGKDGTRAGANERRTENCEDRGRNNPRKDTHRGDAHRKTHTLKRDRQGSRKRGEPRDSRNEKRTTGAQWGSKRTCGAERRSQKGGEDGNRNSSRAQSTNSPLRTGGKTPRRPSGQSPGRGSRENEPAGKQGGHRPPGDKQETGENP

SEQ ID NO: 8758 - protein, 197 aa, Zea mays
  misc_feature (23)..(23): Xaa can be any naturally occurring amino acid
  Coding DNA Sequence Number=SeqID_2420
  Gene Ontology: Mol. function=transcription factor activity; Biological process=regulation of transcription, DNA-dependent
  Homolog annotation: Hit_ID=B0KMM0; Match level="QueryCoverage=100%, HitCoverage=91%, E-value=5e-93, Identity=88%"; Hit description =Transcriptional regulator, TetR family
  Pfam annotation: Domain name=TetR_N; Domain location=19-66; Score =43.5; E_value=7.3e-10; Accession=PF00440.13; Description=Bacterial regulatory proteins, tetR family
MNQKARYPRMLPELRKANLVEAXTLACLKRHGFQGASIRKISAEAGVSVGLISHHYAGKDELVAEAYMAVTGRVMGLLREAMAQAAPNARERLSAFFRASFCAELLDPQLLDAWLAFWGAVKTADAINQVHDHSYGEYRNELSGLLATLAGEEGWQGFDADLAAISLSALLDGLWLESGLNPGTFTPEQGVLICEAW

SEQ ID NO: 8759 - protein, 202 aa, Zea mays
  Coding DNA Sequence Number=SeqID_2421
  Gene Ontology: Mol. function=ATPase activity, coupled to transmembrane movement of substances; Cellular component=integral to membrane; Biological process=transport
  Homolog annotation: Hit_ID=Q5JNB1; Match level="QueryCoverage=64%, HitCoverage=40%, E-value=2e-19, Identity=47%"; Hit description=MDR -like ABC transporter-like
MHELGGKEQPYEGEQSREHTARRASSIAQSRGGERFVSAEARIFDAATAAMPESWRPAEANASSQPAAGTSGPSAQSPGNDAKGRAAGETPGAAEAAATRVPFHKLFAFADSTDVALMLLGALGAVANGAAMPFMTVLFGNLIDAFGGALSIHDVVNRVSMVSLDFVYLAIASAVASFVRKSTFSGNITLPLESDTEHTHAD

SEQ ID NO: 8760 - protein, 120 aa, Zea mays
  Coding DNA Sequence Number=SeqID_2422
MRPTGRPTTPAGDLPNMLGAGTGAPRHVSGCPKLRWVKAKDPKPGGDHKPRTKPDRRAIAAAAQVENTQREHKQHDRGETGGNRIDNTRTGASATKERKGWPSNEPTYWNNIRHVHCAEA

SEQ ID NO: 8761 - protein, 84 aa, Zea mays
  misc_feature (42)..(42): Xaa can be any naturally occurring amino acid
  misc_feature (64)..(64): Xaa can be any naturally occurring amino acid
  Coding DNA Sequence Number=SeqID_2424
  Gene Ontology: Mol. function=transporter activity; Cellular component= integral to membrane; Biological process=transport
  Homolog annotation: Hit_ID=A1FLS0; Match level="QueryCoverage=100%, HitCoverage=10%, E-value=5e-29, Identity=80%"; Hit description =Binding-protein-dependent transport systems inner membrane component
NGRATADGVNQGDKSLNGRYKLCDSADTEITATAQLVGGISXLIIGDSKGGLAQWFMARDPDGXRASKLIRTFQMGKGAVVQID

SEQ ID NO: 8762 - protein, 113 aa, Zea mays
  Coding DNA Sequence Number=SeqID_2425
  Gene Ontology: Mol. function=spermidine synthase activity; Cellular component=cytoplasm; Biological process=spermidine biosynthetic process
  Homolog annotation: Hit_ID=Q0T879; Match level="QueryCoverage=100%, HitCoverage=39%, E-value=9e-51, Identity=84%"; Hit description =Spermidine synthase
  Pfam annotation: Domain name=Spermine_synth; Domain location=6-113; Score=-2.8; E_value=2.2e-08; Accession=PF01564.7; Description =Sperminespermidine synthase
MAEKETWHETLHSGFGQYFSVDNLLYRDKTAHQDLVIFENAAFGRVMALDGVVQTTERDEFIYHEMMTHVPILAHGNARRVLIIGGGDGAMLREVARHQSVEHITMVEIDAGV

SEQ ID NO: 8763 - protein, 331 aa, Zea mays
  Coding DNA Sequence Number=SeqID_2426
MPYYIDGSVFGLIAGQSYGAVAFLHIDHTDETRITLPAVTGTKLVTYQLSVNFQFQYLPAAGGTDTAAWADGLDAIVDGLKDAIRADPTFGAPDVLFQVAQGDANGANSTDVTVDLDYPQQDPNGGRIYLRPAVTAYRFTHSSPLIYLGLSVGEANVTRADTDFKEPSPGSTLVLFPGDIIDLPDGAEPGAWLAPVPAEKPAKEPQPDPATTTDPATETAAQDAAPAADTKTEMTNPTFGASNLQWLGVAREDTYGTAAAAPTLFVPVDSPAWTHPTENLLDSNLRGSMATDFQQQKGLRYDQVSFTTYAYLDQVFFFLRSALGLPDVISG

SEQ ID NO: 8764 - protein, 111 aa, Zea mays
  Coding DNA Sequence Number=SeqID_2428
  Gene Ontology: Mol. function=NAD-dependent histone deacetylase activity; Cellular component=chromatin silencing complex; Biological process=regulation of transcription, DNA-dependent
  Homolog annotation: Hit_ID=Q2QWW9; Match level="QueryCoverage=99%, HitCoverage=27%, E-value=2e-54, Identity=92%"; Hit description =Transcriptional regulator, Sir2 family protein, expressed
  Pfam annotation: Domain name=SIR2; Domain location=2-93; Score=-96.6; E_value=0.016; Accession=PF02146.8; Description=Sir2 family
QWAQAIDSLEVGQPGSDKSFGMQQRPDGDVEIDEKFWEQDFEIPSCHQCGGVLKPDVVMFGDNVPQERAESAKEAARTCDALLVVGSALMTMSAFRLARLAHEANAPIAAG

SEQ ID NO: 8765 - protein, 190 aa, Zea mays
  misc_feature (146)..(146): Xaa can be any naturally occurring amino acid
  misc_feature (157)..(157): Xaa can be any naturally occurring amino acid
  Coding DNA Sequence Number=SeqID_2429
  Gene Ontology: Biological process=response to stress
  Homolog annotation: Hit_ID=Q75HQ2; Match level="QueryCoverage=53%, HitCoverage=40%, E-value=9e-31, Identity=76%"; Hit description =Putative uncharacterized protein P0636F09.16
  Pfam annotation: Domain name=Usp; Domain location=75-184; Score=13.1; E_value=0.083; Accession=PF00582.16; Description=Universal stress protein family
MASSAEERFLRQLSASNGGDEGVCGGQQLGHKEYCAERRGSRRWSRKRAAAARGYCGGYDDYDVKQQAEAASAAARKRVIVVVDDTSGSKHAMMWALTHVASKGDFLTLLHVLLPHSASGGGCSRGEEASSLANSLGTLCKASRPXEVEVEALGIQXPKLGTVLSQVKKLEASVLVLGQGRPSPCYRWLS

SEQ ID NO: 8766 - protein, 112 aa, Zea mays
  Coding DNA Sequence Number=SeqID_2430
AWSRSREAGRDDAGRRRPRAGIKASSKDASRRSAAAGSARCAATRHAASETIDLLRDPDRVKQSGAVQYADGDNGSSSSSVGYGWPAAHYYSSPDRSAPPSMHRPPLFVRAS

SEQ ID NO: 8767 - protein, 152 aa, Zea mays
  Coding DNA Sequence Number=SeqID_2432
RLANGPWARLCALYVGSGLTHILWLLYTRLTAIQSMVVLVRVKFLPVYQATKEERFVVRESQGSGAPTCSARVERYRHKDSTTRTGRLKRCWVCSLIRQAEDNHGAVLSVARVASIVVGGWLWPHAVVRTPPTSIYAHELVAMMSAFGRRVG

SEQ ID NO: 8768 - protein, 51 aa, Zea mays
  Coding DNA Sequence Number=SeqID_2434
  Subcellular localization annotation: CTP_CleavageSite=37; ConfidenceScore=5.10e-01
VDSPTSPSQSSAEARARYIRRRRPAVQSIPFSAFWLRSSVVSVLISLISDM

SEQ ID NO: 8769 - protein, 176 aa, Zea mays
  Coding DNA Sequence Number=SeqID_2435
  Gene Ontology: Mol. function=P-P-bond-hydrolysis-driven protein transmembrane transporter activity; Cellular component=integral to membrane; Biological process=intracellular protein transport across a membrane
  Homolog annotation: Hit_ID=Q4URF9; Match level="QueryCoverage=44%, HitCoverage=17%, E-value=1e-25, Identity=70%"; Hit description =Preprotein translocase SecY subunit
  Pfam annotation: Domain name=L15; Domain location=54-85; Score=29.3; E_value=1.5e-05; Accession=PF00256.13; Description=Ribosomal protein L15
MPAAPPAQVGFRSKLKAESQQVFLYQLANLKADVIDVVELHKAGLIDSKAKKVKVVLKGEIGRAVKLSGLLATAGAKAAIEAAGGSANGNALGKLGKLTELRQRIFFVIGALVVFRLGSFIPVPGVNPDAMTNLVNGNGLMDMFNMFSGGALARFSVFALGVIPYISASIVIQMMG

SEQ ID NO: 8770 - protein, 71 aa, Zea mays
  Coding DNA Sequence Number=SeqID_2436
  Homolog annotation: Hit_ID=A2XTH2; Match level="QueryCoverage=87%, HitCoverage=11%, E-value=7e-19, Identity=72%"; Hit description =Putative uncharacterized protein
ARRTCNISCTPQWLLLSVTEKLPQSVVDLLKALVINIHHYLLLFSLMGFSVLFDGIQTPGFGIATRYMFTM

SEQ ID NO: 8771 - protein, 71 aa, Zea mays
  Coding DNA Sequence Number=SeqID_2437
  Subcellular localization annotation: CTP_CleavageSite=50; ConfidenceScore=5.02e-01
GVALVCGRLFGPPVACVWVGFAALSVAVCFRGVGWPGVLLFFGGVFRFVRAGLYAPPFGRLPSAVGSQHSL

SEQ ID NO: 8772 - protein, 108 aa, Zea mays
  Coding DNA Sequence Number=SeqID_2439
VAPMVLVAAFTHTIKVVVPSVLLDLIVAQLSLARPDETSLVHELEGTGTLGEAYIWQPIGSGMKRGEEGVDEEPKALEPSEKKPLRRENLGRWNGIAAEEDETRTVHR

SEQ ID NO: 8773 - protein, 128 aa, Zea mays
  misc_feature (32)..(32): Xaa can be any naturally occurring amino acid
  misc_feature (34)..(34): Xaa can be any naturally occurring amino acid
  misc_feature (66)..(66): Xaa can be any naturally occurring amino acid
  misc_feature (84)..(84): Xaa can be any naturally occurring amino acid
  Coding DNA Sequence Number=SeqID_2441
  Gene Ontology: Mol. function=protein binding; Biological process =protein metabolic process
  Homolog annotation: Hit_ID=Q10P51; Match level="QueryCoverage=64%, HitCoverage=35%, E-value=2e-29, Identity=80%"; Hit description=Clp amino terminal domain containing protein, expressed
  Subcellular localization annotation: CTP_CleavageSite=47; ConfidenceScore=5.09e-01
GSRVRSSGSGFSSRAANVLGKSGMFYLSPMFXTXTEAAQRALDWAVNEKLKSGEDGEVTANHLLLXWVWSDKESAGHKILYSLXFDDEIASLLAKTAEYCYIIHGKGVYCTTDHFVVSQIFYSSAAGW

SEQ ID NO: 8774 - protein, 63 aa, Zea mays
  misc_feature (30)..(30): Xaa can be any naturally occurring amino acid
  Coding DNA Sequence Number=SeqID_2442
  Gene Ontology: Mol. function=inositol-3-phosphate synthase activity; Cellular component=cytoplasm; Biological process=phospholipid biosynthetic process
  Homolog annotation: Hit_ID=Q7XZE6; Match level="QueryCoverage=100%, HitCoverage=12%, E-value=9e-14, Identity=66%"; Hit description =Inositol 1-phosphate synthase
  Subcellular localization annotation: CTP_CleavageSite=35; ConfidenceScore=5.51e-01
GTARFPSFHRWAPTLSSFTKAPLVPPAHTXVVTVLANQRAMLKTIIRACVGLAPETNMILKYK

SEQ ID NO: 8775 - protein, 220 aa, Zea mays
  Coding DNA Sequence Number=SeqID_2443
  Gene Ontology: Mol. function=transporter activity; Cellular component= integral to membrane; Biological process=transport
  Homolog annotation: Hit_ID=Q4J2V5; Match level="QueryCoverage=100%, HitCoverage=21%, E-value=6e-56, Identity=53%"; Hit description =Acriflavin resistance protein precursor
  Subcellular localization annotation: CTP_CleavageSite=27; ConfidenceScore=5.18e-01
RGAHEVSFTVLSMTVSLVAVFIPILLMGSIVGRLFREFAVTLTVSLLISMFVSLSLTPMLCARLLRPKPQVTRRPHPLYQLIENALNALLAAYARGLAWVMAHQKITLLSLLLTVLLNLFLFSVVQKGFFPNQDTGLLMGALRADQNISFQAMKPKMLAFTKIIEADPAVDSVMSSMGSGMFGSRNSANFFVRVKDFDQRSASATERATRLSQKNRHIAG

SEQ ID NO: 8776 - protein, 344 aa, Zea mays
  Coding DNA Sequence Number=SeqID_2444
  Homolog annotation: Hit_ID=Q53QH2; Match level="QueryCoverage=88%, HitCoverage=97%, E-value=1e-91, Identity=60%"; Hit description=F-box domain, putative
  Pfam annotation: Domain name=F-box; Domain location=19-66; Score =29.2; E_value=1.5e-05; Accession=PF00646.23; Description=F-box domain
MGVGAMEASSPAGDDVGGTGIEDLPADVLALVLRRLDGASLAAVGCASSGLRSLATDPATWRALCFAMWPSVRDLPCTGRVDGGHRALFADAFPFPCSVSPPTPPQPLPARLVSAVDLRHAGVCVLSRVVETDAASDWFLGAPFRVDALLQEGFTSPAAAAIAPADLELSWVLFDPATGRALNASSRRAVAVDRKWLTGDTVARFAVVLGGGVALDAAVTCDERRGHVREVSLRVEDADGAGVSGRDGLAAVAAAMAAPRRGCRGAAEDVARVRYEDFHRERRVRKEWKAKREGILDLCCSGVWAAAFLGFQLIAHVPGDETVSSAEPVALVGRRTTSPASAFY

SEQ ID NO: 8777 - protein, 200 aa, Zea mays
  Coding DNA Sequence Number=SeqID_2445
  Gene Ontology: Mol. function=metal ion binding; Cellular component =nucleus; Biological process=regulation of transcription, DNA -dependent
  Homolog annotation: Hit_ID=Q49I54; Match level="QueryCoverage=75%, HitCoverage=34%, E-value=4e-32, Identity=52%"; Hit description =Teosinte glume architecture 1
  Pfam annotation: Domain name=SBP; Domain location=104-179; Score =73.7; E_value=6e-19; Accession=PF03110.5; Description=SBP domain
MDWDLNAAGAWDLAELERDHAAAAPSSGGHAANAAAAGTGTESRPPAPGAAGAPAECSVDLKLGGMGECEPGAARREREAAAGAAKRPRPAGPGGQQQQQQCPSCAVDGCRADLGKCRDYHRRHKVCEAHSKTPVVVVAGREMRFCQQCSSLGSGDGADPRTRELLPLLFRERILSFTAFGDGMSPGPYSASAIFSSSAS

SEQ ID NO: 8778 - protein, 165 aa, Zea mays
  Coding DNA Sequence Number=SeqID_2446
  Gene Ontology: Mol. function=RNA-directed DNA polymerase activity; Biological process=RNA-dependent DNA replication
  Homolog annotation: Hit_ID=O48967; Match level="QueryCoverage=100%, HitCoverage=35%, E-value=1e-62, Identity=76%"; Hit description =Putative uncharacterized protein
  Subcellular localization annotation: CTP_CleavageSite=84; ConfidenceScore=5.02e-01
LPAARELLRHPPSSTASLEAMKQWQDDVDRLLGMAHSTSTRSRPRSFRRQHEASASVHSPSVRGAQTNDLRAELNRRRAGEDARVSLERARERRQNIEGRNLDQDFAAVALQPPVGTRFQAGVPLADVGCAALVDHLPAASWPPKFRSHLLEKYDGTSNPSEFLQ

SEQ ID NO: 8779 - protein, 80 aa, Zea mays
  Coding DNA Sequence Number=SeqID_2447
  Subcellular localization annotation: CTP_CleavageSite=16; ConfidenceScore=5.54e-01
VPACPSCRTCGALPKRHAAAVGRPQPPTRKGGGAPPPSPLFPPPTGQCAAASVAAQCSSRRRSIASAHCSSPLLPLRQPP

SEQ ID NO: 8780 - protein, 106 aa, Zea mays
  Coding DNA Sequence Number=SeqID_2449
MRTPGERPKENGGANTPRETSGGRTRGTGPTAKRTGPAQTEAREEPRDGQAQNNQAQGAPPGAGPTRDKGGTERDRARPDAAKPGPAPKADRDPRKRTAGGGTRRP

SEQ ID NO: 8781 - protein, 172 aa, Zea mays
  Coding DNA Sequence Number=SeqID_2451
  Homolog annotation: Hit_ID=Q7XBD1; Match level="QueryCoverage=36%, HitCoverage=16%, E-value=2e-11, Identity=59%"; Hit description =Putative retrotransposon protein
MPNEAASRSSQDGLIYLKYTFRYKYQFDELNDDWLDCIEATSDELLCAYTRAEDDAPTVLTHRSRNIDMAKMSKLVEGPSSAAEPDHPATTETMVKSAEEPILKVAAEKPKAEIADVPKCPAEARAKTAEETELRKSAKQPKTLSQPQETELPNVGDLFSNATNQEQGNIKC

SEQ ID NO: 8782 - protein, 184 aa, Zea mays
  misc_feature (32)..(32): Xaa can be any naturally occurring amino acid
  Coding DNA Sequence Number=SeqID_2452
GGGEDEEGIVAGGGDQRKRGRRQQETEADEEXEGDTPPGRRARRGGTNGAEPEEAPRPEDKTGDADTEPRTGRANDPSYNRGRDNEDDHPNRPTSLPEAEEEATRRKKGGPTALTATDKGAVKGWTDRPAGPATKDKQTRDLGQPARTTDARSKGTPDDKEEAEVPTRDLPSKRDKQHGHTTTQ

SEQ ID NO: 8783 - protein, 120 aa, Zea mays
  Coding DNA Sequence Number=SeqID_2454
MKCRAPVRLVDPRQEVKLARPSVKSAALGIGMHPPAAPATGRRPPSPPCVAETAVSGASGVSAELSVDDYLVGGVAMFDAHIGRGTCWSKVRATGCCPGAGGGWPGGRANRGEVVFAGPM

SEQ ID NO: 8784 - protein, 186 aa, Zea mays
  Coding DNA Sequence Number=SeqID_2456
  Gene Ontology: Cellular component=integral to membrane
  Homolog annotation: Hit_ID=A4W5Q3; Match level="QueryCoverage=93%, HitCoverage=15%, E-value=2e-68, Identity=79%"; Hit description=MscS Mechanosensitive ion channel precursor
QALRNQLNNQRQREAELALERTEQLAENSGDLPASISDQFRVNRELSADLNQQAQRMDLVASQQRLATNQTLQVRQALSTLREQSQWLGVSNLLGEALRAQVARLPEMPKSQQIDSEMGQLRVQRLHYEDLLERQQALRKEKQADGTPFTSEQTRILDAQLKTQRELLNSLISGCDTLILEITKLK

SEQ ID NO: 8785 - protein, 114 aa, Zea mays
  Coding DNA Sequence Number=SeqID_2457
  Gene Ontology: Mol. function=receptor activity; Cellular component =integral to membrane
  Homolog annotation: Hit_ID=A7P6G1; Match level="QueryCoverage=97%, HitCoverage=21%, E-value=2e-22, Identity=54%"; Hit description =Chromosome chr9 scaffold_7, whole genome shotgun sequence
  Pfam annotation: Domain name=Lung_7-TM_R; Domain location=2-114; Score=-126.4; E_value=0.0072; Accession=PF06814.3; Description=Lung seven transmembrane receptor
  Subcellular localization annotation: CTP_CleavageSite=22; ConfidenceScore=5.02e-01
LSSSRLAARGVHMGHGVVRHALAGLKSARVAGLGAVFFATAEALEVSENVGTVSDHSSSLMRRLFLVLPLAVLNAVFVYWIFSSLSKTLNKLKAKRMTTKLEMYRMLNNALIIA

SEQ ID NO: 8786 - protein, 130 aa, Zea mays
  Coding DNA Sequence Number=SeqID_2458
TAAFADQVASGTLVDVATSQLRSEKKRLEDKIERLRTQNIEAIMDKSTAENKSRNLPEKVDTFEKENEGLSRQLSELKHTVVQSQSEAQSVRAEAQAGGGYHADRTHALFVDVYHDLGAETTPFDRSRGE

SEQ ID NO: 8787 - protein, 96 aa, Zea mays
  Coding DNA Sequence Number=SeqID_2460
  Gene Ontology: Mol. function=ATP-dependent helicase activity; Cellular component=nucleus; Biological process=protein modification process
  Homolog annotation: Hit_ID=A2X011; Match level="QueryCoverage=64%, HitCoverage=6%, E-value=2e-17, Identity=70%"; Hit description =Putative uncharacterized protein
  Pfam annotation: Domain name=Helicase_C; Domain location=8-70; Score =5.9; E_value=0.013; Accession=PF00271.21; Description=Helicase conserved C-terminal domain
MPAVGSQMCQANACHSGGMETMDRRKIEADLFGGKLHGVAATNALELGIDVGHIDATLHLGFPGSIARSVKNDTFNEAQCLSCHPAKIQNFYCRHA

SEQ ID NO: 8788 - protein, 129 aa, Zea mays
  Coding DNA Sequence Number=SeqID_2461
  Gene Ontology: Mol. function=kinase activity; Cellular component =cellular_component; Biological process=fructosamine metabolic process
  Homolog annotation: Hit_ID=A8GDN9; Match level="QueryCoverage=87%, HitCoverage=39%, E-value=1e-41, Identity=69%"; Hit description =Fructosamine kinase
  Pfam annotation: Domain name=Fructosamin_kin; Domain location=1-118; Score=-21.4; E_value=1.1e-10; Accession=PF03881.5; Description =Fructosamine kinase
MELIVDCVQRSLASHHPQPSLLHGDLWPANCAGSASGPWLFDPACYWGDRECDLAMLSYYADLPRQIYEGYHAVWPLPEGFSQRQPVYQLYYLLNRANVFGGNWAGEAQFAIGQLLEEDALGQRQVRPA

SEQ ID NO: 8789 - protein, 66 aa, Zea mays
  Coding DNA Sequence Number=SeqID_2462
  Gene Ontology: Mol. function=transporter activity; Biological process= transport
  Homolog annotation: Hit_ID=A6TCU5; Match level="QueryCoverage=96%, HitCoverage=19%, E-value=3e-23, Identity=78%"; Hit description =Glycine/betaine/proline transport protein
WADKNPAAAKLFAEMKLPIGDINADNAAMHAGHASEADINGHVDGWIKAHQAEFDKWVNDAMAAAK

SEQ ID NO: 8790 - protein, 78 aa, Zea mays
  Coding DNA Sequence Number=SeqID_2463
  Gene Ontology: Mol. function=sequence-specific DNA binding; Cellular component=intracellular; Biological process=regulation of transcription, DNA-dependent
  Homolog annotation: Hit_ID=A6TCQ3; Match level="QueryCoverage=85%, HitCoverage=55%, E-value=6e-26, Identity=83%"; Hit description =Putative helix-turn-helix, AraC type
  Pfam annotation: Domain name=HTH_AraC; Domain location=23-67; Score =39.4; E_value=1.3e-08; Accession=PF00165.13; Description=Bacterial regulatory helix-turn-helix proteins, araC family
QRMFKEHTGYPLGEYIRAKKLKKSADRLTTTNEPILNVAISLGFDSQQSFNRSFKRQYGVAPGAWRRHAAHTPSAMQQ

SEQ ID NO: 8791 - protein, 250 aa, Zea mays
  Coding DNA Sequence Number=SeqID_2464
  Homolog annotation: Hit_ID=A6T929; Match level="QueryCoverage=100%, HitCoverage=58%, E-value=1e-121, Identity=82%"; Hit description =Putative uncharacterized protein
  Pfam annotation: Domain name=DUF187; Domain location=1-242; Score =164.4; E_value=3e-46; Accession=PF02638.6; Description =Uncharacterized BCR, COG1649
VLHRHWTRTASDRFVLDPGIPAALYWITSIVAEVVSNYAIDGVQFDDYFYTETAASPLNDSATFRQYGAGFASKADWRRHNTQLLIEQVSRTIKQLKPGVEFGVSPAGVWRNLSHDAVGSDTRGAAAYDEAYADTRRWVQLGLLDYIAPQLYWPFARQAARYDVLARWWANVVQPTHTRLYIGVALYKVGEASKSEPDWTVQGGVPELKKQLDLNESLPHIDGTILFREDYLNQPQTQQAVDYLRQRWGK

SEQ ID NO: 8792 - protein, 155 aa, Zea mays
  Coding DNA Sequence Number=SeqID_2465
  Gene Ontology: Mol. function=nucleoside:sodium symporter activity; Cellular component=membrane; Biological process=transport
  Homolog annotation: Hit_ID=Q47BE7; Match level="QueryCoverage=96%, HitCoverage=47%, E-value=1e-23, Identity=40%"; Hit description =Putative uncharacterized protein
QGVENSDTKPGLIAIINTSGADAIRLALGSLPMLILSLSVVGILKSAGAIELLTQLLAPLLHKLHIAEVYVLPALTKCLAGGTAYYGVVAGLVEQGQYSAHNINASAGLLIQTFDLPGIGIFLGLSSRFPRLFRFAVPGILLGIALRATAHSLLF

SEQ ID NO: 8793 - protein, 185 aa, Zea mays
  Coding DNA Sequence Number=SeqID_2466
  Subcellular localization annotation: CTP_CleavageSite=43; ConfidenceScore=5.15e-01
CRDAHRSNWRSLHALETRSSTRIRPRPPAVRSCARRRQGGGARAGDREEPSEPARACRGQGVSQRARRRSRWPRSPEIRPRRRTPEIGTRAPHAWDPPSTPRTPETGTRRACLEAARATHAGSPASPHVGDRHGVGRAAAKRQSTGACVLCPVRFGKRRGKGKVWMAGPTYKAFGSTCKSLDERK

SEQ ID NO: 8794 - protein, 328 aa, Zea mays
  Coding DNA Sequence Number=SeqID_2468
  Gene Ontology: Mol. function=transferase activity, transferring nitrogenous groups; Cellular component=mitochondrial inner membrane; Biological process=biotin biosynthetic process
  Homolog annotation: Hit_ID=Q47829; Match level="QueryCoverage=100%, HitCoverage=85%, E-value=8e-96, Identity=56%"; Hit description=8 -amino-7-oxononanoate synthase
  Pfam annotation: Domain name=Aminotran_1_2; Domain location=17-328; Score=131.1; E_value=3.3e-36; Accession=PF00155.11; Description =Aminotransferase class I and II
  Pfam annotation: Domain name=Beta_elim_lyase; Domain location=57-304; Score=-115.8; E_value=0.0079; Accession=PF01212.11; Description=Beta -eliminating lyase
  Pfam module annotation: Pfam domain module=Aminotran_1_2::Beta_elim _lyase; Domain location=17-328::57-304
RHPIEHNSVREITLDGQRYRHFSSNDYLGLSQHPAVMAAWQQGVREAGVGAGASGYVTGYSRHHAQLEQQLASWLGYPRALLFISGFAANQAVIHLLAQKSDRIIADKLAHASLLDAASHSPATLRRFAHNQPASLANLLATRAEVGTLVVTEGVFSMDGDSAPLAELAAETRRAGGWLLVDDAHGIGVTGEQGRVICCQQQVKPELLVVTFGKGFGVSGAALLCHDATADYVEQFSRHLIYSSAIPPAQFCALLAALAQIQQGDALRARLQQNIARFRAGASQLPWQLMASDSAIQPLIVDEICTALALSQRLAQAGCWVSAIRPPT

SEQ ID NO: 8795 - protein, 74 aa, Zea mays
  misc_feature (21)..(21): Xaa can be any naturally occurring amino acid
  Coding DNA Sequence Number=SeqID_2469
  Gene Ontology: Mol. function=recombinase activity; Biological process= DNA recombination
  Homolog annotation: Hit_ID=P77698; Match level="QueryCoverage=98%, HitCoverage=14%, E-value=1e-17, Identity=57%"; Hit description =Uncharacterized protein ybcK
DKEAIAYVRFSNASQQYGDSXRRQNALISEWLSQHPDYELDDTTYQDMGLSAYSGMNATRGALYDFLDAVEHGY

SEQ ID NO: 8796 - protein, 52 aa, Zea mays
  Coding DNA Sequence Number=SeqID_2470
  Gene Ontology: Mol. function=two-component sensor activity; Cellular component=membrane; Biological process=signal transduction
  Homolog annotation: Hit_ID=A2WYB7; Match level="QueryCoverage=94%, HitCoverage=2%, E-value=1e-17, Identity=89%"; Hit description =Putative uncharacterized protein
MDLKEDFLWEVEQSKLKGQDLKSKEVRVNTRLLYQQTKFNLLREESEGYAKL

SEQ ID NO: 8797 - protein, 69 aa, Zea mays
  misc_feature (35)..(35): Xaa can be any naturally occurring amino acid
  misc_feature (41)..(41): Xaa can be any naturally occurring amino acid
  Coding DNA Sequence Number=SeqID_2471
  Gene Ontology: Mol. function=RNA-directed DNA polymerase activity; Cellular component=chromatin; Biological process=chromatin assembly or disassembly
  Homolog annotation: Hit_ID=Q2R4W7; Match level="QueryCoverage=92%, HitCoverage=4%, E-value=9e-17, Identity=59%"; Hit description =Retrotransposon protein, putative, Ty3-gypsy subclass
RPAPPDMNSAQFLYLKVSPIRGVRRFRVKGKLAPXYIRPYXIVARRGEVAYHLNLREDLLEVHDIFHVS

SEQ ID NO: 8798 - protein, 70 aa, Zea mays
  Coding DNA Sequence Number=SeqID_2472
  Gene Ontology: Mol. function=hydrolase activity, hydrolyzing O -glycosyl compounds; Cellular component=extracellular region; Biological process=polysaccharide catabolic process
  Homolog annotation: Hit_ID=A2WX72; Match level="QueryCoverage=70%, HitCoverage=16%, E-value=8e-16, Identity=79%"; Hit description =Putative uncharacterized protein
AAGTGFVPAGKLTSQVLPLIRRSRKYGGVMLWAKFYDDRTGYSDAIKRHFLGRDPGHGLTGAASRFPRAR

SEQ ID NO: 8799 - protein, 72 aa, Zea mays
  Coding DNA Sequence Number=SeqID_2473
  Gene Ontology: Mol. function=inositol-3-phosphate synthase activity; Cellular component=cytoplasm; Biological process=phospholipid biosynthetic process
  Homolog annotation: Hit_ID=A4UMS1; Match level="QueryCoverage=100%, HitCoverage=14%, E-value=9e-17, Identity=62%"; Hit description=Myo -inositol-1-phosphate synthase isoform 1
LRIRIQLNTKGSDMYRSFHPEATILSDLTNAPLLSPEALVVNALDKPRAMLDNMMRNCKGLCPANNMRLEYK

SEQ ID NO: 8800 - protein, 138 aa, Zea mays
  Coding DNA Sequence Number=SeqID_2474
  Subcellular localization annotation: CTP_CleavageSite=52; ConfidenceScore=5.37e-01
PVLRQPISIFPLRVSVPCQWDPCSSAQSLTCVRSFLHCLSAWDGRVSSLSPSSALSSARRTCHDRVKLRQSHGHHDHIPCCGRTNPLPLLPGVGLTRRHPHTHPMQFLPNGFAAAAAEARAEILALGAPPGGIKSQSR

SEQ ID NO: 8801 - protein, 59 aa, Zea mays
  Coding DNA Sequence Number=SeqID_2476
  Gene Ontology: Cellular component=integral to membrane
  Homolog annotation: Hit_ID=A2WL37; Match level="QueryCoverage=79%, HitCoverage=13%, E-value=9e-19, Identity=95%"; Hit description =Putative uncharacterized protein
LGDWVFHFAATTLTSWHLLVTFCSLHVALCMKLFEHKPFDARTVMGFGVLNGSFGEFAL

SEQ ID NO: 8802 - protein, 134 aa, Zea mays
  Coding DNA Sequence Number=SeqID_2477
CSGQVGGHLAERRRRRRRQRPRRPAPAQRPDNEQRGGSGADGAISGRAAPAAASREGREPGLRADDAAPGPLLVHGRRRDGEDEEHRRFITSLAGDADPAAAAAARRQRLVVLVDRCQISRTAASNGFFEVDFI

SEQ ID NO: 8803 - protein, 185 aa, Zea mays
  Coding DNA Sequence Number=SeqID_2479
  Gene Ontology: Mol. function=aryl-alcohol dehydrogenase (NADP+) activity; Cellular component=integral to membrane; Biological process=potassium ion transport
  Homolog annotation: Hit_ID=Q39EI1; Match level="QueryCoverage=100%, HitCoverage=57%, E-value=4e-91, Identity=87%"; Hit description =Aldo/keto reductase
  Pfam annotation: Domain name=Aldo_ket_red; Domain location=1-181; Score=-74.0; E_value=0.00019; Accession=PF00248.11; Description =Aldoketo reductase family
MSDMIARGKALYWGTSEWSADEIRAAYGIAERHHLHKPVVEQPQYNLFHRTRVEQEYARLYDDYGLGLTTWSPLASGLLTGKYRNGVPPGSRAELHGYDWLRDRLTDPASNDVVERLGAIAAELGCNTAQLAIAWVLANPHVSSVITGASRIEQIGDNMRAIDVAAQLTPEIKQRIAEAVGDTYE

SEQ ID NO: 8804 - protein, 113 aa, Zea mays
  Coding DNA Sequence Number=SeqID_2480
  Gene Ontology: Mol. function=hydrolase activity, acting on carbon -nitrogen (but not peptide) bonds
  Homolog annotation: Hit_ID=A6W9E4; Match level="QueryCoverage=84%, HitCoverage=20%, E-value=3e-24, Identity=55%"; Hit description =Amidohydrolase
STITAIGKDLNAEGAHVIDATNMIAMPGMVDSHRHAWEGQLRRINPNATCLDDYSNATHFSFAKYYRPADIYVGNLLTALGAIDAGITTMIDNSHNSRTAAHSDAAVEALLDA

SEQ ID NO: 8805 - protein, 65 aa, Zea mays
  Coding DNA Sequence Number=SeqID_2481
  Homolog annotation: Hit_ID=A2ZHN6; Match level="QueryCoverage=93%, HitCoverage=47%, E-value=1e-23, Identity=77%"; Hit description =Putative uncharacterized protein
MPRKVVVRFIGSALVGKSETEDACHHGLVEPTINTKEALDAINSMFMEPLEPETVLKRQSKRENP

SEQ ID NO: 8806 - protein, 290 aa, Zea mays
  misc_feature (22)..(22): Xaa can be any naturally occurring amino acid
  misc_feature (24)..(24): Xaa can be any naturally occurring amino acid
  Coding DNA Sequence Number=SeqID_2482
  Gene Ontology: Mol. function=transferase activity; Biological process= biosynthetic process
  Homolog annotation: Hit_ID=A7MFF1; Match level="QueryCoverage=98%, HitCoverage=91%, E-value=5e-61, Identity=45%"; Hit description =Putative uncharacterized protein
  Pfam annotation: Domain name=DUF535; Domain location=8-289; Score =298.2; E_value=1.6e-86; Accession=PF04393.3; Description=Protein of unknown function (DUF535)
  Subcellular localization annotation: CTP_CleavageSite=75; ConfidenceScore=5.40e-01
ALFIPLVSGKLRPNKLWNSQHXRXKFALRSAVFPLTTFNYLHQLAKLSFLPQLLSSQGLLPAKPHRPYLRAGFSVAQRAQTILDHYQLMDKLANNQLRQLLLSPTGNLLARFDGKNEEQFAIYCCSGHYDREGEITLLLNYQDMTLASLSFSIIQEQQQRTLLIGGLQGPRKHISSDVIRDATKAAHGVFPKRLLMEAVFILAAQCGVQAITAVGDTTHVFRSLRYRHSKGDKFFASYSEFWLSLGGEMRGDELFTLPLSMARKDLEEIASKKRAEYRRRYALLDTLAQQ

SEQ ID NO: 8807 - protein, 88 aa, Zea mays
  Coding DNA Sequence Number=SeqID_2483
  Gene Ontology: Mol. function=potassium ion transmembrane transporter activity; Cellular component=integral to membrane; Biological process=potassium ion transport
  Homolog annotation: Hit_ID=Q8VXB1; Match level="QueryCoverage=86%, HitCoverage=9%, E-value=1e-35, Identity=98%"; Hit description =Putative potassium transporter 12
MSHKFSSILLLRLAFQSLGVVFGDLGTSPLYVFYNIFPHGVDEDEDVIGALSLIIYTLTLIPLMKYVFVVLRANDNGQGEIEHSCILA

SEQ ID NO: 8808 - protein, 133 aa, Zea mays
  Coding DNA Sequence Number=SeqID_2484
  Gene Ontology: Mol. function=cobyrinic acid a,c-diamide synthase activity; Cellular component=membrane; Biological process=cobalamin biosynthetic process
  Homolog annotation: Hit_ID=A2VTY4; Match level="QueryCoverage=100%, HitCoverage=49%, E-value=6e-69, Identity=97%"; Hit description=RepA partitioning protein/ATPase, ParA type
  Pfam annotation: Domain name=CbiA; Domain location=1-95; Score=-8.8; E_value=0.00023; Accession=PF01656.13; Description=Cobyrinic acid a ,c-diamide synthase
PPTLSLLTLNGLCAAHGVVIPMQCEYFALEGLSDLVNTIKQVHANMNRDLKIIGLLRVMFDPRITLQQQVSDQLKAHFGDKVFDAVIPRNVRLAEAPSYGLPGVVFDRNSRGAQAYLQFGAEMIDRVRAFEVS

SEQ ID NO: 8809 - protein, 78 aa, Zea mays
  misc_feature (25)..(25): Xaa can be any naturally occurring amino acid
  Coding DNA Sequence Number=SeqID_2485
  Gene Ontology: Mol. function=sequence-specific DNA binding; Cellular component=nucleus; Biological process=regulation of transcription, DNA-dependent
  Homolog annotation: Hit_ID=A2ZH47; Match level="QueryCoverage=57%, HitCoverage=22%, E-value=5e-13, Identity=77%"; Hit description =WUSCHEL-related homeobox 3
  Pfam annotation: Domain name=Homeobox; Domain location=4-50; Score =13.7; E_value=0.00049; Accession=PF00046.19; Description=Homeobox domain
MIWEQMYRSADRTPNAAEIQQISEXLANYGRIDGNNVFYWFQNHKARERQRLRRRLCARDQQQYAQHQQQANSIKRRG

SEQ ID NO: 8810 - protein, 115 aa, Zea mays
  misc_feature (68)..(68): Xaa can be any naturally occurring amino acid
  Coding DNA Sequence Number=SeqID_2486
  Gene Ontology: Mol. function=protein serine/threonine kinase activity; Cellular component=integral to membrane; Biological process=protein amino acid phosphorylation
  Homolog annotation: Hit_ID=A2BCY9; Match level="QueryCoverage=93%, HitCoverage=17%, E-value=6e-43, Identity=82%"; Hit description =Putative uncharacterized protein rk1
MPADGEAQFQTELEMISLAVHRNLLQTLWGFCMTSSERLLVYPYMSNGSVALRLKGKTPLDWITRLPXKRIALGAARGLPYLHEQCDPKIIHRDVKAANILLDDCCNGVGFGSEL

SEQ ID NO: 8811 - protein, 115 aa, Zea mays
  Coding DNA Sequence Number=SeqID_2487
  Homolog annotation: Hit_ID=A2XTH2; Match level="QueryCoverage=82%, HitCoverage=17%, E-value=1e-13, Identity=44%"; Hit description =Putative uncharacterized protein
MAKPKPKRPAPPPRRWAACGLWRRPAFASGGLPLAAAAYVGVDYMQHLSPVWHGRLRPALWAALALATAARAPFYRRWGAEVRAAPRFFAAMAFMLAALLCEAISVRFVSTVLGL

SEQ ID NO: 8812 - protein, 98 aa, Zea mays
  Coding DNA Sequence Number=SeqID_2488
  Subcellular localization annotation: CTP_CleavageSite=49; ConfidenceScore=5.22e-01
CRFHRCLMTEVNGALAARATAHATSPDTKVGLAASASRSGSSIPAPVPRNAAARSRTSDEPMTDFSRNGEEPGEADFSNVNKEKRKDWEDNARRIHSP

SEQ ID NO: 8813 - protein, 133 aa, Zea mays
  Coding DNA Sequence Number=SeqID_239
  Subcellular localization annotation: CTP_CleavageSite=32; ConfidenceScore=5.14e-01
SRRMAPSFPALAPTATELQNNAAARSARHRPSSAHAGCTKPDPTPHPPPAPPARPPVSQLPSPPPPPPPPARPSDPAVSRAPAAPRPTKRVRFAFTTSTMPPRIHHPSPVSRSHNATPAPIAGLKPPWKLRPH

SEQ ID NO: 8814 - protein, 149 aa, Zea mays
  Coding DNA Sequence Number=SeqID_241
RGNLDSIVVSSCLDEPASPSRHSTPRIHVAPWRSRRGGRRTARRTIIGGLAARHHGPPRSHRGQPSCALMASVEPIEGHGGLPVDGSPAATIAPRSTMLLPGSTRRGAVEWPTQEADLDVEWRSVLHFASPRCGPPPLLCYSLPKCCHP

SEQ ID NO: 8815 - protein, 105 aa, Zea mays
  Coding DNA Sequence Number=SeqID_243
  Gene Ontology: Mol. function=phosphotransferase activity, phosphate group as acceptor; Biological process=nucleobase, nucleoside, nucleotide and nucleic acid metabolic process
  Homolog annotation: Hit_ID=Q08479; Match level="QueryCoverage=37%, HitCoverage=16%, E-value=5e-13, Identity=87%"; Hit description =Adenylate kinase A
MAANLEDVPSLDLMHELLRRMKCSSKPDKRLILIGPPGCRWLVRVAFFVSAAAALRAVREIWFGFVPLQCNHVVTLKGLFRLCSYGLCFLFNDCYYHVAVTIVIS

SEQ ID NO: 8816 - protein, 315 aa, Zea mays
  misc_feature (245)..(245): Xaa can be any naturally occurring amino acid
  misc_feature (260)..(260): Xaa can be any naturally occurring amino acid
  Coding DNA Sequence Number=SeqID_244
  Gene Ontology: Mol. function=oxidoreductase activity; Cellular component=cytoplasm; Biological process=ethylene biosynthetic process
  Homolog annotation: Hit_ID=O81606; Match level="QueryCoverage=100%, HitCoverage=100%, E-value=1e-168, Identity=93%"; Hit description=1 -aminocyclopropane-1-carboxylate oxidase
  Pfam annotation: Domain name=2OG-FeII_Oxy; Domain location=157-258; Score=146.9; E_value=5.5e-41; Accession=PF03171.10; Description=2OG -Fe(II) oxygenase superfamily
MVVPVIDFSKLDGAERAETLAQIANGCEEWGFFQLVNHGIPLELLERVKKVCSDSYRLREAGFKASEPVRTLEALVDAERRGEVVAPVDDLDWEDIFYIHDGCQWPSDPPAFKETMREYRAELRKLAERVMEAMDENLGLARGTIKDAFTGGSRHEPFFGTKVSHYPPCPRPDLITGLRAHTDAGGVILLFQDDKVGGLEVLKDGEWADVQPLEGAIVVNTGDQIEVLSNGRYRSAWHRVLPMRXDGNRRSIASFYNPAXEATISPAAVQVSGGDAYPKYLFGDYMDVYVKQKFQAKEPRFEAVKTGAPKSSPAA

SEQ ID NO: 8817 - protein, 291 aa, Zea mays
  Coding DNA Sequence Number=SeqID_245
TRCETTPPIATTNQSITLAAPAPLLEVAQPAMACSKAVLLAALLAVAGALSSAAVWEDYDHHMYHKCYRSCMRKCDDDDADDALKNSISPVVTSVSDDHDHDDDHDHHDDHNHDHDDHHDDHDHDHHHDDHDHDHDDHDHDHNDNHGEHHDDDDEDDDYNYCRVECIEDCIDYVPGICYRHCVSYSCLYLPPYSYRRAACFRRCGHRCYHHDHHRHHHHHHHHHEDDHDDDDNDDHHDGPTPSPPKPEPKPQPPKPGPTPKPPMPSPTPEPPPPYNRSQVHAETAAKAVFV

SEQ ID NO: 8818 - protein, 140 aa, Zea mays
  Coding DNA Sequence Number=SeqID_247
RKPPPAHSPPPHPLSGACATASLDQRHAYAITPSLLLPPEIVVVPIYALGLHSPRPPPSSPTANHDDYAPIHAPRTSFPVAPTQEGQRPSSFSPFLCFALNATDHPWSKARGFAEQDKNWFSGGVVLGASRSSRRRPLGW

SEQ ID NO: 8819 - protein, 70 aa, Zea mays
  Coding DNA Sequence Number=SeqID_249
HVLHHKTKSQDDIQSWTPGIQIKLVHQVGEHASVWKLGYQIFSVSVGIDVFGLEQVHTSILMGKIGSGCT

SEQ ID NO: 8820 - protein, 77 aa, Zea mays
  Coding DNA Sequence Number=SeqID_251
KVILLLSRFAIPKLHEQQPSVITCRQLQLKLFLSAGPSATKHGPNNVKFNHFKCYVISSKMPIWHTIKCEKNTVKIV

SEQ ID NO: 8821 - protein, 160 aa, Zea mays
  Coding DNA Sequence Number=SeqID_253
  Subcellular localization annotation: CTP_CleavageSite=53; ConfidenceScore=5.02e-01
HLRFQVPTCSSDDTCPHARRSCDVSGHGCVRHCGRGRWPTTNSARTDRSTHTPAAPTPSAGTSETPNPPIRTQMGRRRADGSAAATNLLDHGDRHAQRLAANDQRAPANPNCTSTRIRTVAQRETTAVGRERRWRCLLSLYSSRCVRWLSGCLACSVSAH

SEQ ID NO: 8822 - protein, 201 aa, Zea mays
  Coding DNA Sequence Number=SeqID_255
LALQLLRRLSTTSISPYPPGLTMICIARSRSAYDPRPTRDAKIIHPCRRRRGRRQGNSGHSHRLPYILSASVTPPAIGASLVVETCSCSKVCRCREPPSSPVTMNYGQLIQGGHTELNLAGSSGPGRSQPYMHATRQLATYDPAIVTPESHPAPGRKWGATGGQYRWMADAKSRIIIVRSKVPTCNQGASKQKKKKETYSM

SEQ ID NO: 8823 - protein, 269 aa, Zea mays
  Coding DNA Sequence Number=SeqID_2490
  Gene Ontology: Mol. function=salicylate 1-monooxygenase activity; Cellular component=chloroplast; Biological process=metabolic process
  Homolog annotation: Hit_ID=A0T5K7; Match level="QueryCoverage=100%, HitCoverage=66%, E-value=1e-149, Identity=92%"; Hit description =Salicylate 1-monooxygenase precursor
HPDRVTLSFDNGERIDADLVIGADGARSITRRWMLGYDDVLYSGCSGFRGVVPAERMDLLPDPETIQFWVGPHGHLLHYPIGDNGDQNFLLVERHPSPWPLRDWVMPAQEGEQLRLFGDWHPAVVEMITAVPISQRWGLFHRPPLGRWSRGRVTLIGDAAHALVPHHGQGANQSIEDAMVLAAQLAKAGPGNWREAQEAYERLRRGRTRKVQYASISAADVLHLPDGPAAHARNARLAARDSVLHHLDWIHDFDALADEPNERQGGTWL

SEQ ID NO: 8824 - protein, 290 aa, Zea mays
  Coding DNA Sequence Number=SeqID_2491
  Gene Ontology: Mol. function=oxidoreductase activity, acting on single donors with incorporation of molecular oxygen, incorporation of two atoms of oxygen; Cellular component=membrane; Biological process=fatty acid biosynthetic process
  Homolog annotation: Hit_ID=A1XCI3; Match level="QueryCoverage=40%, HitCoverage=12%, E-value=1e-53, Identity=91%"; Hit description =Lipoxygenase
LQDQLFQKIPFVRKIQENSEGLLRYDTPDIIKSKPAPMRLPPPPSMIHGEDKFAWLRDDEFARQALAGINPVNIERLQAFPPMSKLDPAVYGPPESAITEEHIIGQLDGMSVQQALQIVQNLIAQKVNAIGISVLDASSIAPVMAQAQASNVHLFTSDSDAPDSGRPVYVAQATDEGLGDTVIDEMIKRVGERGKIGIVSGEATVSNLNSWIGFMQQRVKSKYPHITLLKPQYAGGSASRAAQITTDLMSANPDLKGVIAMASTTCPGVAQAIETAGKNGKVIGSGFCRI

SEQ ID NO: 8825 - protein, 75 aa, Zea mays
  misc_feature (34)..(34): Xaa can be any naturally occurring amino acid
  misc_feature (41)..(41): Xaa can be any naturally occurring amino acid
  Coding DNA Sequence Number=SeqID_2492
  Gene Ontology: Mol. function=ribulose-bisphosphate carboxylase activity; Cellular component=chloroplast ribulose bisphosphate carboxylase complex; Biological process=carbon utilization by fixation of carbon dioxide
  Homolog annotation: Hit_ID=Q9GG57; Match level="QueryCoverage=94%, HitCoverage=15%, E-value=1e-16, Identity=57%"; Hit description =Ribulose bisphosphate carboxylase large chain
RSAKNYERVWHDCLSAALHFTQDDGGVNSLPNIXWRGCSIXVDVTMYNAQAETGEIKGHYLNATAGECPHLIYTC

SEQ ID NO: 8826 - protein, 75 aa, Zea mays
  misc_feature (19)..(19): Xaa can be any naturally occurring amino acid
  Coding DNA Sequence Number=SeqID_2493
  Gene Ontology: Mol. function=alkylbase DNA N-glycosylase activity; Cellular component=nucleus; Biological process=base-excision repair
  Homolog annotation: Hit_ID=A3ABU9; Match level="QueryCoverage=97%, HitCoverage=22%, E-value=1e-20, Identity=67%"; Hit description =Putative uncharacterized protein
IQVGQALGLSTDCSSHPVXPPGGLYVLDGPEPQSVLVGPRVVIAHTATEHVTAPRTFAIAGSPSISAHKNTLLPH

SEQ ID NO: 8827 - protein, 382 aa, Zea mays
  Coding DNA Sequence Number=SeqID_2494
  Gene Ontology: Mol. function=transporter activity; Cellular component= membrane; Biological process=transport
  Homolog annotation: Hit_ID=Q6D595; Match level="QueryCoverage=75%, HitCoverage=54%, E-value=3e-96, Identity=65%"; Hit description =Putative branched-chain amino acid transport system, permease component
  Pfam annotation: Domain name=BPD_transp_2; Domain location=8-285; Score=170.5; E_value=4.5e-48; Accession=PF02653.6; Description =Branched-chain amino acid transport system  permease component
  Pfam annotation: Domain name=Caa3_CtaG; Domain location=154-354; Score=-126.2; E_value=0.033; Accession=PF02653.6; Description =Cytochrome c oxidase caa3 assembly fa
  Pfam module annotation: Pfam domain module=BPD_transp_2::Caa3_CtaG; Domain location=8-285::154-354
MWGDWLGQAFTGLSLGSILLLAALGLAITYGLLGVINMAHGEMLMLGAYATWLVQNLFQQFAPQWLAWYPLLALPVAFAVTAVMGMLLERTIIRHLYGRPLETLLATWGISLMLIQLVRMLFGAQNLEVANPGWLSGGWQLLPNLVLPYNRIAVILFVIAVLALTWLLLNKTRLGLNVRAVTQNRAMADCCGVPTGRIDMLAFGLGSGIAGLGGVALSQLGNVGPELGQGYIIDSFLVVVLGGVGQLAGTVVAAFGLGILNKVLEPQIGAVLGKILILVLIVLFIQKRPQAPRLSLILGVIVTALLLVLPFCALLPASHPLAISTYTLTLVGKILCYAIVAVALDLVWGYAGLLSLGHGLFFALGGYAMGMYVMRQAEGRLW

SEQ ID NO: 8828 - protein, 105 aa, Zea mays
  Coding DNA Sequence Number=SeqID_2495
  Gene Ontology: Mol. function=oxidoreductase activity; Cellular component=periplasmic space
  Homolog annotation: Hit_ID=A7MGN8; Match level="QueryCoverage=73%, HitCoverage=14%, E-value=8e-18, Identity=55%"; Hit description =Putative uncharacterized protein
MGHWRAFYPGGRFHRLTLPQGKGLRCAPIHDKDMNMQRRHFLKLTAALSAAGALPFWSRSLMAATRPLLPIPSLLEPDAHGQYTLTAMTGSSQWNGKSVPTWGYN

SEQ ID NO: 8829 - protein, 253 aa, Zea mays
  misc_feature (238)..(238): Xaa can be any naturally occurring amino acid
  Coding DNA Sequence Number=SeqID_2496
  Homolog annotation: Hit_ID=A2XAL7; Match level="QueryCoverage=94%, HitCoverage=76%, E-value=4e-77, Identity=63%"; Hit description =Putative uncharacterized protein
  Pfam annotation: Domain name=Methyltransf_11; Domain location=55-162; Score=12.0; E_value=0.0062; Accession=PF08241.2; Description =Methyltransferase domain
AAGHPLAGARLLLLDGPGNIHSLSFPRRGDRAPLTGTYLDAFATLPPLLPRPKLAELGFSAGAAARALVHFYPDISVHGWELDPAVLAVARDFFGLSDLERRHAPRLSVHVGDTLEARAPPGGFGGTAVDLFALGSVLQALQEPGTCRRLGAVVAPGGRVMVTCAGAGVEAQDEGRDGAAVKNATLRAMAAAFGEGTVSVLHVDGSWVAMTGPPETAPEAAAACRARLPPELRHFVDXWRPYGAGASGQWSPG

SEQ ID NO: 8830 - protein, 199 aa, Zea mays
  Coding DNA Sequence Number=SeqID_2497
  Subcellular localization annotation: CTP_CleavageSite=23; ConfidenceScore=5.45e-01
MRFFPGFFFFFFFFFFQEKNGSRVNTSQGRLVVSSILLLRSCHGTTRPELLDGTELAELRLGLRRTRGHRMEANEARNEELGGHEGGKRPFSPVPTLGLRTRNLLLLMLRGRYLAGNPTPPEQTAATPGLRLLDSCLRAGSAQLLPSLRAGAALGSSRGVLPDLFALRLGGDLFAGHRASFLGPGGGRPARGGPLGGGG

SEQ ID NO: 8831 - protein, 77 aa, Zea mays
  Coding DNA Sequence Number=SeqID_2499
  Subcellular localization annotation: CTP_CleavageSite=42; ConfidenceScore=5.30e-01
MRSLGRAALPPPPWPPACLCAGRPARTRRLWPSWMRAAVLCRSSAWGGPWCPPCVGLGGSGGSALRAPRAPRPACGR

SEQ ID NO: 8832 - protein, 125 aa, Zea mays
  Coding DNA Sequence Number=SeqID_2501
  Gene Ontology: Mol. function=transcription factor activity; Cellular component=cytoplasm; Biological process=regulation of transcription, DNA-dependent
  Homolog annotation: Hit_ID=Q39CI9; Match level="QueryCoverage=100%, HitCoverage=38%, E-value=7e-62, Identity=97%"; Hit description =Transcriptional regulator, LysR family
  Pfam annotation: Domain name=HTH_1; Domain location=9-68; Score=77.7; E_value=3.9e-20; Accession=PF00126.17; Description=Bacterial regulatory helix-turn-helix protein, lysR family
MDLRQLPALNAIRAFEAAARHENFSRAADELYVTHGAVSHQVRALEEELGVQLFARNGKRLCLTDAGMRYAQQIRTALMVIADATREVRASDRGRRLVVSMLSSFAARFITPRIGTFIERHPEID

SEQ ID NO: 8833 - protein, 155 aa, Zea mays
  misc_feature (44)..(44): Xaa can be any naturally occurring amino acid
  Coding DNA Sequence Number=SeqID_2502
  Gene Ontology: Mol. function=nicotinate-nucleotide adenylyltransferase activity; Biological process=pyridine nucleotide biosynthetic process
  Homolog annotation: Hit_ID=A1JPW3; Match level="QueryCoverage=98%, HitCoverage=69%, E-value=3e-60, Identity=69%"; Hit description =Probable nicotinate-nucleotide adenylyltransferase (EC 2.7.7.18) (Deamido-NAD(+) ...
  Homolog annotation: Hit description=pyrophosphorylase) (Deamido -NAD(+) diphosphorylase)
  Pfam annotation: Domain name=CTP_transf_2; Domain location=1-153; Score=115.6; E_value=1.4e-31; Accession=PF01467.16; Description =Cytidylyltransferase
GGTFDPIHYGHLRPVTALAQQVGLQKVTLLPNNVPPHRPQPEAXAQQRVAMLRCAIADRSLFDIDTRELTRTTPSWTVDTLETLRAERGAQQPLGFIIGQDSLLTLGKWHRWQELLSLCHLLVCQRAGYAAQMATPEMQQWLDAHRAHEVQQLHR

SEQ ID NO: 8834 - protein, 148 aa, Zea mays
  misc_feature (104)..(104): Xaa can be any naturally occurring amino acid
  misc_feature (117)..(117): Xaa can be any naturally occurring amino acid
  Coding DNA Sequence Number=SeqID_2503
  Gene Ontology: Mol. function=3-hydroxyacyl-CoA dehydrogenase activity; Cellular component=fatty acid beta-oxidation multienzyme complex; Biological process=fatty acid catabolic process
  Homolog annotation: Hit_ID=A8G8D1; Match level="QueryCoverage=98%, HitCoverage=20%, E-value=6e-51, Identity=71%"; Hit description=Fatty acid oxidation complex subunit alpha [Includes: Enoyl-CoA ...
  Homolog annotation: Hit description=hydratase/Delta(3)-cis-Delta(2) -trans-enoyl-CoA isomerase/3- hydroxybutyryl-CoA epimerase (EC 4.2.1.17) (EC 5.3.3.8) (EC 5.1.2.3); 3-hydroxyacyl-CoA dehydrogenase (EC 1.1.1.35)]
  Pfam annotation: Domain name=ECH; Domain location=18-147; Score=45.1; E_value=1.4e-10; Accession=PF00378.10; Description=Enoyl-CoA hydrataseisomerase family
MLYQGDTLSVHWLDDGIAELVFDAPGSVNKLDTKTVAALGEALSVLEQQSTLRGLLLSSAKPAFIVGADITEFLSLFDAPAEQLSQGLTFANSIFNRLEDLPVXPTIAAIDGYPLGXEACNCVLATDFRVGTPTGRIGPAGKPNFGNY

SEQ ID NO: 8835 - protein, 74 aa, Zea mays
  Coding DNA Sequence Number=SeqID_2504
  Subcellular localization annotation: CTP_CleavageSite=45; ConfidenceScore=5.03e-01
GSSRDVPFHVGSLLGWALALRWFFVASHQRPGLLLAFPLCCGFVLSAQGSGGALLGRGACPSLAVGLSALGPFR

SEQ ID NO: 8836 - protein, 92 aa, Zea mays
  Coding DNA Sequence Number=SeqID_2506
  Gene Ontology: Mol. function=polysaccharide transmembrane transporter activity; Cellular component=integral to membrane; Biological process= polysaccharide transport
  Homolog annotation: Hit_ID=A8GFV5; Match level="QueryCoverage=92%, HitCoverage=22%, E-value=7e-36, Identity=78%"; Hit description =Polysaccharide export protein precursor
  Pfam annotation: Domain name=Poly_export; Domain location=4-91; Score= 74.5; E_value=3.6e-19; Accession=PF02563.6; Description =Polysaccharide biosynthesisexport protein
CSNEIQSYQYRVGIGDVLNVTVWDHPELTTPAGQYRSASDTGNWVQADGTIFYPYIGKVRVAGRTVTEIRSEIARRLAQFIESPQVDVAGAC

SEQ ID NO: 8837 - protein, 147 aa, Zea mays
  Coding DNA Sequence Number=SeqID_2507
  Homolog annotation: Hit_ID=A0B0Q5; Match level="QueryCoverage=100%, HitCoverage=34%, E-value=7e-75, Identity=93%"; Hit description =Virulence factor family protein precursor
  Pfam annotation: Domain name=VirJ; Domain location=1-144; Score =164.5; E_value=2.9e-46; Accession=PF06057.2; Description=Bacterial virulence protein (VirJ)
VSRDLARVMRTYMARWHANRVALVGYSFGADVMPFAYNRLPADLRDKVSVMSLLGFAPAADFQIRVTGWLGMPASDNALKVAPEIAKVPPQLVQCFYGAEEKETMCPALANTGADVIKTGGDHHFGHDYIALEKKILGAFGKPVAAR

SEQ ID NO: 8838 - protein, 304 aa, Zea mays
  Coding DNA Sequence Number=SeqID_2508
  Gene Ontology: Mol. function=phosphoprotein phosphatase activity; Cellular component=cytosol; Biological process=protein amino acid dephosphorylation
  Homolog annotation: Hit_ID=Q9U9A3; Match level="QueryCoverage=98%, HitCoverage=97%, E-value=1e-147, Identity=82%"; Hit description =Serine/threonine protein phosphatase
  Pfam annotation: Domain name=Metallophos; Domain location=44-239; Score=148.5; E_value=1.8e-41; Accession=PF00149.18; Description =Calcineurin-like phosphoesterase
MGNPEEWVEILKQCKYLPEQDLKELCEMVKELLLEESNVQPVAAPVTICGDIHGQFYDLLELFRIGGEIPLTNYIFMGDFVDRGYYSLETFTLLLALKARWPDKITLLRGNHESRQITQVYGFYDECQQKYGNANAWKYCTQVFDYLTLAALVDGKVLCVHGGLSPDIRTIDQIRTIPRNQEIPHEGAFCDLMWSDPEEIETWQISPRGAGWLFGSKVTEEFTRVNGLELICRAHQLVQEGYKYMFPKKNLVTVWSAPNYCYRCGNVASILELDENLNRDFKIFNAVPDNERMVPARTTMSYFV

SEQ ID NO: 8839 - protein, 195 aa, Zea mays
  misc_feature (19)..(19): Xaa can be any naturally occurring amino acid
  misc_feature (120)..(120): Xaa can be any naturally occurring amino acid
  misc_feature (163)..(163): Xaa can be any naturally occurring amino acid
  Coding DNA Sequence Number=SeqID_2509
  Gene Ontology: Mol. function=long-chain-fatty-acid-CoA ligase activity; Cellular component=membrane; Biological process=fatty acid metabolic process
  Homolog annotation: Hit_ID=A8GFH1; Match level="QueryCoverage=100%, HitCoverage=33%, E-value=2e-55, Identity=57%"; Hit description=AMP -dependent synthetase and ligase
LTHGIMQANQEQTKDHLAXLLSAGQDQAETALPLYHMFALTVNCVLIVDLSGTNLLITKPRDIAGFVKELNKFPFTAITGGNTLVNALLNDANFHQLDFYTLRMYDGGGMAVQKAESDRXEKLTGHYLLEGYRLTKCSPLETDNPYDITCHTCKIGLPVTATXDVRIDDEEDREVPPGEPVELCIRRPHVMIGYW

SEQ ID NO: 8840 - protein, 149 aa, Zea mays
  Coding DNA Sequence Number=SeqID_2510
  Gene Ontology: Mol. function=protein transporter activity; Cellular component=1-2nm peptidoglycan-based cell wall; Biological process =response to antibiotic
  Homolog annotation: Hit_ID=Q57KV8; Match level="QueryCoverage=100%, HitCoverage=37%, E-value=1e-47, Identity=65%"; Hit description =Multidrug resistance secretion protein
MSATAEAQSPQQPANKKKKRKGALILLAIVFIVIGVGYLAYWYLVLRHFQETDDAYVAGNQVQVMAQVSGSVNKVWFEDTDRVKKGDILVSLDKTDAQQAFEKAQTALATSVRQTHQLMINGKQYQATIKLQQTALDQAESDLKRREPL

SEQ ID NO: 8841 - protein, 53 aa, Zea mays
  Coding DNA Sequence Number=SeqID_2511
  Homolog annotation: Hit_ID=A3BMQ8; Match level="QueryCoverage=98%, HitCoverage=26%, E-value=6e-07, Identity=53%"; Hit description =Putative uncharacterized protein
PDPIPRKKGTIPVVAAPGNFLMGGGMAPLGTDPFQGLYYFRLQMETKLYECNV

SEQ ID NO: 8842 - protein, 138 aa, Zea mays
  misc_feature (46)..(46): Xaa can be any naturally occurring amino acid
  misc_feature (85)..(85): Xaa can be any naturally occurring amino acid
  Coding DNA Sequence Number=SeqID_2512
  Gene Ontology: Mol. function=G-protein coupled photoreceptor activity; Cellular component=membrane; Biological process=regulation of transcription, DNA-dependent
  Homolog annotation: Hit_ID=P19862; Match level="QueryCoverage=84%, HitCoverage=10%, E-value=3e-38, Identity=72%"; Hit description =Phytochrome A
MSSLRPAQSSSSSSRTRQSSQARVLAQATLDAELNAEYEEAGEAFXDYSKLVEAQRGTPPEQRGRAGRGHSLLAAHSGEEELSQXFGCLVALDEKSFRVIAFKENAPEMLTTDSHAEPNGDDPPKLGIRTNRRCLLTD

SEQ ID NO: 8843 - protein, 96 aa, Zea mays
  Coding DNA Sequence Number=SeqID_2513
MKENMKEKQVEEEKIEMNMEEKKQNLVEDEGSQQEESEEEDGEDGEIGEEEGEDGAIGDAKVGGDGDKESAKRGGIKNINNDEILKLLVKRNEDTD

SEQ ID NO: 8844 - protein, 127 aa, Zea mays
  Coding DNA Sequence Number=SeqID_2515
  Gene Ontology: Mol. function=transporter activity; Cellular component= integral to membrane; Biological process=transport
  Homolog annotation: Hit_ID=Q6D0B5; Match level="QueryCoverage=95%, HitCoverage=27%, E-value=4e-52, Identity=85%"; Hit description =Putative transport protein
MDSLTTRRLNRQDYKTLALAALGGALEFYDFILFVFFAAVIGELFFPPDIPEWLRQVQTFAIFAAGYLARPLGGIIMAHFGDKVGRKKMFSLSILLMALPTLAMGALPTYASIGIAAPLLMLLMRVL

SEQ ID NO: 8845 - protein, 127 aa, Zea mays
  misc_feature (12)..(12): Xaa can be any naturally occurring amino acid
  misc_feature (74)..(74): Xaa can be any naturally occurring amino acid
  misc_feature (102)..(102): Xaa can be any naturally occurring amino acid
  Coding DNA Sequence Number=SeqID_2516
  Gene Ontology: Cellular component=cell outer membrane; Biological process=amino acid transport
  Homolog annotation: Hit_ID=Q8ZRN1; Match level="QueryCoverage=86%, HitCoverage=39%, E-value=4e-18, Identity=52%"; Hit description=D -methionine-binding lipoprotein metQ precursor
  Pfam annotation: Domain name=Lipoprotein_9; Domain location=1-116; Score=-135.2; E_value=0.091; Accession=PF03180.4; Description=NLPA lipoprotein
MPAEVGLIKLKXGVGLLPTSLDITENPKNLKIVELESATACTFTWTNNKLPLAVINTTYANQNGPAPGKGRIFXKNKNWPTVNLDPVTREDHQNPENGKKFXVRLIIKTKGLKPATKFFTGGPWKGW

SEQ ID NO: 8846 - protein, 133 aa, Zea mays
  Coding DNA Sequence Number=SeqID_2517
  Gene Ontology: Mol. function=DNA binding; Cellular component =nucleosome; Biological process=regulation of transcription, DNA -dependent
  Homolog annotation: Hit_ID=Q9FYS5; Match level="QueryCoverage=77%, HitCoverage=53%, E-value=2e-30, Identity=66%"; Hit description=High mobility group I/Y-2
  Pfam annotation: Domain name=AT_hook; Domain location=26-38; Score =13.7; E_value=0.1; Accession=PF02178.9; Description=AT hook motif
  Pfam annotation: Domain name=AT_hook; Domain location=51-63; Score =6.5; E_value=1.8; Accession=PF02178.9; Description=AT hook motif
  Pfam annotation: Domain name=AT_hook; Domain location=86-98; Score =4.2; E_value=4.6; Accession=PF02178.9; Description=AT hook motif
  Pfam module annotation: Pfam domain module=AT_hook::AT_hook::AT_hook; Domain location=26-38::51-63::86-98
  Subcellular localization annotation: CTP_CleavageSite=15; ConfidenceScore=5.18e-01
AVFGHPPKERDPNAPAPAPKSPTSTGRGRGRPPKAKSPLEADVKHATVGMPKPSGRPPKKAKTDSAALSSLLRDTAGAGDGTTHGKRGRDRPPKVRPCQPSETEAARRPSGDIEIPTGRMGGAALKRSGDANT

SEQ ID NO: 8847 - protein, 158 aa, Zea mays
  misc_feature (75)..(75): Xaa can be any naturally occurring amino acid
  Coding DNA Sequence Number=SeqID_2518
  Gene Ontology: Mol. function=protein serine/threonine kinase activity; Cellular component=integral to membrane; Biological process=protein amino acid phosphorylation
  Homolog annotation: Hit_ID=A1Z197; Match level="QueryCoverage=99%, HitCoverage=42%, E-value=1e-39, Identity=59%"; Hit description =Putative uncharacterized protein
VRPPRCHRRISALCFLFRNGVRIWVKQQVGGMAPHILISRETRRLAGVVSFLLQRYAMTGVLTHKSDVYSFGVNXILLELLTGRKPVDHTMLKGQQSLVTWATPRLSEDKVSQCVDSKLGGDDYPPKAVAKSFCVPASRWQYESDFRPNMTIVVKALQ

SEQ ID NO: 8848 - protein, 171 aa, Zea mays
  misc_feature (31)..(31): Xaa can be any naturally occurring amino acid
  Coding DNA Sequence Number=SeqID_2519
  Gene Ontology: Mol. function=transferase activity, transferring phosphorus-containing groups; Cellular component=membrane; Biological process=peptidyl-histidine phosphorylation
  Homolog annotation: Hit_ID=A0TEP0; Match level="QueryCoverage=45%, HitCoverage=9%, E-value=2e-17, Identity=62%"; Hit description =Periplasmic sensor signal transduction histidine kinase precursor
PPDALGELGALASEGRLPDFKEWLGKHAHAXRHAAFVHAMRERLDVLDLHAIERLAESLKRTGIADPSFNAEAAMAGPARDAYPFGSTKRAAGRTGVCVTFQTLDARNARYEAPLVVDTVGDTADGRPRNPRAARTISRGTLKTRQLARRRHQGRVVAGRSGRHVCGVALM

SEQ ID NO: 8849 - protein, 96 aa, Zea mays
  Coding DNA Sequence Number=SeqID_2520
  Gene Ontology: Mol. function=protein serine/threonine kinase activity; Biological process=protein amino acid phosphorylation
  Homolog annotation: Hit_ID=A2YHZ8; Match level="QueryCoverage=71%, HitCoverage=12%, E-value=5e-18, Identity=68%"; Hit description =Putative uncharacterized protein
STRPAQAPKVGVFSYGVMLLKLLTGRRPGDRSSYGQDGLVDWVRNTHARQALPRALADGNYDALVDPRLRGDYDQTEAARVVASAAASVRHAARRR

SEQ ID NO: 8850 - protein, 116 aa, Zea mays
  Coding DNA Sequence Number=SeqID_2521
  Subcellular localization annotation: CTP_CleavageSite=53; ConfidenceScore=5.27e-01
PRPARALVLAGALPRSPAACRLPHPCAPAPLGPGAGARPAAFAPAGPLRSPPPAQSRPAGGPRRCLASPLPPAGQTPTAHLAGAPPSPLGCCGCPHVVSSRALWGRRPSSPTARVR

SEQ ID NO: 8851 - protein, 69 aa, Zea mays
  Coding DNA Sequence Number=SeqID_2522
GYDCMVKANGKLEKEVLSLEEKYENAAQVNGELKELLLLLKDKYDTVLEKNEKLEGQMVALSTSFQSMK

SEQ ID NO: 8852 - protein, 138 aa, Zea mays
  misc_feature (17)..(17): Xaa can be any naturally occurring amino acid
  misc_feature (63)..(63): Xaa can be any naturally occurring amino acid
  misc_feature (121)..(121): Xaa can be any naturally occurring amino acid
  Coding DNA Sequence Number=SeqID_2524
  Gene Ontology: Mol. function=thymidine kinase activity; Cellular component=cytoplasm; Biological process=DNA metabolic process
  Homolog annotation: Hit_ID=A6TAK7; Match level="QueryCoverage=99%, HitCoverage=77%, E-value=8e-45, Identity=70%"; Hit description =Thymidine kinase
  Pfam annotation: Domain name=TK; Domain location=1-138; Score=65.0; E_ value=2.5e-16; Accession=PF00265.9; Description=Thymidine kinase
MRTLVYIAVFDDRGGAXGKVSSRIGLSSPAFLYNAQTNLESEIAEQHAKQTVHCVLVDDSQFXHREGVKALSDVVDNLDIPVLCYGLRTDFRGEVFTGSQDLLACPDKLVELITACHCGRXASMVPRLDAQGKPLRER

SEQ ID NO: 8853 - protein, 161 aa, Zea mays
  Coding DNA Sequence Number=SeqID_2525
  Gene Ontology: Mol. function=peptidyl-prolyl cis-trans isomerase activity; Cellular component=periplasmic space; Biological process =protein folding
  Homolog annotation: Hit_ID=A8G9P2; Match level="QueryCoverage=98%, HitCoverage=36%, E-value=4e-53, Identity=64%"; Hit description=SurA domain precursor
  Pfam annotation: Domain name=Rotamase; Domain location=91-159; Score=- 15.3; E_value=0.032; Accession=PF00639.11; Description=PPIC-type PPIASE domain
  Pfam annotation: Domain name=SurA_N; Domain location=2-74; Score =27.4; E_value=1.4e-12; Accession=PF09312.1; Description=SurA N -terminal domain
  Pfam module annotation: Pfam domain module=Rotamase::SurA_N; Domain location=91-159::2-74
DLQVSDQQLDQAIQNIAAQIRLSVDQLRSRLAYDGMNYNDYRAQIRIEMLISEVRNNEVLSRMTILPHEGDTLANHIGSQNTHCTDLNISHILLPLPENPSLQPVDDQEALARQLVGELKGGADFCKLVVTYSVGPEALTGGNMGWGKIEELTTLFLHALN

SEQ ID NO: 8854 - protein, 84 aa, Zea mays
  Coding DNA Sequence Number=SeqID_2526
  Subcellular localization annotation: CTP_CleavageSite=17; ConfidenceScore=5.25e-01
SRPSAITSTMRYAVPVRALSLRGNGSQQQHQTPRRFVAISRGARKFPLPEPYDPQVDPVMKEALDVMSVANSIIDEVVDKLLDE

SEQ ID NO: 8855 - protein, 91 aa, Zea mays
  Coding DNA Sequence Number=SeqID_2528
GSSRMRSDRKEEGSSEADQEPNSAPLGEDQGGTAPRTGDGAAQAKGPNMHRTERASGRGGNAADTWNARTSAIYRATLGTAMRAASNMLNN

SEQ ID NO: 8856 - protein, 52 aa, Zea mays
  Coding DNA Sequence Number=SeqID_2530
KVELCIDRYYTRVSLRPTAYVYTRGLARSYKVVPILYALQGGIYPPWPYPFP

SEQ ID NO: 8857 - protein, 134 aa, Zea mays
  misc_feature (111)..(111): Xaa can be any naturally occurring amino acid
  Coding DNA Sequence Number=SeqID_2531
  Gene Ontology: Mol. function=oxidoreductase activity; Cellular component=integral to membrane; Biological process=electron transport
  Homolog annotation: Hit_ID=Q43257; Match level="QueryCoverage=90%, HitCoverage=22%, E-value=2e-27, Identity=50%"; Hit description =Cytochrome P450 71C4
MLPLMGGFIVLEFFPFLARFFVLFKAGRAKSEMLRKKWDELLDGLIDGHAAPASDLKDKDEDEDFIHILLSVRQEYGLTREAMKAILLDVFFGGIDTSASLLEYTMIELIXRPHVMKKLQAEVRSSSLPPHQHQ

SEQ ID NO: 8858 - protein, 183 aa, Zea mays
  Coding DNA Sequence Number=SeqID_2532
WGETPPPPRFYGPLKGGAFSHLGGQNFGKRRTGGGFFGYYPTLGKRGFFSKAYLIWETPRFFPLPPVFKNRRPCIFFSPPFRGNWAFLIKVQRPPIFWDFLKISPFKGPPGGGFFFFFFFFFFFFFFFFFFFFFFFFFFFFFFFFFFFFFLIRPFDLFVRAWFFLHKPRAKNVFTSGSVSSAS

SEQ ID NO: 8859 - protein, 97 aa, Zea mays
  Coding DNA Sequence Number=SeqID_2534
  Gene Ontology: Mol. function=metal ion binding; Cellular component =cytoplasm
  Homolog annotation: Hit_ID=Q10MP9; Match level="QueryCoverage=61%, HitCoverage=14%, E-value=8e-26, Identity=85%"; Hit description =Programmed cell death protein 2, C-terminal domain containing protein, expressed
SPRILSIGLRAPNLTDGHGVPAREARGTRLLSDRSSSGHICYVFQVMPQLLYFFGVGNQPDSLDWATIVVYTCQGSCDQTVSYKEEFAWVQLYPTTT

SEQ ID NO: 8860 - protein, 61 aa, Zea mays
  misc_feature (26)..(26): Xaa can be any naturally occurring amino acid
  Coding DNA Sequence Number=SeqID_2535
  Gene Ontology: Mol. function=diaminopimelate decarboxylase activity; Cellular component=chloroplast; Biological process=lysine biosynthetic process via diaminopimelate
  Homolog annotation: Hit_ID=Q6ZG77; Match level="QueryCoverage=77%, HitCoverage=9%, E-value=3e-10, Identity=68%"; Hit description =Probable diaminopimelate decarboxylase, chloroplast precursor
FLGKDRELPSSNAGARLDVHVASVLXYCMSMVSTYNLKLMPPQYWVQTIIHIWCLVGLAPH

SEQ ID NO: 8861 - protein, 93 aa, Zea mays
  Coding DNA Sequence Number=SeqID_2536
  Gene Ontology: Mol. function=isoleucine-tRNA ligase activity; Cellular component=cytoplasm; Biological process=tRNA aminoacylation for protein translation
  Homolog annotation: Hit_ID=A2X1P4; Match level="QueryCoverage=90%, HitCoverage=6%, E-value=4e-26, Identity=63%"; Hit description =Putative uncharacterized protein
DPPGEREREDATQMVVTQVFDCWFESGSMPYAYIHYPFENRELFEKNFPGNFVAEGLDQTRGWFVTLFQNNMEWYKKGSFSSSVCSIMACRHA

SEQ ID NO: 8862 - protein, 185 aa, Zea mays
  misc_feature (19)..(19): Xaa can be any naturally occurring amino acid
  misc_feature (33)..(34): Xaa can be any naturally occurring amino acid
  Coding DNA Sequence Number=SeqID_2537
  Subcellular localization annotation: CTP_CleavageSite=78; ConfidenceScore=5.58e-01
FKNPQIFGLFSRIPAFRTXLLFYFLSFFFFFFXXFFFFFYFFFFFFFFFFFLLNYTRKQLVHALIRLCHWPPLHYITLAQASSYTYLSISHKRNSIYKKMSQHLCTTREIRGPAGRTLQGAATFSLASGAISSPSTPGSPPATPRLSSTFSQFLAGPFEEMVRNCMIQDLSWNCMIQDLSWQGPS

SEQ ID NO: 8863 - protein, 189 aa, Zea mays
  Coding DNA Sequence Number=SeqID_2538
MEGSRLKQQQPHHHHLLDMLKAELAKLIQLTKTTWKELLAALLASKRSHDTQRFASRGDVELDLFKPRRMDEYVEQAQAFEEDPSRPPPSVEDEVRPAPEPEPEPEPEPRPTWMAWSGSRDYDERRSSGFWAWAAVLVCTALATAVLLAGAAVLAVYLLCRPRMPYLAVTDARLERLQYAQDGAIDYLQ

SEQ ID NO: 8864 - protein, 116 aa, Zea mays
  Coding DNA Sequence Number=SeqID_2539
VIEIEYGVQGEGLRHAGSVLVDADGKWSFTSPYLHQPGVWEYQARASTGEMKSNWSSKFVLDVSPDAAFDQQAQDEAQPDALTLHQLLSEGGKGLFVEDDSTQLLVNGKPGDSVQL

SEQ ID NO: 8865 - protein, 73 aa, Zea mays
  Coding DNA Sequence Number=SeqID_2541
MAATIPLLKATPGKPRAAGYAALSGPSGVAPCLKVAALLALVHGRAPREGVLHHGCDLGHEEGQVGEHLPPTK

SEQ ID NO: 8866 - protein, 77 aa, Zea mays
  misc_feature (26)..(26): Xaa can be any naturally occurring amino acid
  Coding DNA Sequence Number=SeqID_2543
NAGVCSFTLSFNPCIPNQVGLSRVEXNRMNNLTKWTSIQIHDLLLTSVNSRPLDCRWVPRQHCSVPKVVQQVGFTNL

SEQ ID NO: 8867 - protein, 280 aa, Zea mays
  misc_feature (76)..(76): Xaa can be any naturally occurring amino acid
  Coding DNA Sequence Number=SeqID_2545
  Gene Ontology: Mol. function=protein transporter activity; Cellular component=clathrin coat of trans-Golgi network vesicle; Biological process=intracellular protein transport
  Homolog annotation: Hit_ID=Q2QYW2; Match level="QueryCoverage=98%, HitCoverage=16%, E-value=1e-144, Identity=92%"; Hit description =Clathrin heavy chain, putative, expressed
  Pfam annotation: Domain name=Clathrin; Domain location=46-184; Score =90.7; E_value=4.7e-24; Accession=PF00637.10; Description=Region in Clathrin and VPS
THYLYANNMLRYIEGYVQKVNPGNAPLVVGQLLDDECPEDFIKGLILSVRSLLPIEPLVDECEKRFVFHILPVYLXHMSEGSQDVHVHNALGKIIIDSNNNPEHFLITNPFYDSRVVGKYFEKRDPTLAVVAYRRGQCDDELINVTNKNSLFKLQARYVVERMDGDLWDKVLQPENEYRRQLIDQVVSTALPESKSPEQVSAAVKAFMTADLPHELIELLEKIVLQNSAFSGNFNLQNLLISTAIKADPSRVMDYVNRLDNFDGPAVGEVAIDSMLPLYC

SEQ ID NO: 8868 - protein, 231 aa, Zea mays
  misc_feature (16)..(16): Xaa can be any naturally occurring amino acid
  Coding DNA Sequence Number=SeqID_2546
  Gene Ontology: Mol. function=binding; Cellular component=nucleus; Biological process=metabolic process
  Homolog annotation: Hit_ID=A2YDE0; Match level="QueryCoverage=100%, HitCoverage=69%, E-value=1e-109, Identity=45%"; Hit description =Putative uncharacterized protein
  Pfam annotation: Domain name=PPR; Domain location=140-174; Score=6.5; E_value=1.3; Accession=PF01535.11; Description=PPR repeat
  Pfam annotation: Domain name=PPR; Domain location=69-103; Score=44.4; E_value=3.9e-10; Accession=PF01535.11; Description=PPR repeat
  Pfam module annotation: Pfam domain module=PPR::PPR; Domain location =140-174::69-103
RISLNNVLSVSVKLSXFEMAIQVHAYAFKVGLVSDANLSNALIDTYAKCGSLDDANKLFEIMGTGRDVFSWSSLIVGYAQFGYAKEALDLFARMRNLGVKPNHVTFVGVLIACSRVGLVDEGCYYYSIMEPEYGIVPTKEHCSCVIDLLARAGRLSEAAKFVDQMPFEPDIIMWNTLLAASRTHNDVEMGKRAAEGVLNIDPSHSAAYVLLCNINKTSGNWDEFARLKKDM

SEQ ID NO: 8869 - protein, 165 aa, Zea mays
  misc_feature (35)..(35): Xaa can be any naturally occurring amino acid
  misc_feature (44)..(44): Xaa can be any naturally occurring amino acid
  misc_feature (68)..(68): Xaa can be any naturally occurring amino acid
  misc_feature (81)..(81): Xaa can be any naturally occurring amino acid
  misc_feature (91)..(91): Xaa can be any naturally occurring amino acid
  misc_feature (95)..(95): Xaa can be any naturally occurring amino acid
  misc_feature (117)..(117): Xaa can be any naturally occurring amino acid
  misc_feature (141)..(141): Xaa can be any naturally occurring amino acid
  Coding DNA Sequence Number=SeqID_2547
  Gene Ontology: Mol. function=carbamoyl-phosphate synthase activity; Cellular component=cytosol; Biological process=nitrogen compound metabolic process
  Homolog annotation: Hit_ID=A2WRL3; Match level="QueryCoverage=99%, HitCoverage=19%, E-value=3e-39, Identity=57%"; Hit description =Putative uncharacterized protein
  Pfam annotation: Domain name=CPSase_L_D2; Domain location=11-164; Score=-73.9; E_value=5.9e-06; Accession=PF02786.7; Description =Carbamoyl-phosphate synthase L chain, ATP binding domain
LNAIRAAEYSQLFKQAMASIGLKMPPSGIGSTLKXCLTIAKDMXEFPLIVCIAFTIGGTVYGIAFDRXMCTIICRVVSTCXHNQQVLVNSXLLGXIESEFKVMRDKTSEVFIICSIXYIDTMCVDRANSIPVAPVHTLTVXEYQRVTLSSVALILRNCVECAGTY

SEQ ID NO: 8870 - protein, 232 aa, Zea mays
  misc_feature (21)..(21): Xaa can be any naturally occurring amino acid
  misc_feature (35)..(35): Xaa can be any naturally occurring amino acid
  misc_feature (101)..(101): Xaa can be any naturally occurring amino acid
  misc_feature (142)..(142): Xaa can be any naturally occurring amino acid
  misc_feature (169)..(169): Xaa can be any naturally occurring amino acid
  misc_feature (174)..(174): Xaa can be any naturally occurring amino acid
  Coding DNA Sequence Number=SeqID_2548
  Gene Ontology: Mol. function=RNA-directed DNA polymerase activity; Cellular component=intracellular; Biological process=RNA-dependent DNA replication
  Homolog annotation: Hit_ID=Q2QZQ1; Match level="QueryCoverage=95%, HitCoverage=9%, E-value=9e-48, Identity=47%"; Hit description =Retrotransposon protein, putative, Ty3-gypsy subclass
  Pfam annotation: Domain name=RnaseH; Domain location=76-204; Score= -18.8; E_value=0.002; Accession=PF00075.14; Description=RNase H
MHYFQAHLIEVHTSSTLSEVXLLHNKDATSRIAKXAIELRVYGIVFKPRTATNAQALNDFVAKWIERQISFESNPLDSWTINFDKSLQLTRAVARVVLTSXKGVKFKYILQILFSTSNNVVEYETMVLSLRIAIALGIHQIXVIGDSLLVINQVNKEWTWSDDKMMSYXRKFRXLEERGDRIEFIHIPRAKNKEVDKLGKAVSSRSPMAPGVFLEKLISTTIDKRTEFPSVE

SEQ ID NO: 8871 - protein, 152 aa, Zea mays
  Coding DNA Sequence Number=SeqID_2549
MVGEELDLVGPVELGLTELVDEAATDLKVLEHGKYEGDFGVGVELDAVEAVADSSMDGPGADFGLASSPGRTELEAEHKKQVVQILAPHFGMVLALEVACIADTPAGIGHIVDVAACKGWIQGAAAGSIASIGAAAAAGGTTAQLLEFGKQK

SEQ ID NO: 8872 - protein, 234 aa, Zea mays
  Coding DNA Sequence Number=SeqID_2551
  Gene Ontology: Mol. function=rRNA N-glycosylase activity; Biological process=negative regulation of translation
  Homolog annotation: Hit_ID=Q00531; Match level="QueryCoverage=94%, HitCoverage=40%, E-value=9e-57, Identity=53%"; Hit description=60 kDa jasmonate-induced protein
  Pfam annotation: Domain name=RIP; Domain location=1-222; Score=53.3; E_value=8.2e-13; Accession=PF00161.9; Description=Ribosome inactivating protein
ACLQPPKWIHVVLNGKGGAAPTVAIRSDNAYIVGFTNSKGTWYQLSRTGAQEKLVDDNPVMAGFDGNYNTLIGGSDKLLTLNVAKFSVAAAAATFWNHKAGNTSYGDDCGSDEEEESGMLRAGDPLKVAVATLAVAICEAARFVPVSTVIGKGWGEQRVSVTAKEVSYIMDWGDLSRALLKWKSGGYKDDKPFQPFKGIGINNGEEALAVVALLKLMSGSQSLLAWLKCFWGLL

SEQ ID NO: 8873 - protein, 78 aa, Zea mays
  Coding DNA Sequence Number=SeqID_2552
CSGNFVCILLFLRVNEKKQGVIVLLWQVLFFFFFFFLGTQQFYLLAVSRMSLRIQSFQSSIQLFTLCGIGRPKGRLLI

SEQ ID NO: 8874 - protein, 138 aa, Zea mays
  misc_feature (114)..(115): Xaa can be any naturally occurring amino acid
  Coding DNA Sequence Number=SeqID_2554
  Gene Ontology: Mol. function=transcription regulator activity; Cellular component=nucleus; Biological process=transcription
  Homolog annotation: Hit_ID=A3AB89; Match level="QueryCoverage=68%, HitCoverage=6%, E-value=8e-37, Identity=78%"; Hit description =Putative uncharacterized protein
MGGSYPLGCNQRSWECSKPVFPVEISRDRVQDVVQEILFGVNCGPVPIDGREIRVGDCALFRAVGAPPFIGLIRWIEKKEEAHPKLRVSWLYRPTDVKLNKDIQLSAAPCEILXXFHQDEASAVSLLHPCKVAFLRKG

SEQ ID NO: 8875 - protein, 62 aa, Zea mays
  misc_feature (11)..(11): Xaa can be any naturally occurring amino acid
  misc_feature (14)..(14): Xaa can be any naturally occurring amino acid
  misc_feature (48)..(48): Xaa can be any naturally occurring amino acid
  Coding DNA Sequence Number=SeqID_2555
  Homolog annotation: Hit_ID=Q69L77; Match level="QueryCoverage=91%, HitCoverage=17%, E-value=6e-10, Identity=54%"; Hit description =Putative brix domain-containing protein
QISVPHNEIGXIDXGGMGKMALIEGGPKVWLDSIQIFGGRFGGPTLDXDPFFLFPNQGVIIR

SEQ ID NO: 8876 - protein, 198 aa, Zea mays
  Coding DNA Sequence Number=SeqID_2556
  Gene Ontology: Mol. function=motor activity; Cellular component =flagellin-based flagellum basal body, distal rod, L ring; Biological process=ciliary or flagellar motility
  Homolog annotation: Hit_ID=Q1BSV1; Match level="QueryCoverage=88%, HitCoverage=76%, E-value=5e-78, Identity=85%"; Hit description =Flagellar L-ring protein precursor
  Pfam annotation: Domain name=FlgH; Domain location=22-198; Score =128.6; E_value=1.8e-35; Accession=PF02107.7; Description=Flagellar L- ring protein
RLLPSASVRAACAVAVAALAGCAQIPRDPIIQQPMTAQPPMPMSMQAPGSIYNPGYAGRPLFEDQRPRNIGDILTIVIAENINATKSSGANTNRQGNTDFNVPTAGFLGGLFAKANLSAAGTNKFAATGGASAANTFNGTITVTVTNVLPNGNLVVSGEKQMLINQGNEFVRFSGVVNPNTISGANSVYSTHVADARI

SEQ ID NO: 8877 - protein, 87 aa, Zea mays
  misc_feature (54)..(54): Xaa can be any naturally occurring amino acid
  Coding DNA Sequence Number=SeqID_2557
  Gene Ontology: Mol. function=structural constituent of ribosome; Cellular component=ribonucleoprotein complex; Biological process =translation
  Homolog annotation: Hit_ID=P41127; Match level="QueryCoverage=100%, HitCoverage=42%, E-value=6e-18, Identity=54%"; Hit description=60S ribosomal protein L13-1
  Pfam annotation: Domain name=Ribosomal_L13e; Domain location=2-87; Score=-81.5; E_value=0.00084; Accession=PF01294.8; Description =Ribosomal protein L13e
MLIIAASGVTADRLQAVDIPLKLVTAIGIAADHRRKTKCLDGLLANAHRLKTYXALLAILPRPAHKVKVADSPPQELAASTQVLGDY

SEQ ID NO: 8878 - protein, 90 aa, Zea mays
  Coding DNA Sequence Number=SeqID_2558
QEGRTVGRARRDRSGQGPRMCPARHAHLLRTPPTQRANLLPVGGGAVRCLGEDRVHCYRRTYAARNCHGELATRHRPAYTRGRDWEDDGL

SEQ ID NO: 8879 - protein, 130 aa, Zea mays
  misc_feature (93)..(93): Xaa can be any naturally occurring amino acid
  Coding DNA Sequence Number=SeqID_2560
  Gene Ontology: Mol. function=protein domain specific binding; Cellular component=late endosome membrane; Biological process =protein transport
  Homolog annotation: Hit_ID=Q53NN3; Match level="QueryCoverage=97%, HitCoverage=56%, E-value=6e-51, Identity=85%"; Hit description=SNF7 family, putative
  Pfam annotation: Domain name=Snf7; Domain location=2-131; Score=54.1; E_value=4.7e-13; Accession=PF03357.11; Description=Snf7
EEKQCLQAQEKKLINEIKKVAKQGQMGAVKIMAKDLIRTRHQITNIYALKSQLQGVSLRIQTLKSTQAMGEAMKCVTKAMWQMTRQMNLLALXKIMREFEIQNEKMEMVGELMNDAFDDPLEGAEEEKME

SEQ ID NO: 8880 - protein, 124 aa, Zea mays
  Coding DNA Sequence Number=SeqID_2561
  Gene Ontology: Cellular component=membrane
  Homolog annotation: Hit_ID=A4WB79; Match level="QueryCoverage=100%, HitCoverage=47%, E-value=2e-43, Identity=69%"; Hit description =Putative uncharacterized protein precursor
MTIMCVAIALVCALSTLFLPLPARVSWKYALLSALLHVGYNLCLVRSYQSGDLGQTYPIARGSSPLLVTCAAALFAGEHIAFATLCGIVLSLKLRGGKLALPGLRYTLATGAFIAAYSVVDGMG

SEQ ID NO: 8881 - protein, 134 aa, Zea mays
  Coding DNA Sequence Number=SeqID_2562
AHPEQPGQLTENDQHHRAQRREHKDRQASAGGAEGAAAHLKTKTRSTSRKSGGGTETPQTGTKKKGNRPRSNSSRARRTQGPGEPETEPPKADTEAEDTARGRTKGTQPETIRGRAGNKAHRERAREARREAKH

SEQ ID NO: 8882 - protein, 122 aa, Zea mays
  Coding DNA Sequence Number=SeqID_2564
  Gene Ontology: Mol. function=anion channel activity; Cellular component=membrane of vacuole with cell cycle-independent morphology; Biological process=malate transport
  Homolog annotation: Hit_ID=A2ZAG3; Match level="QueryCoverage=44%, HitCoverage=11%, E-value=3e-22, Identity=85%"; Hit description =Putative uncharacterized protein
MRLGELGIALASIPRGGFRGQRGGRRLTGACHLGNSLTRRRELLPWPPTTKPGHSGSFHLKITFFFCDSLKKSRAHYASWEPRHSMHCYSYPWQKYVKLGSVLRHFAYTVAALHGCLESEVQ

SEQ ID NO: 8883 - protein, 114 aa, Zea mays
  misc_feature (41)..(41): Xaa can be any naturally occurring amino acid
  misc_feature (97)..(97): Xaa can be any naturally occurring amino acid
  Coding DNA Sequence Number=SeqID_2565
  Gene Ontology: Mol. function=rRNA (guanine-N2-)-methyltransferase activity
  Homolog annotation: Hit_ID=A5VYJ3; Match level="QueryCoverage=100%, HitCoverage=34%, E-value=8e-37, Identity=70%"; Hit description=16S rRNA m(2)G 1207 methyltransferase
  Pfam annotation: Domain name=MTS_N; Domain location=5-113; Score =86.8; E_value=7.1e-23; Accession=PF08468.1; Description =Methyltransferase small domain N-terminal
MDPRSEVLLRQAELFQGPLLLAGAPADGLLGQLPQARGWKXHAGDHAMLESRFAGRSHYGVEPPEVAFDNAVLFLPKSRELAAYLLNALASRLAGRXLYLVGEKRGGLQGKAQQ

SEQ ID NO: 8884 - protein, 115 aa, Zea mays
  Coding DNA Sequence Number=SeqID_2566
MHPMSGRSPPRERKREPPWISTVAHEHGTNWSIVCGQEVPPEDPDRVGGGKEKERLGSHQFVAIAANPRCAFRLALNVPRGHALWGGAGLLAMAHRRGAPAMSPEFGQGRKAHVG

SEQ ID NO: 8885 - protein, 98 aa, Zea mays
  Coding DNA Sequence Number=SeqID_2568
MAPQAQQGAGRAGEDDTTQARAHEAAPQEGQRRQALETHATDRAQKNQRNPTLQRRNHPASNPVDAEQDDERPKKRAKRNRHHKNSIRPGSKKKPDGN

SEQ ID NO: 8886 - protein, 99 aa, Zea mays
  misc_feature (83)..(83): Xaa can be any naturally occurring amino acid
  Coding DNA Sequence Number=SeqID_2570
  Gene Ontology: Mol. function=dimethylallyltranstransferase activity; Cellular component=cytoplasm; Biological process=cholesterol biosynthetic process
  Homolog annotation: Hit_ID=P49353; Match level="QueryCoverage=73%, HitCoverage=20%, E-value=3e-19, Identity=68%"; Hit description =Farnesyl pyrophosphate synthetase (FPP synthetase) (FPS) (Farnesyl diphosphate ...
  Homolog annotation: Hit description=synthetase) [Includes: Dimethylallyltranstransferase (EC 2.5.1.1); Geranyltranstransferase (EC 2.5.1.10)]
AANCVTGPVTLYEPKTTLSLQGTTLDWNGLDQESQQINVNTQFKGYDYLDCYGDPEFIGKIGTDIEDYKCSWLVVQALDRADXSQKHILFVGHLQTSLK

SEQ ID NO: 8887 - protein, 125 aa, Zea mays
  Coding DNA Sequence Number=SeqID_2571
  Homolog annotation: Hit_ID=Q8W0U4; Match level="QueryCoverage=97%, HitCoverage=13%, E-value=2e-14, Identity=34%"; Hit description =Putative RIRE2 orf3
ALRPGAYVYPCHPHLVKKGWKSQWFYLCNDDVRLSAFTHCVVLEENKRWRWGLPRELQTHMKPLLDVLRRCWDRGLTVAGVIAVFHRRRVLPLTDHRLCLDEMTPKASLESSQMASTALATDKLL

SEQ ID NO: 8888 - protein, 68 aa, Zea mays
  Coding DNA Sequence Number=SeqID_2572
  Gene Ontology: Mol. function=DNA binding; Cellular component=nucleus; Biological process=regulation of transcription
  Homolog annotation: Hit_ID=A7PBQ1; Match level="QueryCoverage=61%, HitCoverage=25%, E-value=4e-17, Identity=95%"; Hit description =Chromosome chr16 scaffold_10, whole genome shotgun sequence
  Pfam annotation: Domain name=Myb_DNA-binding; Domain location=26-68; Score=36.7; E_value=8.4e-08; Accession=PF00249.21; Description=Myb -like DNA-binding domain
TPPKIKHPEGLESILNLSRLPEFASTVPWTEEEHRTFLAGLEKLGKGDWRGIAKKFVTTRTPTQVVSH

SEQ ID NO: 8889 - protein, 155 aa, Zea mays
  misc_feature (24)..(24): Xaa can be any naturally occurring amino acid
  misc_feature (151)..(151): Xaa can be any naturally occurring amino acid
  Coding DNA Sequence Number=SeqID_2573
  Gene Ontology: Mol. function=electron carrier activity; Cellular component=mitochondrial respiratory chain; Biological process =electron transport
  Homolog annotation: Hit_ID=Q16NS5; Match level="QueryCoverage=96%, HitCoverage=49%, E-value=1e-43, Identity=55%"; Hit description =Cytochrome C1
  Pfam annotation: Domain name=Cytochrom_C1; Domain location=20-155; Score=151.6; E_value=2.2e-42; Accession=PF02167.6; Description =Cytochrome C1 family
PPALWYALDRSVQAADLVLHPPEXSWPHSGLLSSFDHASLRRGYEVYKQVCAACHSMQYVRYRELIGVTHTEEEAKAEAAEIMVEDGPDDTGSMFKRPGKIADSFPSPYPNENAARAANNGAYPPDLSYITSARHGGEDYVFSLLTGYCVXPGVP

SEQ ID NO: 8890 - protein, 74 aa, Zea mays
  Coding DNA Sequence Number=SeqID_2574
  Subcellular localization annotation: CTP_CleavageSite=50; ConfidenceScore=5.17e-01
VLAGLLLLSVLGVAVAGLLLLVAGVAVPVLRGPRLSAAVCVAPAALLGVVARALVPPRLRLLLVALVVLALVLG

SEQ ID NO: 8891 - protein, 165 aa, Zea mays
  Coding DNA Sequence Number=SeqID_2576
  Homolog annotation: Hit_ID=Q10NW5; Match level="QueryCoverage=94%, HitCoverage=78%, E-value=7e-45, Identity=58%"; Hit description =Expressed protein
MDQQQYPIIYPSAPPTPGNMETGLVATGLPVRRQQLGGAAPDRDGGWAGNDHSTLIVVATLITALSFLLGLSMPGGYWQNDQKFVSNGGVVYHRAGDPIMRDLHRPRYWVFRGASWVGVTSSMVMTLSLLVRMAVDSRHVLWSFSVAYSSLVLTFIVSQSKTHLS

SEQ ID NO: 8892 - protein, 182 aa, Zea mays
  misc_feature (161)..(161): Xaa can be any naturally occurring amino acid
  misc_feature (168)..(168): Xaa can be any naturally occurring amino acid
  Coding DNA Sequence Number=SeqID_2577
  Gene Ontology: Mol. function=metal ion binding
  Homolog annotation: Hit_ID=Q2QYM0; Match level="QueryCoverage=85%, HitCoverage=37%, E-value=3e-20, Identity=41%"; Hit description =Expressed protein
RRLTWWFVRTRIDTERLLTFLLLSVPKELSTPAALVSRLVAASRSVGDFAGLLHGAGTCASSSDDAVAEQARSWRRYAIEAHLWRAMLLVGTGGGDAGSSFHGIMKPRDALDALMHVPRSGLSAFCRAAYLVVASSEAEAVACRNLYHKAFVTRGGHPRTXFTRAFVXVARSVWALRVADWP

SEQ ID NO: 8893 - protein, 86 aa, Zea mays
  Coding DNA Sequence Number=SeqID_2578
MDKSGGSSRKTRRKKKSLFPKLHGAEDDVGNNDASPRRLPTEQHCIDPAAGRHHWLEGVPRTVVSGSSGFPVSVSVVLILLQKPFG

SEQ ID NO: 8894 - protein, 81 aa, Zea mays
  Coding DNA Sequence Number=SeqID_2580
GNPRGRRPRDEHLPANAKLHPTAQIDYWVTQSRRTKLITGGNTTSGARGSREGRTEQTDTRTGRPHGMQGRDTDSSGHRTL

SEQ ID NO: 8895 - protein, 185 aa, Zea mays
  misc_feature (24)..(24): Xaa can be any naturally occurring amino acid
  misc_feature (39)..(39): Xaa can be any naturally occurring amino acid
  misc_feature (41)..(42): Xaa can be any naturally occurring amino acid
  misc_feature (67)..(67): Xaa can be any naturally occurring amino acid
  Coding DNA Sequence Number=SeqID_2582
  Gene Ontology: Mol. function=ribulose-bisphosphate carboxylase activity; Cellular component=chloroplast ribulose bisphosphate carboxylase complex; Biological process=carbon utilization by fixation of carbon dioxide
  Homolog annotation: Hit_ID=Q2WGH3; Match level="QueryCoverage=89%, HitCoverage=34%, E-value=6e-28, Identity=42%"; Hit description =Ribulose bisphosphate carboxylase large chain
DNRGDRRTNQTRPHIRPFYHTQPXPGDPEENIGNAPHPXNXXEEGTATNTNTARAGNPDGHKATPAXRREERQTPPAEAKTRQSPPHRTQAERDKRNNDGRTAKGCTIKPKLGEPAKKDRTATEESRHSGPRATKDDETVNPQPTKRRKHHIHFGPETENKAQAQTAQNNGQHQNATAGPQERTP

SEQ ID NO: 8896 - protein, 167 aa, Zea mays
  Coding DNA Sequence Number=SeqID_2583
  Gene Ontology: Mol. function=uroporphyrin-III C-methyltransferase activity; Cellular component=cytosol; Biological process=porphyrin biosynthetic process
  Homolog annotation: Hit_ID=A8G9Y3; Match level="QueryCoverage=99%, HitCoverage=35%, E-value=1e-57, Identity=67%"; Hit description =Uroporphyrin-III C-methyltransferase
HFDATQLDDVFLVIAATDDNALNAQVFDAANARHKLVNVVDDQPKCSFIFPSIVDRSPLVVAISSSGTAPVLARLLREKIEALLPANLGQMAEVAGQWRDKVKQRYHKMSDRRRFWERAFNGLFASQMAAGNVNEACRTLDRELENTSDNQGEITLVGAGPGDSGLL

SEQ ID NO: 8897 - protein, 252 aa, Zea mays
  Coding DNA Sequence Number=SeqID_2584
  Gene Ontology: Mol. function=oxidoreductase activity, acting on the CH-OH group of donors, quinone or similar compound as acceptor; Cellular component=outer membrane-bounded periplasmic space; Biological process=...
  Gene Ontology: Biological process=carbohydrate metabolic process
  Homolog annotation: Hit_ID=P75804; Match level="QueryCoverage=94%, HitCoverage=63%, E-value=2e-94, Identity=67%"; Hit description =Soluble aldose sugar dehydrogenase yliI precursor
  Pfam annotation: Domain name=GSDH; Domain location=102-209; Score =231.3; E_value=2.2e-66; Accession=PF07995.2; Description=Glucose Sorbosone dehydrogenase
ACLQDFKVVLEQTPKLSGGANIGTRLAFDRQGYLYIAFGDNFASRSAQQLDKLSGKIVRLTQDGKVPADNPFNHRQGARAEIWSYGVRNPQGLALNPWTQQMWESEHGPRGGDEVNLAAKGKNYGWPLATYGIDYSGQKVPEAQGSAVAGTEQPLFYWQQSPAISGMAFYNSARFPQWKNSLFIGALKDKSLIRLRVNGEKVEEAQRLLGDRGERIRDVRQGPDGYLYVLTDEANGKLLKVGLAEAASAARG

SEQ ID NO: 8898 - protein, 115 aa, Zea mays
  misc_feature (29)..(29): Xaa can be any naturally occurring amino acid
  Coding DNA Sequence Number=SeqID_2585
MGTCTVRTDGTGVKATSQRTTEGTTPGEXGSENQGNTDGTEGTGGSNTVTEGATGMGGTVKWGTGTPGPASTGGRATGGTGGPRGRAKPGGRQGPEQQQREARPGQAKGAPPGSR

SEQ ID NO: 8899 - protein, 138 aa, Zea mays
  Coding DNA Sequence Number=SeqID_2586
QKTTGTGADGKRAEAPQEREPGPARAAREDTHQDGKATGNKRKRDRAVTQATHGAKRNTRTTARSQSTTTKGAAEGGNTGGRTDKKATSEARGTRGKRGRRGGGSSRSIATKGRPKAGTTRDSNKNNNANNKGGGGGK

SEQ ID NO: 8900 - protein, 172 aa, Zea mays
  Coding DNA Sequence Number=SeqID_2588
  Gene Ontology: Mol. function=oxidoreductase activity; Cellular component=cytoplasm; Biological process=flavonoid biosynthetic process
  Homolog annotation: Hit_ID=A2XZZ0; Match level="QueryCoverage=88%, HitCoverage=42%, E-value=5e-52, Identity=66%"; Hit description =Putative uncharacterized protein
AAAGWPEPVVRVQSLSESGAATIPARYVKPEAERPASAAGEEEGGGGIPVVDLSSPATARAVSEACRDWGFFQAVNHGVPGELLRRARGAWRGFFRQPMEVKQRYANSPATYEGYGSRLGVEAGALLDWGDYYFLHVRPPHLCDPRKWPHLPPGLRYINYYLVIYFLLLYSI

SEQ ID NO: 8901 - protein, 129 aa, Zea mays
  Coding DNA Sequence Number=SeqID_2589
  Gene Ontology: Mol. function=two-component response regulator activity; Cellular component=intracellular; Biological process=two -component signal transduction system (phosphorelay)
  Homolog annotation: Hit_ID=Q5EG41; Match level="QueryCoverage=100%, HitCoverage=26%, E-value=1e-67, Identity=100%"; Hit description=NtrC
  Pfam annotation: Domain name=Response_reg; Domain location=5-117; Score=137.1; E_value=4.8e-38; Accession=PF00072.14; Description =Response regulator receiver domain
MSRSETVWIVDDDRSIRWVLEKALQQEGMTTQSFDSADGVMGRLARQQPDVIISDIRMPGTSGLDLLAQIREQHPRLPVIIMTAHSDLDSAVASYQGGAFEYLPKPFDVDEAVSLVKRANQHAQEQQGL

SEQ ID NO: 8902 - protein, 91 aa, Zea mays
  Coding DNA Sequence Number=SeqID_2590
MMYYHLSTHAQINANKDAGMALHCTDATVDHRWLCHDNDNTSTCELAASVLGALNFDHDETREAHEPVHDQVVTDHGQPLPEHDGAEVDTH

SEQ ID NO: 8903 - protein, 104 aa, Zea mays
  Coding DNA Sequence Number=SeqID_2592
  Gene Ontology: Cellular component=integral to membrane
  Homolog annotation: Hit_ID=A7MLJ3; Match level="QueryCoverage=88%, HitCoverage=38%, E-value=2e-39, Identity=83%"; Hit description =Putative uncharacterized protein
FDTNDWSIITQRFHCERALYIAQHLGIQAQCYAEPTPKNMLSVRFREVGARLGALADLYLMKREPRFLGPLVPIPAVHEVPEDAQSYPAVTPEQLLELEEKLRK

SEQ ID NO: 8904 - protein, 235 aa, Zea mays
  Coding DNA Sequence Number=SeqID_2593
  Gene Ontology: Mol. function=D-amino-acid dehydrogenase activity; Cellular component=integral to membrane; Biological process =metabolic process
  Homolog annotation: Hit_ID=A5VZY3; Match level="QueryCoverage=100%, HitCoverage=56%, E-value=1e-123, Identity=92%"; Hit description=FAD dependent oxidoreductase
  Pfam annotation: Domain name=DAO; Domain location=1-218; Score=5.8; E_ value=4.7e-06; Accession=PF01266.14; Description=FAD dependent oxidoreductase
APHLTPSLLGGLFFPRTGHFIDPYRVVCELFEAAKASGVRFVQAQVDGGRLHGGGVSLASDQGSLDARQVLISCGAHSARLTAALTGKQVPLDTERGYHLMLPGEHQRLPFAVTSLERKFIMTPMAEGLRLAGTVEFAGLDAPPSMQRAWQLHRLSKGLFQRDLSVEGATPWMGLRPSLPDSLPVIDRVCDGRVLLAFGHQHLGLTQAAVTAEWVGRLAEMAGGPEMAAYRLDRF

SEQ ID NO: 8905 - protein, 126 aa, Zea mays
  Coding DNA Sequence Number=SeqID_2594
  Subcellular localization annotation: CTP_CleavageSite=33; ConfidenceScore=5.11e-01
KKKKKKKKKKKKKKKKKKITNHSLKQMGRKSKRSMSGRHTVLQILVLVAVIKHDSLSTMRNSRLLPWRRIVVVLVVLLRHQLLYEPADPSEAVDSDLNLAHGDWRVEELGGRRVDETREAEAADAD

SEQ ID NO: 8906 - protein, 74 aa, Zea mays
  Coding DNA Sequence Number=SeqID_2596
  Gene Ontology: Mol. function=metal ion binding
  Homolog annotation: Hit_ID=Q4JHE0; Match level="QueryCoverage=60%, HitCoverage=10%, E-value=2e-09, Identity=64%"; Hit description=XB3 -related protein
MGNALGCAGLGERLAAGARDGDAAEVRRLLDANPGLARCAAFGSLSSPLHLAAAKGHHEVRKKISPNTEDVVHQ

SEQ ID NO: 8907 - protein, 95 aa, Zea mays
  Coding DNA Sequence Number=SeqID_2597
  Gene Ontology: Mol. function=zinc ion binding; Biological process =metabolic process
  Homolog annotation: Hit_ID=A2ZIU8; Match level="QueryCoverage=72%, HitCoverage=11%, E-value=1e-18, Identity=61%"; Hit description =Putative uncharacterized protein
FSRKLLNLAHRAAYFPECTLLMDSTIDILGQQIEDRITTCTNDDQSVSQSDLAPPNDTLSNVQLKKKEVRIKTSKRKKLGWEEKHKGRKNGQNRT

SEQ ID NO: 8908 - protein, 99 aa, Zea mays
  misc_feature (22)..(22): Xaa can be any naturally occurring amino acid
  Coding DNA Sequence Number=SeqID_2598
  Gene Ontology: Mol. function=oxidoreductase activity
  Homolog annotation: Hit_ID=A2X3G8; Match level="QueryCoverage=95%, HitCoverage=31%, E-value=1e-27, Identity=58%"; Hit description =Putative uncharacterized protein
DPLPIVDVSKLWPADEADKLRXAVQTWRLHLATNHGINASLMKDLMEASREFFHQPLQERQKYSNLREGTRFQLEGYGSDPVVAQDHILDWNDRLQGYR

SEQ ID NO: 8909 - protein, 77 aa, Zea mays
  misc_feature (44)..(44): Xaa can be any naturally occurring amino acid
  misc_feature (57)..(57): Xaa can be any naturally occurring amino acid
  Coding DNA Sequence Number=SeqID_2599
  Gene Ontology: Mol. function=protein transporter activity; Cellular component=nuclear pore; Biological process=protein import into nucleus, docking
  Homolog annotation: Hit_ID=Q9ZWR4; Match level="QueryCoverage=92%, HitCoverage=8%, E-value=1e-17, Identity=63%"; Hit description =Importin-beta2
HGLYFSKYMALCYQYLKMGPHIFVRYHVCAINAGVVGDLSRALXDKLLPFCNGILTXLLKDLSSKQEHNSAEGSLDT

SEQ ID NO: 8910 - protein, 185 aa, Zea mays
  misc_feature (111)..(111): Xaa can be any naturally occurring amino acid
  Coding DNA Sequence Number=SeqID_2600
LQRPCSSKGSIIRDSERRKKKKQRHRSFFSRPVIEKPHQEADGSAHVCLRRSGRPLPLEGPCRTLARGADNVEQRRHDTSTREGRARSSQEDGKSDREGRDSVGSGCDGDXEDGRAAGRFRKAGGCAGSSQAKERRRRQVKLEGAGQGVAVVPVRVAGLRRRPHARKASPQQRRRLHGARALCRG

SEQ ID NO: 8911 - protein, 87 aa, Zea mays
  Coding DNA Sequence Number=SeqID_2602
MGGPTQGPFEAGRQAGSQRGPPDTWTGIRPTKRGPTGGGRHLGTVPSTEHSPLVEGAPNGQAPAGRGMPVAPQAGVPTMPGPYQAAL

SEQ ID NO: 8912 - protein, 96 aa, Zea mays
  Coding DNA Sequence Number=SeqID_2604
  Gene Ontology: Mol. function=hydrolase activity; Biological process =metabolic process
  Homolog annotation: Hit_ID=A8AHB8; Match level="QueryCoverage=100%, HitCoverage=43%, E-value=5e-36, Identity=76%"; Hit description =Putative uncharacterized protein
MTYRRPVLAAIFDMDGLLIDSEPLWDRAELEVFASLNVDISRRHELPDTLGLRIDQTVRMWYEALPWNGPDQAEVTQRIIARALALVEETRPLLPG

SEQ ID NO: 8913 - protein, 65 aa, Zea mays
  misc_feature (45)..(45): Xaa can be any naturally occurring amino acid
  Coding DNA Sequence Number=SeqID_2605
  Homolog annotation: Hit_ID=Q41771; Match level="QueryCoverage=100%, HitCoverage=7%, E-value=8e-08, Identity=52%"; Hit description =Kaurene synthase A
  Subcellular localization annotation: CTP_CleavageSite=35; ConfidenceScore=5.11e-01
MPYPHPYPWQSSSSRRRRRRGRDGAPRQPQARRVVESAAAGPGHXATTTQQPDNVSSAKVIYTAR

SEQ ID NO: 8914 - protein, 306 aa, Zea mays
  Coding DNA Sequence Number=SeqID_2606
  Gene Ontology: Mol. function=aminoacyl-tRNA ligase activity; Cellular component=mitochondrion; Biological process=embryonic development ending in seed dormancy
  Homolog annotation: Hit_ID=A7QUK2; Match level="QueryCoverage=77%, HitCoverage=25%, E-value=1e-123, Identity=86%"; Hit description =Chromosome chr10 scaffold_179, whole genome shotgun sequence
  Pfam annotation: Domain name=tRNA-synt_1; Domain location=75-302; Score=-400.4; E_value=0.0055; Accession=PF00133.12; Description=tRNA synthetases class I (I, L, M and V)
  Pfam annotation: Domain name=tRNA-synt_1g; Domain location=108-303; Score=-211.3; E_value=1.2e-06; Accession=PF09334.1; Description=tRNA synthetases class I (M)
  Pfam module annotation: Pfam domain module=tRNA-synt_1::tRNA-synt_1g; Domain location=75-302::108-303
  Subcellular localization annotation: CTP_CleavageSite=47; ConfidenceScore=5.16e-01
MALALQWPLQLPLQLQARPPAVTAGHHRRRHRVLAVWRSPPLRARCCASAAAAADTGKAQTAARRAYPFDEIEPRWQQHWEEHRTFRTLDIGEGLDTSKPKCYILDMFPYPSGAGLHVGHPLGYTATDILSRFKRMKGFNVLHPMGWDAFGLPAEQYAIQTGTHPKITTERNIERFRTQLKSLGFSYDWDREISTTEPGYYKWTQWIFLQLLKRGLAYQAEVPVNWCPALGTVLANEEVVDGVSERGGYPVIRKPMRQWMLRITSYADRLLEDLNDLDWPESIKEMQRNWIGRSKGAELIFSAGMQ

SEQ ID NO: 8915 - protein, 216 aa, Zea mays
  Coding DNA Sequence Number=SeqID_2607
  Gene Ontology: Mol. function=structural molecule activity; Cellular component=flagellin-based flagellum basal body, distal rod, P ring; Biological process=ciliary or flagellar motility
  Homolog annotation: Hit_ID=A2W6T8; Match level="QueryCoverage=81%, HitCoverage=44%, E-value=8e-67, Identity=78%"; Hit description =Flagellar basal-body P-ring protein
  Pfam annotation: Domain name=FlgI; Domain location=42-216; Score =88.6; E_value=2e-23; Accession=PF02119.7; Description=Flagellar P -ring protein
MTMQQPLFHRLSLRASRALGALAAALVLAAGAFGAAPAHAERLKDLAQIQGVRDNPLIGYGLVVGLDGTGDQTMQTPFTTQTLANMLANLGISINNGSANGGTSSLNNMQLKNVAAVMVTATLPPFARPGEALDVTVSSLGNAKSLRGGTLLLTPLKGADGQVYALAQGNMAVGGAGASANGSRVQVNQLAAGRIVGGAIVERSVPNAIAQMNGVL

SEQ ID NO: 8916 - protein, 165 aa, Zea mays
  Coding DNA Sequence Number=SeqID_2608
  Gene Ontology: Mol. function=protein binding; Cellular component =integral to membrane
  Homolog annotation: Hit_ID=Q5RGE8; Match level="QueryCoverage=96%, HitCoverage=15%, E-value=1e-27, Identity=36%"; Hit description=Novel protein
MDYGNGSTCEPCPRNTWSDGNTSCRACPPGSTPNYGVQIVRWIELPTYMSAACLEPDGSTCQSGAGWQVAGTYIHTTRHHSPAAYLLLSLTVSGFRSKGGVSAGHRLEVGRVEFSFELDCAAECEFVFLQTSDSKGMTLIESWSQRQARQTYSYAVMQNDTYTFR

SEQ ID NO: 8917 - protein, 51 aa, Zea mays
  Coding DNA Sequence Number=SeqID_2609
MIYKVNVLLHCSNRVSYLENIWKGSFPLAHTLRTDLEEKVIREEQHQEREA

SEQ ID NO: 8918 - protein, 133 aa, Zea mays
  Coding DNA Sequence Number=SeqID_2611
  Homolog annotation: Hit_ID=Q5Z7N1; Match level="QueryCoverage=21%, HitCoverage=2%, E-value=8e-08, Identity=100%"; Hit description =Calcium-binding EF hand protein-like
  Subcellular localization annotation: CTP_CleavageSite=48; ConfidenceScore=5.16e-01
VSYATYIHYPTTTSKMNILHLSLVVKITNSLKKAGRQFATVKRVEDAKANTSPDGTGTRQPSESEAPAPHADPRTLPRGRAPDLAGPVALAAGDTHRPIAHARGAMEAAFDAYFRAADLDRDGRISGQEAVAF

SEQ ID NO: 8919 - protein, 194 aa, Zea mays
  Coding DNA Sequence Number=SeqID_2612
  Gene Ontology: Cellular component=periplasmic space
  Homolog annotation: Hit_ID=A8GE37; Match level="QueryCoverage=96%, HitCoverage=37%, E-value=7e-47, Identity=50%"; Hit description =Putative uncharacterized protein precursor
  Pfam annotation: Domain name=DUF945; Domain location=1-194; Score= -111.5; E_value=1.5e-06; Accession=PF06097.2; Description=Bacterial protein of unknown function (DUF945)
MKKTKVAVGVIVALGVIWTGAAWFTGKQLESHMDEMLQNANSQINAYAPNSRLTLSYQDYQRGVFSSKTKLVIQASSQTEDNPLLKPGQSIVLNETIDHGPFPFAQLKRGNLIPSMASVHTELENTDAVKKLFELTQGKSLVNADTRVGYSGATDTALHLLPVDYSNAQTGDRLATNGGTLNVSADSKGDKVSL

SEQ ID NO: 8920 - protein, 432 aa, Zea mays
  Coding DNA Sequence Number=SeqID_2613
  Gene Ontology: Mol. function=aldehyde-lyase activity; Cellular component=cytosol; Biological process=metabolic process
  Homolog annotation: Hit_ID=B0ISU4; Match level="QueryCoverage=99%, HitCoverage=54%, E-value=0.0, Identity=72%"; Hit description =Phosphoketolase
  Pfam annotation: Domain name=XFP; Domain location=177-353; Score =426.2; E_value=4.8e-125; Accession=PF03894.5; Description=D-xylulose 5-phosphateD-fructose 6-phosphate phosphoketolase
  Pfam annotation: Domain name=XFP_C; Domain location=364-431; Score= -63.2; E_value=2.1e-06; Accession=PF03894.5; Description=XFP C -terminal domain
  Pfam annotation: Domain name=XFP_N; Domain location=1-165; Score =24.7; E_value=8.6e-24; Accession=PF03894.5; Description=XFP N -terminal domain
  Pfam module annotation: Pfam domain module=XFP::XFP_C::XFP_N; Domain location=177-353::364-431::1-165
INLQQLFSGYGYEPLFVCGHEPADMHQQMAAALDNAFDKIAAYQQQARSGQTEQAIPRWPMIVLRSPKGWTGPKEVDGKKVEDFWRAHQVPVAACREDASHRQVLEQWLRSYQPEDLFDEAGKLRPELRALAPQGDKRMSASPYANGGRVRRTLNTPDIREFALDTGAPGSQRGEATKQFGHYLSAIFQRNADNFRLFGPDETASNRLTPVFYVTSRSWMADIEPYDEQLARDGRVMEILSEHQCQGWLEGYLLTGRHGLFNCYEAFIHIIDSMFNQHAKWLKVTRKLGWRQPISSLNYLLSSHVWRQDHNGYSHQDPGFIDHVANKKADIVRIYLPPDANTLLWVGDHCLRTWDRINVIVAGKQPSPQWLDIDSAIAHCEAGMGEWRWASDDGEPDVVMACAGDVPTMKTLAAVDLLRNYLPTLRIRVVKM

SEQ ID NO: 8921 - protein, 71 aa, Zea mays
  misc_feature (14)..(14): Xaa can be any naturally occurring amino acid
  Coding DNA Sequence Number=SeqID_2614
  Gene Ontology: Mol. function=magnesium chelatase activity
  Homolog annotation: Hit_ID=A1SF90; Match level="QueryCoverage=100%, HitCoverage=15%, E-value=5e-20, Identity=70%"; Hit description =Putative magnesium chelatase subunit ChlI
MVTTGEQVSARAFXSSGLPSIGESDLYDQICDRLGASDDGERAGAIELALEGLYLARRISKESGGGEAVYG

SEQ ID NO: 8922 - protein, 74 aa, Zea mays
  misc_feature (8)..(8): Xaa can be any naturally occurring amino acid
  Coding DNA Sequence Number=SeqID_2615
  Gene Ontology: Mol. function=structural molecule activity; Cellular component=cytoskeleton; Biological process=multicellular organismal development
  Homolog annotation: Hit_ID=Q6Z256; Match level="QueryCoverage=75%, HitCoverage=14%, E-value=6e-14, Identity=67%"; Hit description=Actin- related protein 2
YNYDYKRXYKLGVETTILMKSYTLPDRRVIKVDTKRFQPPESLFTPEANPLESTVVASKCANVVAGAGSVKSSA

SEQ ID NO: 8923 - protein, 73 aa, Zea mays
  misc_feature (36)..(36): Xaa can be any naturally occurring amino acid
  Coding DNA Sequence Number=SeqID_2616
  Gene Ontology: Mol. function=protein serine/threonine kinase activity; Biological process=protein amino acid phosphorylation
  Homolog annotation: Hit_ID=Q2RA93; Match level="QueryCoverage=90%, HitCoverage=13%, E-value=2e-13, Identity=63%"; Hit description =Protein kinase domain containing protein, expressed
ENDRSFPDITGFVRALQYKEVVGSGAFKTVYLPSAXKGFDVVEGIEVAWAKVEITGRTMGSPKELQRLKTEIQ

SEQ ID NO: 8924 - protein, 194 aa, Zea mays
  Coding DNA Sequence Number=SeqID_2617
  Gene Ontology: Mol. function=nucleic acid binding; Cellular component= nucleus; Biological process=RNA-mediated posttranscriptional gene silencing
  Homolog annotation: Hit_ID=A7MGQ5; Match level="QueryCoverage=100%, HitCoverage=23%, E-value=4e-72, Identity=73%"; Hit description =Putative uncharacterized protein
  Pfam annotation: Domain name=Helicase_C; Domain location=80-174; Score=43.7; E_value=6.5e-10; Accession=PF00271.21; Description =Helicase conserved C-terminal domain
  Subcellular localization annotation: CTP_CleavageSite=46; ConfidenceScore=5.15e-01
MSATLDNQQLRTLLPDAPFIASQGRSFPVIRRYASLNPQQRFEEAVAREVAQLLRDEPGSLLLFLPGVAEIERVKRELASRVSDEVDLSPLYGALSLEAQRRAILPAAPGRRKVVLATNIAETSLTIEGIRLVMDSALERAAQFDVRSGVTRLLTQRISQASMTQRAGRAGRLAPGICLHLLPQEQALRAAAQS

SEQ ID NO: 8925 - protein, 275 aa, Zea mays
  Coding DNA Sequence Number=SeqID_2618
  Gene Ontology: Mol. function=transporter activity; Cellular component= outer membrane-bounded periplasmic space; Biological process=transport
  Homolog annotation: Hit_ID=A7BAZ5; Match level="QueryCoverage=81%, HitCoverage=79%, E-value=6e-55, Identity=49%"; Hit description =Putative uncharacterized protein
  Pfam annotation: Domain name=SBP_bac_3; Domain location=57-275; Score= 79.4; E_value=1.2e-20; Accession=PF00497.10; Description=Bacterial extracellular solute-binding proteins, family 3
MADTLRPAPDPSHEGPTVTRSLRLTIAVATAAVAALALSACSAGGSNAAGTVTDGKLTIATGQPAYSPWVEDNKPQSGKGFEAAVAYAVAKEMGYAKSDVVWKRSTFDSAIAPGPKDWDLNIQQFSIDAKRKKAVDMSTPYYTTTQAVVTTTSSKAVDRTTIAELKQDAIGVATGSTSIDSVKRVLGVTPQVFNSNDDAVLALKSGQIDAIVTDLPTAFYMASAQLDDGTVSAQFPADGKGDQFGFGLPKDSELTSKVDKALAALDDDGTLESLQ

SEQ ID NO: 8926 - protein, 169 aa, Zea mays
  Coding DNA Sequence Number=SeqID_2619
  Gene Ontology: Mol. function=transporter activity; Cellular component= integral to membrane; Biological process=transport
  Homolog annotation: Hit_ID=A9BS51; Match level="QueryCoverage=100%, HitCoverage=34%, E-value=1e-26, Identity=43%"; Hit description =Sulphate transporter
  Pfam annotation: Domain name=Sulfate_transp; Domain location=1-158; Score=-31.5; E_value=5.3e-09; Accession=PF00916.10; Description =Sulfate transporter family
MAVVGLLESMMTASVVDEWTVTTSSKSRECSGLGLANLAAGLFGGIAGCGMIGQTVGNLRYGGRGRLSTLTSGLFLLLLIVALHPWVARIPVAALVAIMIMVSISTFSWSSVRDLTRHPKVSSAVMLATVAVTVATADLAAGVAVGVLLSGVFFAFKVMRLMAVSIDYD

SEQ ID NO: 8927 - protein, 107 aa, Zea mays
  Coding DNA Sequence Number=SeqID_2620
  Gene Ontology: Mol. function=oxidoreductase activity; Cellular component=cytoplasm; Biological process=electron transport
  Homolog annotation: Hit_ID=Q9RK22; Match level="QueryCoverage=94%, HitCoverage=25%, E-value=2e-21, Identity=53%"; Hit description =Putative monooxygenase
MSDKLTIAIVGGGPAGLTAAVILQRHGFNVTVFEDEPADAARSQGGSLDLHADSGQAALRRAGLLEQFINIARHEDQESRMLNYLTGDIEVDRFTPEGEMDKPEIDR

SEQ ID NO: 8928 - protein, 87 aa, Zea mays
  misc_feature (14)..(14): Xaa can be any naturally occurring amino acid
  Coding DNA Sequence Number=SeqID_2621
  Gene Ontology: Mol. function=microtubule motor activity; Cellular component=microtubule associated complex; Biological process =microtubule-based movement
  Homolog annotation: Hit_ID=Q75LL2; Match level="QueryCoverage=94%, HitCoverage=6%, E-value=2e-33, Identity=80%"; Hit description =Kinesin-like protein
PAPTPPARFELQEXPSFWKDNNVQVAIRIRPLSGSEVSMQGQKRCVRQDSSQSLTWIGHPESRFTFDLVADEHVTQEGMFNVAGVPM

SEQ ID NO: 8929 - protein, 269 aa, Zea mays
  misc_feature (261)..(261): Xaa can be any naturally occurring amino acid
  Coding DNA Sequence Number=SeqID_2622
  Gene Ontology: Mol. function=lyase activity
  Homolog annotation: Hit_ID=A2VVH2; Match level="QueryCoverage=77%, HitCoverage=47%, E-value=1e-105, Identity=91%"; Hit description=D -serine deaminase
MRGAREIGEDERGDLAFRFAQLGRAFGDPRDDVEDRLGGRRGVRIGGGRSGRNHGRIHLRKRGLGNLPSASVPLDDAARLEWNLLAEDVSLPAAVLYADRIEHNLNWMQAFVQQYGAQFAPHGKTTMAPQLFRRQLAAGAWGITLATAHQTQAAYHGGVRRVLLANQLVGRQNMTIIAGLLSDPDFEFFCLVDSADSVDQLGRFFGDAKKTLNVLIELGVPGGRAGVRDAVQRQAVLDAIARYPDTLKMAGIELYEGVLKXEGEIRAFL

SEQ ID NO: 8930 - protein, 135 aa, Zea mays
  misc_feature (128)..(128): Xaa can be any naturally occurring amino acid
  Coding DNA Sequence Number=SeqID_2623
  Gene Ontology: Mol. function=transporter activity; Cellular component= periplasmic space; Biological process=transport
  Homolog annotation: Hit_ID=P36634; Match level="QueryCoverage=80%, HitCoverage=19%, E-value=1e-48, Identity=81%"; Hit description =Peptide transport periplasmic protein sapA precursor
  Subcellular localization annotation: CTP_CleavageSite=49; ConfidenceScore=5.24e-01
MPKLFPALLLGLSVLSASALAAPADSIRHSGFVYCVNGTVNTFNPQMVSSGLVVDTLAAQLYDRLLDVDPYTYRLIPDLAQSWEVRDNGATYRFHLRKDVSFQHTNWFTPTRKMNADDVVFSFARMFXEKRHPWH

SEQ ID NO: 8931 - protein, 96 aa, Zea mays
  Coding DNA Sequence Number=SeqID_2624
  Gene Ontology: Mol. function=chaperone activator activity; Cellular component=cytoplasm; Biological process=response to stress
  Homolog annotation: Hit_ID=Q6YUA7; Match level="QueryCoverage=71%, HitCoverage=19%, E-value=3e-24, Identity=76%"; Hit description =Putative activator of 90 kDa heat shock protein ATPase homolog 1
  Subcellular localization annotation: CTP_CleavageSite=41; ConfidenceScore=5.05e-01
DLQHSPRAESQVCPPTPTLSGSLPPVQRSRAWPQKLEMQVRLMLDEPESGVTVIKLKQTGVPEEDKYGNSTVVENTERGWRDLIFQRIRGMFGFGI

SEQ ID NO: 8932 - protein, 184 aa, Zea mays
  Coding DNA Sequence Number=SeqID_2625
  Gene Ontology: Cellular component=membrane
  Homolog annotation: Hit_ID=Q6UNT3; Match level="QueryCoverage=35%, HitCoverage=19%, E-value=5e-18, Identity=73%"; Hit description =Hypersensitive-induced response protein
PLDVRCETKTKVFSVASRFDDNVFVTVVASVQYRALADKATDAFYKLSNTREQIQSYVFDALAATLLFPQRGCFALLRSSVREWTKLKTWGLVQTGIDMCLGLRFESSHGRAVGGAMSEPNRAMRRRRISSANTHDGGMGRNLPHAAADGEKASRRARSKGGARRHLGSGETWAGHHKSRDGGY

SEQ ID NO: 8933 - protein, 250 aa, Zea mays
  Coding DNA Sequence Number=SeqID_2626
  Gene Ontology: Mol. function=protein serine/threonine kinase activity; Cellular component=integral to membrane; Biological process=protein amino acid phosphorylation
  Homolog annotation: Hit_ID=A2ZCW3; Match level="QueryCoverage=98%, HitCoverage=60%, E-value=5e-80, Identity=43%"; Hit description =Putative uncharacterized protein
  Pfam annotation: Domain name=LRR_1; Domain location=23-45; Score =14.5; E_value=0.4; Accession=PF00560.23; Description=Leucine Rich Repeat
  Pfam annotation: Domain name=LRR_1; Domain location=47-69; Score =14.9; E_value=0.31; Accession=PF00560.23; Description=Leucine Rich Repeat
  Pfam annotation: Domain name=LRR_1; Domain location=71-93; Score=7.4; E_value=13; Accession=PF00560.23; Description=Leucine Rich Repeat
  Pfam annotation: Domain name=LRR_1; Domain location=95-116; Score =6.6; E_value=19; Accession=PF00560.23; Description=Leucine Rich Repeat
  Pfam module annotation: Pfam domain module=LRR_1::LRR_1::LRR_1::LRR _1; Domain location=23-45::47-69::71-93::95-116
QTLLASNNRICGAVPAELGELRRLVKLDLSGNELSGPIPGAVGQCCELTYLDLSRNNLSGVIPEAIASIRVLNYLNLSRNALEDAVPAAIGAMSSLTAADLSYNDLSGQLPDTGQLGYLNATAFAGNPRLCGAVVGRPCNYTGGGLGVTARRGVGAGELKLVLALGLLACSVGFAAAAVLRARSFRRVDGSGGGGGRWRFAAFHKVDFGVAEVIECMKDGNVVGRGGAGVVYAGRTRSGGAIAVKRLQVD

SEQ ID NO: 8934 - protein, 118 aa, Zea mays
  Coding DNA Sequence Number=SeqID_2627
  Gene Ontology: Mol. function=nucleoside-triphosphatase activity; Cellular component=chloroplast; Biological process=defense response
  Homolog annotation: Hit_ID=A0GTQ2; Match level="QueryCoverage=98%, HitCoverage=44%, E-value=4e-54, Identity=93%"; Hit description=ABC transporter related
  Pfam annotation: Domain name=ABC_tran; Domain location=41-118; Score=- 62.0; E_value=0.093; Accession=PF00005.17; Description=ABC transporter
  Subcellular localization annotation: CTP_CleavageSite=39; ConfidenceScore=5.19e-01
MNALPNRQPAGTTSSLVVRNLKKRYGSRTVVKDVSLDVKSGEVVGLLGPNGAGKTTSFYMIVGLVPLDAGEISLNGSSISLLPIHKRASLGLSYLPQEASVFRKLTVEENIRAVLELQ

SEQ ID NO: 8935 - protein, 133 aa, Zea mays
  misc_feature (42)..(42): Xaa can be any naturally occurring amino acid
  misc_feature (91)..(91): Xaa can be any naturally occurring amino acid
  Coding DNA Sequence Number=SeqID_2628
  Gene Ontology: Mol. function=prephenate dehydrogenase (NADP+) activity; Cellular component=cytoplasm; Biological process=aromatic amino acid family biosynthetic process
  Homolog annotation: Hit_ID=Q02287; Match level="QueryCoverage=78%, HitCoverage=27%, E-value=4e-35, Identity=77%"; Hit description=T -protein [Includes: Chorismate mutase (EC 5.4.99.5) (CM); Prephenate dehydrogenase (EC 1.3.1.12) (PDH)]
RITQYRGKKWQTNIKGAPKSGPFFEGEREENVNWIQLLALSXPIFRLELAMVGRLFAQDPQLYADIIMSSESNLALIKRYYQRFGEAITLXKQGDKQAFTTAFERVEQSIYEYFIRFLVEILSGFRSAYDSRQ

SEQ ID NO: 8936 - protein, 51 aa, Zea mays
  misc_feature (18)..(18): Xaa can be any naturally occurring amino acid
  Coding DNA Sequence Number=SeqID_2629
  Gene Ontology: Mol. function=aspartic-type endopeptidase activity; Cellular component=chromatin; Biological process=DNA integration
  Homolog annotation: Hit_ID=Q2QMT9; Match level="QueryCoverage=86%, HitCoverage=4%, E-value=4e-13, Identity=70%"; Hit description =Retrotransposon protein, putative, unclassified
ACLQYLVFTQPDITYVVXKACLHMHAPWEPHLIAMKWILWYLRGTIDFVVR

SEQ ID NO: 8937 - protein, 87 aa, Zea mays
  Coding DNA Sequence Number=SeqID_2630
  Gene Ontology: Mol. function=nucleic acid binding
  Homolog annotation: Hit_ID=A5AP98; Match level="QueryCoverage=95%, HitCoverage=29%, E-value=1e-13, Identity=43%"; Hit description =Putative uncharacterized protein
AGTTLLPCISSCSTYGCPFGEGCHFVHYFPGDYRAVSEMTNLGGATIAPPGGMMMDGPPTPIVKTRLCNKYNTAVSLNISQRLHKNS

SEQ ID NO: 8938 - protein, 200 aa, Zea mays
  Coding DNA Sequence Number=SeqID_2631
  Gene Ontology: Mol. function=transporter activity; Cellular component= outer membrane-bounded periplasmic space; Biological process=transport
  Homolog annotation: Hit_ID=Q48CR3; Match level="QueryCoverage=88%, HitCoverage=53%, E-value=2e-66, Identity=66%"; Hit description=ABC transporter, periplasmic substrate-binding protein
MRHKKVKIYAGAIALSASALFTSLTQSAETAICYNCPPEWPDWGTQLKAIARDTGIQVPQDNNHSGQALAQLVAQQGNPVAHVVYYGVSFGIQAHSAGVVASYQPAHWDDIPAGMKASIGKWVALHSGTMGFMVNVDALGGAPVPQSWDDLLKPEYKGMIGYLHPARAFVGYVTPVAVNQKKGGNMQDFTPALTWFNKLQ

SEQ ID NO: 8939 - protein, 82 aa, Zea mays
  Coding DNA Sequence Number=SeqID_2632
RRDGHAHTATCCAWAVLRGAACAPAPSNDAVTLHYITLIGRAGWLALSPSGQVDRRAGARSPIGRQAHGRWVVQWSRSLRAS

SEQ ID NO: 8940 - protein, 73 aa, Zea mays
  Coding DNA Sequence Number=SeqID_2634
MTVVTVIRFVTNPGKNLLARRPHGSVKQSHGASEFKQMTKGFVELVHEIEAEPVEDASDSGVHRSALLGRTRG

SEQ ID NO: 8941 - protein, 127 aa, Zea mays
  misc_feature (48)..(48): Xaa can be any naturally occurring amino acid
  misc_feature (78)..(78): Xaa can be any naturally occurring amino acid
  Coding DNA Sequence Number=SeqID_2636
  Gene Ontology: Mol. function=magnesium ion binding; Cellular component=integral to membrane; Biological process=photosynthesis, light harvesting
  Homolog annotation: Hit_ID=Q00827; Match level="QueryCoverage=95%, HitCoverage=45%, E-value=9e-25, Identity=49%"; Hit description =Chlorophyll a-b binding protein 48, chloroplast precursor
EAGVTMAISYSTLWDNPSAGTRDVISYDRITMRNTDDKPNLANSDIPXFRAYRMLYLHPLCDLPAIYINNHFPVNYGXDTVRLSADPDTLHRIHELKAMHCRWAILGALECLFTELICHTGVMIDQA

SEQ ID NO: 8942 - protein, 171 aa, Zea mays
  Coding DNA Sequence Number=SeqID_2637
  Gene Ontology: Mol. function=cobyrinic acid a,c-diamide synthase activity; Cellular component=integral to membrane; Biological process=cobalamin biosynthetic process
  Homolog annotation: Hit_ID=A7MLD8; Match level="QueryCoverage=91%, HitCoverage=67%, E-value=4e-49, Identity=62%"; Hit description =Putative uncharacterized protein
  Pfam annotation: Domain name=CbiA; Domain location=2-156; Score= -10.3; E_value=0.00031; Accession=PF01656.13; Description=Cobyrinic acid a,c-diamide synthase
GLTLSYSDVNPVTLEEDEISTSPAQRIDYPLLNRGLAGLQDRAARVVVEGTGGWRSLMNDLRPLSQWVQQAQLPVVLVVGIKEGCISHALLTAEAIAADGLTLAGWVANRINPGLAHYAEIIDVLRDKLNAPLLGELPYLPRAEQRDLSGYLDITLLGGDALHSESAKPAA

SEQ ID NO: 8943 - protein, 292 aa, Zea mays
  misc_feature (18)..(18): Xaa can be any naturally occurring amino acid
  misc_feature (32)..(32): Xaa can be any naturally occurring amino acid
  misc_feature (63)..(63): Xaa can be any naturally occurring amino acid
  misc_feature (73)..(73): Xaa can be any naturally occurring amino acid
  misc_feature (92)..(92): Xaa can be any naturally occurring amino acid
  misc_feature (109)..(109): Xaa can be any naturally occurring amino acid
  misc_feature (120)..(120): Xaa can be any naturally occurring amino acid
  misc_feature (133)..(133): Xaa can be any naturally occurring amino acid
  misc_feature (139)..(139): Xaa can be any naturally occurring amino acid
  misc_feature (231)..(231): Xaa can be any naturally occurring amino acid
  Coding DNA Sequence Number=SeqID_2638
  Gene Ontology: Mol. function=pyridoxal phosphate binding; Cellular component=cytoplasm; Biological process=amino acid metabolic process
  Homolog annotation: Hit_ID=Q10AM0; Match level="QueryCoverage=99%, HitCoverage=26%, E-value=1e-85, Identity=61%"; Hit description =Ser/Thr protein phosphatase family protein, expressed
  Pfam annotation: Domain name=OKR_DC_1_C; Domain location=177-282; Score=-35.7; E_value=0.00012; Accession=PF03711.5; Description =OrnLysArg decarboxylase, C-terminal domain
MTAHFRCHDRRSSTVIDXGADLSVLSTHNVLXALLTQSSMLHMLGDIGDEYRLSQSLQFLQRXSPSYLVLSSXDAGRDHLSQIRNIFDEPLXIELETKHLLAKIRGISXIDLPCFASDIXPAIDPLRITLTAXICSYRXYETDDILYEGHQIVSELVGTWAVTFAVNLGTRVQDAEKLVQSAKHLSEKHFFANSLKPVKENRVHGPLENISVHLSPREAFFTEKRRVKIEXDSLGEICGELICPYPPGIPVLIPGEVVTHDSLSYLMSVRHQGITISGAADAELNSILVCDL

SEQ ID NO: 8944 - protein, 67 aa, Zea mays
  misc_feature (19)..(19): Xaa can be any naturally occurring amino acid
  Coding DNA Sequence Number=SeqID_2639
  Homolog annotation: Hit_ID=A0U7X4; Match level="QueryCoverage=98%, HitCoverage=17%, E-value=9e-17, Identity=72%"; Hit description =Transcriptional regulator, LysR family
ALGLVADQVDVSLLPESVXGVRVKGVVYRRLPEPTATSPIIMSRRLHGESAATTAFCAIAREMIVPT

SEQ ID NO: 8945 - protein, 70 aa, Zea mays
  Coding DNA Sequence Number=SeqID_2640
  Gene Ontology: Mol. function=microtubule motor activity; Cellular component=microtubule associated complex; Biological process =microtubule-based movement
  Homolog annotation: Hit_ID=Q93XF8; Match level="QueryCoverage=62%, HitCoverage=12%, E-value=7e-09, Identity=72%"; Hit description =Kinesin heavy chain
IDQGHFFKNCSTTQIFTNLYIHTSFRSVDKTHMNEQSYRGHFVFTLKISESNEKTGQPGKRVINLIDFAA

SEQ ID NO: 8946 - protein, 147 aa, Zea mays
  Coding DNA Sequence Number=SeqID_2641
  Gene Ontology: Mol. function=transporter activity; Cellular component= integral to membrane; Biological process=transport
  Homolog annotation: Hit_ID=UPI00005F7630; Match level="QueryCoverage =99%, HitCoverage=29%, E-value=3e-57, Identity=75%"; Hit description =COG0659: Sulfate permease and related transporters (MFS superfamily)
  Pfam annotation: Domain name=STAS; Domain location=55-145; Score= -3.3; E_value=0.084; Accession=PF01740.11; Description=STAS domain
QPATLKRMPWSETLVMVLSVAVTVWTGNLALGVLVGVMLAMMLFARRIAHVIHAERQLSDDGEHVHYTVRGPLFFASSNDLFEHFDYGHDPQRVTIDLTHAQIWDASSVAALDAIEYRYQRHGASVTFTGLDNRSSDFRDRLSGNLG

SEQ ID NO: 8947 - protein, 227 aa, Zea mays
  misc_feature (217)..(217): Xaa can be any naturally occurring amino acid
  Coding DNA Sequence Number=SeqID_2642
  Gene Ontology: Mol. function=penicillin binding; Cellular component =integral to membrane; Biological process=peptidoglycan-based cell wall biogenesis
  Homolog annotation: Hit_ID=A8GEB8; Match level="QueryCoverage=100%, HitCoverage=39%, E-value=2e-79, Identity=62%"; Hit description =Peptidoglycan glycosyltransferase precursor
  Pfam annotation: Domain name=Transpeptidase; Domain location=60-227; Score=32.6; E_value=1.1e-07; Accession=PF00905.13; Description =Penicillin binding protein transpeptidase domain
QGEPGKEVYRQDGDGNIIAMIDYEPPKQPPTVQLSIDKFDQFTLYSKLRDGVLLNKADSGAAVLVKIDTGEILAMASYPSFNPNNYDNATPAQMRNTAINDSYEPGSTVKPLVVMEGLQRHLVRPDSVIDTTPYSVNGHLIRDVGHWPRLTMTGILQKSSDIGVSHIALAMPAEALVNTYQAFGLGKPTGLGLTGESVGYFPLHRQRWADIERATFXFGYGLRVTPL

SEQ ID NO: 8948 - protein, 223 aa, Zea mays
  Coding DNA Sequence Number=SeqID_2643
  Gene Ontology: Mol. function=transferase activity, transferring glycosyl groups; Cellular component=peptidoglycan-based cell wall; Biological process=peptidoglycan-based cell wall biogenesis
  Homolog annotation: Hit_ID=Q5PNH3; Match level="QueryCoverage=98%, HitCoverage=28%, E-value=2e-78, Identity=65%"; Hit description =Penicillin-binding protein 1C
  Pfam annotation: Domain name=Transgly; Domain location=1-71; Score= -22.5; E_value=7.1e-09; Accession=PF00912.12; Description =Transglycosylase
LACLQLEWHLSKREILTLYLNRAPFGGTVEGVGAASWMWLGKPASQLTRGEAALLAVLPQAPSRLRPDRWPQRAEAARNKVLDRLAQYQVWPAHTVAEIKQEPVWLPPRQLPQLAPLLARRLLSLSPDSKITSTLDVSLQRELENLAASLQTRLPPRTSLALLVVDHSSMKVRGYVGSVSFNDDSRFGHVDMIASVRSPGSLLKPFVYGMALDDGLIHGESLL

SEQ ID NO: 8949 - protein, 150 aa, Zea mays
  Coding DNA Sequence Number=SeqID_2644
  Gene Ontology: Mol. function=binding; Cellular component=outer membrane; Biological process=cellulose biosynthetic process
  Homolog annotation: Hit_ID=A4WFW3; Match level="QueryCoverage=99%, HitCoverage=11%, E-value=8e-63, Identity=73%"; Hit description =Cellulose synthase operon C domain protein precursor
  Pfam annotation: Domain name=BCSC_C; Domain location=1-150; Score= -93.3; E_value=5.6e-05; Accession=PF05420.2; Description=Cellulose synthase operon protein C C-terminus (BCSC_C)
MTDSLLSYVGVEDKTSGKRWGRVTKNGGNAMLSFDNGDAGFYVGGGAYSYLGENVASNNSVQATAGAYVRPYHSDDRELKVGMSLSWMDFSKNLSYFSYGQGGYFSPQNYAAVSFPVDFSRKFDDLKVNVGGSVGYQSYSQDKSAYFPND

SEQ ID NO: 8950 - protein, 131 aa, Zea mays
  misc_feature (23)..(23): Xaa can be any naturally occurring amino acid
  misc_feature (37)..(37): Xaa can be any naturally occurring amino acid
  Coding DNA Sequence Number=SeqID_2645
  Gene Ontology: Mol. function=nucleic acid binding; Biological process= mRNA metabolic process
  Homolog annotation: Hit_ID=A5BR81; Match level="QueryCoverage=93%, HitCoverage=19%, E-value=8e-34, Identity=61%"; Hit description =Putative uncharacterized protein
ELVAISTGEEPYQALTELNGTMXSGKPSDVAYAQLKXDRGARLQAQFYQRRPAVPMTPTLAPRLAMYSPMAPKQLFYGQAPPAMRPLQPGFAVQQQLAPGMRPGGPHMPTGYVPVDQQGQQGPRPPITRRA

SEQ ID NO: 8951 - protein, 129 aa, Zea mays
  Coding DNA Sequence Number=SeqID_2646
  Gene Ontology: Mol. function=transcription factor activity; Biological process=regulation of transcription, DNA-dependent
  Homolog annotation: Hit_ID=A4XT97; Match level="QueryCoverage=100%, HitCoverage=43%, E-value=4e-29, Identity=51%"; Hit description =Transcriptional regulator, LysR family
  Pfam annotation: Domain name=HTH_1; Domain location=2-56; Score=39.1; E_value=1.6e-08; Accession=PF00126.17; Description=Bacterial regulatory helix-turn-helix protein, lysR family
QVFASVVENQGYSRAQQALNMTTPAISAYMSELEGQLGFILCQRGRAGFALTSKGEQFYAYTREMLATLSGWQSQVETLKSAQGGTFALGVVDATVTDSTLDLPAVIARFNQRFPAVFLTLSVCEPNEL

SEQ ID NO: 8952 - protein, 80 aa, Zea mays
  Coding DNA Sequence Number=SeqID_2647
QRALGPQQPSHGFGLGLHHQRLGDASSPGGMEPDAVMMPPLLFRALASLNLLLLVGYLLLVLLAKLFARLHHRATAKDST

SEQ ID NO: 8953 - protein, 135 aa, Zea mays
  Coding DNA Sequence Number=SeqID_2649
  Gene Ontology: Mol. function=inorganic phosphate transmembrane transporter activity; Cellular component=membrane; Biological process=phosphate transport
  Homolog annotation: Hit_ID=A8GEX0; Match level="QueryCoverage=69%, HitCoverage=17%, E-value=7e-33, Identity=77%"; Hit description =Phosphate transporter
  Subcellular localization annotation: CTP_CleavageSite=21; ConfidenceScore=5.06e-01
MAENSFPASSSDRGRPNLHPRSGRASRVLFLLLLLAGLVFTGINLFNDVEETGAVVTSYTPFLLLGVALLIALGFEFVNGFHDTANAVATVIYTHSLSPGVAVVWSGLCNFLGVLLSSGVVAFGIISLLPVELIL

SEQ ID NO: 8954 - protein, 75 aa, Zea mays
  misc_feature (30)..(30): Xaa can be any naturally occurring amino acid
  misc_feature (59)..(59): Xaa can be any naturally occurring amino acid
  Coding DNA Sequence Number=SeqID_256
  Gene Ontology: Mol. function=3-deoxy-7-phosphoheptulonate synthase activity; Cellular component=chloroplast; Biological process =aromatic amino acid family biosynthetic process
  Homolog annotation: Hit_ID=P29976; Match level="QueryCoverage=94%, HitCoverage=13%, E-value=5e-20, Identity=64%"; Hit description =Phospho-2-dehydro-3-deoxyheptonate aldolase 1, chloroplast precursor
MVKVRDDVNLPIYQGDNINGKTFDEKSHVXDPYKMLSEYTQSAVMLNLLYAFSTGGYSXIQRVTQWKLDVTEHSK

SEQ ID NO: 8955 - protein, 127 aa, Zea mays
  Coding DNA Sequence Number=SeqID_257
GIIGNNTGIVLFQPLILNQTNLFEGSSHPVPACHCKQTHSKSLWKNTKMQRNELSVQFRSYMLAPSQAGPRLGFRRDRAAGGESVRIGVKKRRKNFFLSFFPTRRNWSFSPKFICLGTTNNVGDAIY

SEQ ID NO: 8956 - protein, 218 aa, Zea mays
  misc_feature (98)..(98): Xaa can be any naturally occurring amino acid
  Coding DNA Sequence Number=SeqID_259
  Gene Ontology: Mol. function=glucose transmembrane transporter activity; Cellular component=endoplasmic reticulum; Biological process=positive regulation of growth rate
  Homolog annotation: Hit_ID=A2WKQ2; Match level="QueryCoverage=38%, HitCoverage=45%, E-value=5e-31, Identity=74%"; Hit description =Putative uncharacterized protein
  Pfam annotation: Domain name=PTPLA; Domain location=64-218; Score =36.2; E_value=9.6e-10; Accession=PF04387.5; Description=Protein tyrosine phosphatase-like protein, PTPLA
  Subcellular localization annotation: CTP_CleavageSite=13; ConfidenceScore=5.46e-01
RDACGLSAFTGSLASSGETQNSTIAKSIQSFRGVFLAHRGSGDVGRRLGGSTSPSTTGSSSPSTTAAIMEILHGLVGLVSSPASTTLPEIGSRLFLMXGIFWSFPETQSHLLATALIISWSVTEIIRYSFFAMKEAFGSAPSWLSWLRYTDPTRKPKRYRYACCSHLITTILFMFRVSLSVLDRPPFFFCSLQCLRLSPAVYLSYLYSFLQTVCRAYR

SEQ ID NO: 8957 - protein, 121 aa, Zea mays
  misc_feature (121)..(121): Xaa can be any naturally occurring amino acid
  Coding DNA Sequence Number=SeqID_260
  Gene Ontology: Mol. function=aspartic-type endopeptidase activity; Cellular component=chromatin; Biological process=chromatin assembly or disassembly
  Homolog annotation: Hit_ID=Q8SA91; Match level="QueryCoverage=46%, HitCoverage=2%, E-value=7e-17, Identity=76%"; Hit description =Putative gag-pol polyprotein
SVDVQINSGQNGIETPPSLISNCRFLILLLDYLEEHRCLSSAEQQAKHICHERLAVAIKAKAAFWKQRSKHRAIIEGDANTAFHHAIATQQMRRNQIKSITVGSRELSSQANKSAAVTDFX

SEQ ID NO: 8958 - protein, 148 aa, Zea mays
  Coding DNA Sequence Number=SeqID_261
TIVVANKRWFSGRLQPAIGQAQDGAGWRTSRPQREAPAGGGGGIVAIIIISSRSWCFVGCCRSTRPRRAGSSAAASARRTTPPPPPCFCSPASSAPPPFDGDKNTFVYFGRLLVTNQHVDHHAACMSVCRIGNVRYVMGYWSLIRLSE

SEQ ID NO: 8959 - protein, 106 aa, Zea mays
  Coding DNA Sequence Number=SeqID_263
SSRSCKGRGSVPCRSQRGGCRSLCSPWWCDGNARFVNPCLLPQLKSARTLQLATNQREGAGAERRTMVAMERTPGAVEAWSGRREAGPVDGGLRQAAAEQWRLERL

SEQ ID NO: 8960 - protein, 191 aa, Zea mays
  Coding DNA Sequence Number=SeqID_265
  Subcellular localization annotation: CTP_CleavageSite=43; ConfidenceScore=5.38e-01
RSHLPIAISSWKQRCRRRWRRKRRRQRRGRRRSPWSWRSRCPRSSKPASDRHTLVAAHGALRPRRQPRGPGRPRPRALLRCSPNRRRGSLPREATPPRGRPRQQRPCSPPAFAVPRVCDVPFFAGAAKGLKSEWNRCSFGSDSRSRCWNRWMKRIAFTIPRALLWVLFRQVSTCVAFAGLVPVTSCNNPDD

SEQ ID NO: 8961 - protein, 232 aa, Zea mays
  misc_feature (131)..(131): Xaa can be any naturally occurring amino acid
  Coding DNA Sequence Number=SeqID_267
  Gene Ontology: Mol. function=transition metal ion binding; Cellular component=integral to membrane; Biological process=biological_process
  Homolog annotation: Hit_ID=A9PA37; Match level="QueryCoverage=78%, HitCoverage=79%, E-value=1e-72, Identity=64%"; Hit description =Putative uncharacterized protein
  Pfam annotation: Domain name=Cyt-b5; Domain location=55-143; Score =51.4; E_value=3e-12; Accession=PF00173.18; Description=Cytochrome b5- like HemeSteroid binding doma
KCKKTVRDPHAHRPTGLRPAPLADRFHQIHRYDGPIFRSDDPGDFPLYRHRKPRLWMVEELSVYNGTNEELPILLAILGSVFDVTKGRSHYGPGGGYHHFAGRDASRAFVSGNFTGDGLTDSLQGLSSSEXGNPTKYLKGVEVKAKRGAQLLEKQKSDEAKIPGCNSKWSQQEGGEVWCDAGYPRLVRRPGDIALTGQVSQRCACFQENELDKAGLVVYEGCDYLSQSCKVN

SEQ ID NO: 8962 - protein, 81 aa, Zea mays
  Coding DNA Sequence Number=SeqID_268
SSVAIATFNDSKGVAKFGLWYSGILDNLCFVLLIILNHVGLLQGYKLNKTILRYDYPIVYACLITCGAYLAECLQNDLLSM

SEQ ID NO: 8963 - protein, 313 aa, Zea mays
  Coding DNA Sequence Number=SeqID_270
TTRRRTTLTAESTTRLGIKAERAERAHRRAENRTRLRAEENLARRGTTKRCAHDEEAESHDKGARRVDWDYGEEGADTATRTRKWNPSTGRARRATRTARRDFTAQWIRDQSELELRAHRAESEPATGSRARHIGTWTRAQGSRALGVGELGAWKSGEPRGAEWSWDGHGRSSTRVQARFELGPRTRLGRARRAPWQEKLERRARSKAPGRDAGCSDKVERASREETELNRAEGDRSRGAVGEKERRWSELEEIAMARRKLGQGQGRVLSWARSRDTATDEDAMAARQGTRGTEKRESTAGYLKSPRGGAVRR

SEQ ID NO: 8964 - protein, 140 aa, Zea mays
  Coding DNA Sequence Number=SeqID_272
  Subcellular localization annotation: CTP_CleavageSite=43; ConfidenceScore=5.50e-01
VLSLRLPLPTTTKHARRCATFPVAPTPMPPSHRMASQTLSLVSAFPLEDPTTPVALHSQTQAHAGQMHRHVLTTSSEQQADTCSLPLQTTDQQHHLCVTPRASTARAIASTRKESHVHLPPRLTLCAAGSYYSLSASATL

SEQ ID NO: 8965 - protein, 146 aa, Zea mays
  Coding DNA Sequence Number=SeqID_2650
  Homolog annotation: Hit_ID=A7MQ06; Match level="QueryCoverage=99%, HitCoverage=81%, E-value=3e-68, Identity=87%"; Hit description =Putative uncharacterized protein
  Pfam annotation: Domain name=DUF770; Domain location=10-146; Score =262.6; E_value=8.1e-76; Accession=PF05591.2; Description=Protein of unknown function (DUF770)
APTKSSGQKFIARNRAPRVQIEYDVEIYGAERKIQLPFVMGVMADLVGKPLEPQASLDERKFLEIDIDNFDERMKALKPRAAFQVDNTLNGEGKLNVELTFESMDDFSPDAIARKVEPLSNLLEARTQLSNLLTYMDGKNGAEELI

SEQ ID NO: 8966 - protein, 53 aa, Zea mays
  Coding DNA Sequence Number=SeqID_2651
  Gene Ontology: Cellular component=membrane
  Homolog annotation: Hit_ID=Q6YVJ1; Match level="QueryCoverage=96%, HitCoverage=12%, E-value=9e-12, Identity=68%"; Hit description =Nodulin-like protein
MVAGERNDDERQPHTEMVGSQLINAGYHVVAKHALSVRVNRVVFCVIRDLLAL

SEQ ID NO: 8967 - protein, 129 aa, Zea mays
  Coding DNA Sequence Number=SeqID_2652
  Gene Ontology: Mol. function=2-dehydro-3-deoxygalactonokinase activity
  Homolog annotation: Hit_ID=Q6CYT7; Match level="QueryCoverage=94%, HitCoverage=42%, E-value=2e-40, Identity=64%"; Hit description=2 -dehydro-3-deoxygalactonokinase
  Pfam annotation: Domain name=DGOK; Domain location=9-129; Score= -57.7; E_value=1.4e-09; Accession=PF05035.3; Description=2-keto-3 -deoxy-galactonokinase
FVTRYIAIDWGSTNLRAWYYRAGECVDERRSEAGVTRLGDRTPAQVFATITDGWPVAEVPVIMAGMVGSNAGWLAVPYLACPVALNTLSDRLTCVEGKAWIVPGLSVERDDNYNVMRGEETQLLGAVTL

SEQ ID NO: 8968 - protein, 146 aa, Zea mays
  misc_feature (117)..(117): Xaa can be any naturally occurring amino acid
  Coding DNA Sequence Number=SeqID_2653
  Gene Ontology: Mol. function=sequence-specific DNA binding; Cellular component=intracellular; Biological process=regulation of transcription, DNA-dependent
  Homolog annotation: Hit_ID=A0FTY3; Match level="QueryCoverage=99%, HitCoverage=48%, E-value=5e-38, Identity=56%"; Hit description =Transcriptional regulator, AraC family
  Subcellular localization annotation: CTP_CleavageSite=52; ConfidenceScore=5.03e-01
TVHAFEFSPQIDGLVITVVQRALQTLVKTAAPGALSIMQRAAVIPVKGPDASVSMLMPLFALLEQEFRSPSRGRGAAGMALLVALIVHVARLSDLAAAPSQAGTDRRGILLRRFLEXIDAHFREHRPVEFYVERLGVLAAQLARVR

SEQ ID NO: 8969 - protein, 243 aa, Zea mays
  Coding DNA Sequence Number=SeqID_2654
  Gene Ontology: Mol. function=nucleic acid binding; Cellular component= intracellular; Biological process=regulation of transcription
  Homolog annotation: Hit_ID=A2WKB4; Match level="QueryCoverage=98%, HitCoverage=88%, E-value=2e-31, Identity=39%"; Hit description =Putative uncharacterized protein
MTSPRLKLFGFHVSEEEHELGRARETEAEAEPDEAPACGNVGGGGGGSDSSSSSTTTTTTTTATAAGDARRFECQYCCREFANSQALGGHQNAHKKERQQLKRAQLQAAGVDAGRVAAGGALYPRANPMVSAFVPPPHLFGGDAAPTSWVYFSPRAAAAAAGGPQGQQFHVSHNCVFPSRAATPATVTAASPAVFSYAAASSAGGGAAAPYGNGTDDQYSGRRLHVSPAAALRRYPGMAGGSL

SEQ ID NO: 8970 - protein, 77 aa, Zea mays
  Coding DNA Sequence Number=SeqID_2655
  Gene Ontology: Cellular component=cellulose and pectin-containing cell wall
  Homolog annotation: Hit_ID=A2XZL3; Match level="QueryCoverage=77%, HitCoverage=13%, E-value=5e-22, Identity=76%"; Hit description =Putative uncharacterized protein
  Pfam annotation: Domain name=PAE; Domain location=1-77; Score=-223.8; E_value=0.063; Accession=PF03283.4; Description=Pectinacetylesterase
VDLQGGSGSGSRSWLIHLEGGGWCRNLKSCASRQRSMLGSSRYMEGQVEFTGILSDDKSQNPGIEVSHLSNVCYLYC

SEQ ID NO: 8971 - protein, 92 aa, Zea mays
  Coding DNA Sequence Number=SeqID_2656
  Subcellular localization annotation: CTP_CleavageSite=61; ConfidenceScore=5.49e-01
PTILVSLLLLSCSASSDASLFVLGKSAGVSKIRTSSTPVVPFSVALHTVGDSAALLDHLCRQTSLTQDHAKKDIGLKPSPNRWDRSTPIEAR

SEQ ID NO: 8972 - protein, 75 aa, Zea mays
  Coding DNA Sequence Number=SeqID_2658
  Gene Ontology: Mol. function=transferase activity, transferring glycosyl groups; Biological process=lipopolysaccharide biosynthetic process
  Homolog annotation: Hit_ID=Q8D1S3; Match level="QueryCoverage=100%, HitCoverage=22%, E-value=2e-32, Identity=85%"; Hit description =Heptosyl transferase I
MHVLIVKTSSMGDVLHTLPALTDAMQAIPGIRFDWVVQENFAQIPGWHPAVDKVLPVAICRWRKHWFGSQQREER

SEQ ID NO: 8973 - protein, 201 aa, Zea mays
  Coding DNA Sequence Number=SeqID_2659
  Gene Ontology: Mol. function=motor activity; Cellular component=cell outer membrane; Biological process=ciliary or flagellar motility
  Homolog annotation: Hit_ID=A9ACW5; Match level="QueryCoverage=78%, HitCoverage=46%, E-value=2e-78, Identity=95%"; Hit description =OmpA/MotB domain protein
  Pfam annotation: Domain name=OmpA; Domain location=43-141; Score =96.1; E_value=1.1e-25; Accession=PF00691.11; Description=OmpA family
LPIKLMAAIEANPTLRFIIQQIRIDSTLRGLRIEIVDTQKRPMFAMSSDHVEPYMRDILREIGKTLNDVPNRIIVQGHTDAVPYAGGEGGYSNWELSADRANASRRELITGGMDEAKVLRVLGLASTQNLNKADPLDPENRRISVIVLNRKSEDALMRDDATTTTLSADAAGSKQLAQQLGGAAPAARPALANAVAVAPKP

SEQ ID NO: 8974 - protein, 83 aa, Zea mays
  Coding DNA Sequence Number=SeqID_2660
  Gene Ontology: Mol. function=protein serine/threonine kinase activity; Biological process=protein amino acid phosphorylation
  Homolog annotation: Hit_ID=Q64GC0; Match level="QueryCoverage=73%, HitCoverage=35%, E-value=5e-20, Identity=80%"; Hit description =Putative LRR-like protein kinase 2
  Subcellular localization annotation: CTP_CleavageSite=59; ConfidenceScore=5.29e-01
LCLRVNLSLSLPSLSIISSLFVTKSFNRECQVLKRIRHRNLMRIVTACSLPDFKALVLPFMANGSLERCLYAGPPAELSLVQR

SEQ ID NO: 8975 - protein, 124 aa, Zea mays
  Coding DNA Sequence Number=SeqID_2661
RVLQFAPAPILLVEALADPLEELLSRVERLRLHLERSGLVLQRRGDTRICCSRHPCAASVVRHTLQARRSVVPITAATLGRHSGHLAFSRDGPLAQRPLSQLPARRVPSHPTATTTTTPAALHL

SEQ ID NO: 8976 - protein, 86 aa, Zea mays
  Coding DNA Sequence Number=SeqID_2663
  Homolog annotation: Hit_ID=A0HAL1; Match level="QueryCoverage=80%, HitCoverage=14%, E-value=7e-14, Identity=50%"; Hit description =Putative uncharacterized protein precursor
MTETTLARHGLALSLLLMVAAPGVALAEPADVERLGKDLTCVGADPSGNADGSIPPFSGKWLGVPPHVAFKGTGQHPVDPYPDEKP

SEQ ID NO: 8977 - protein, 205 aa, Zea mays
  Coding DNA Sequence Number=SeqID_2664
GDAIHHLTIAAPLPLLRSLVSVHRRTIACLRAPAVVGASTAYIFFIGEAIHHLTIAAPLPLLRSLVSPCTGAPSLVSVQFARHHGHNHRPGPPRRGTRSSPGAAPDAVRGRSRPPEAACQAQPRRLRREVGRAQDGHDQAGQHTSSMLGLVKPSSSRQQQRPTQERDSAAQARPSRLRWAMGRAQQDDHPIPSFIVILFTHVFFS

SEQ ID NO: 8978 - protein, 116 aa, Zea mays
  Coding DNA Sequence Number=SeqID_2666
HGQRRRGRPERAEHARDCRSGRELRPQNARACEPRALARRRGLRVRSTEAHTPDGGAGDARGARREARRSGGRERGSAGTGRNGPRQERGEPGDREGDNSPGSEQGRQERTPGDGH

SEQ ID NO: 8979 - protein, 113 aa, Zea mays
  Coding DNA Sequence Number=SeqID_2668
  Gene Ontology: Mol. function=urocanate hydratase activity; Cellular component=cytoplasm; Biological process=histidine catabolic process
  Homolog annotation: Hit_ID=A1V618; Match level="QueryCoverage=70%, HitCoverage=14%, E-value=6e-39, Identity=91%"; Hit description =Urocanate hydratase
MDGVEPCLVLHRRTWSQGVVASVANLWHPGSLVLNHPKHIDPRLDPTRTIRAPRGSEKVCKTWLAEAAYRMIQNNLDPEVAEHPHALVVYGGIGRAARNWECYDQILASLKDL

SEQ ID NO: 8980 - protein, 84 aa, Zea mays
  Coding DNA Sequence Number=SeqID_2669
  Gene Ontology: Mol. function=structural constituent of ribosome; Cellular component=cytosolic small ribosomal subunit; Biological process=negative regulation of transcription, DNA-dependent
  Homolog annotation: Hit_ID=P62263; Match level="QueryCoverage=98%, HitCoverage=54%, E-value=4e-24, Identity=73%"; Hit description=40S ribosomal protein S14
  Pfam annotation: Domain name=Ribosomal_S11; Domain location=1-80; Score=17.9; E_value=1.6e-06; Accession=PF00411.9; Description =Ribosomal protein S11
WSPYAAMLAAQDVAQRCKELGIPALPIKVWWNWEATRPKTPGPGAQFALRVFARFGMKIGRIEDVTPVPPDSPPKKGGRRERSL

SEQ ID NO: 8981 - protein, 174 aa, Zea mays
  misc_feature (73)..(73): Xaa can be any naturally occurring amino acid
  misc_feature (136)..(136): Xaa can be any naturally occurring amino acid
  misc_feature (154)..(154): Xaa can be any naturally occurring amino acid
  Coding DNA Sequence Number=SeqID_2670
  Gene Ontology: Mol. function=protein binding; Cellular component =integral to membrane; Biological process=protein amino acid phosphorylation
  Homolog annotation: Hit_ID=A3AYI5; Match level="QueryCoverage=100%, HitCoverage=19%, E-value=4e-39, Identity=52%"; Hit description =Putative uncharacterized protein
  Pfam annotation: Domain name=LRR_1; Domain location=108-130; Score =19.2; E_value=0.016; Accession=PF00560.23; Description=Leucine Rich Repeat
  Pfam annotation: Domain name=LRR_1; Domain location=30-49; Score =11.8; E_value=2; Accession=PF00560.23; Description=Leucine Rich Repeat
  Pfam annotation: Domain name=LRR_1; Domain location=6-28; Score=7.5; E_value=12; Accession=PF00560.23; Description=Leucine Rich Repeat
  Pfam module annotation: Pfam domain module=LRR_1::LRR_1::LRR_1; Domain location=108-130::30-49::6-28
LQGLVKYQSLDISWNKLNGNIPPWLGNLMNLLYLDLSNNSFSGVLPMSFTWMRILVPTNGLNEQSPTEGLPLXFKKNSTSKVLQYNQSQQLPTFFVGPILSSFGHPVNLHVLDLSWNNISGPIPYELSNMASFETXDLNGSIPSSLTKLNFLSXFAVSYSNVWTVIKQGSHRNT

SEQ ID NO: 8982 - protein, 78 aa, Zea mays
  Coding DNA Sequence Number=SeqID_2671
  Gene Ontology: Cellular component=integral to membrane; Biological process=transport
  Homolog annotation: Hit_ID=A6T6Q7; Match level="QueryCoverage=100%, HitCoverage=26%, E-value=8e-16, Identity=56%"; Hit description =Putative transmembrane subunit
PAAVAMGSLIASVIFVPLGLTFAAPGIWQWEILPLALLIALLSSAIPYSLEMMALTRLPARIFGTLMSLEPTMAALSG

SEQ ID NO: 8983 - protein, 139 aa, Zea mays
  Coding DNA Sequence Number=SeqID_2672
DHRPTATTVGDRSESSTTKGTPTPIRSMSNDTAAAAAAGTPTNGSCHAKAASGHHNPRQGHDRGAHAPGHDTPTAAPNDGATGNAALTPGKAGDRRQRTTPTNPCINNSEAGTPAGHPCTQNLDQHATERATEASPKGN

SEQ ID NO: 8984 - protein, 140 aa, Zea mays
  Coding DNA Sequence Number=SeqID_2674
  Gene Ontology: Mol. function=transferase activity, transferring nitrogenous groups; Cellular component=intracellular; Biological process=regulation of transcription, DNA-dependent
  Homolog annotation: Hit_ID=A9IS69; Match level="QueryCoverage=90%, HitCoverage=25%, E-value=8e-34, Identity=57%"; Hit description =Transcriptional regulator, GntR-family
MPLPAQASDDSADWPVSARAAGLHSLHRLSSQELALRPSTPALAHFPLAQWRRALNQTAQQAQLLGYGDPLGELALREALAQHLALARGVRCAPQQIVITEGAQQALTLCVALLTNRGDTGWVEEPGYRGAKAAMRLGDL

SEQ ID NO: 8985 - protein, 142 aa, Zea mays
  misc_feature (93)..(93): Xaa can be any naturally occurring amino acid
  Coding DNA Sequence Number=SeqID_2675
  Gene Ontology: Cellular component=chloroplast
  Homolog annotation: Hit_ID=A2ZY41; Match level="QueryCoverage=52%, HitCoverage=15%, E-value=5e-21, Identity=68%"; Hit description =Putative uncharacterized protein
  Subcellular localization annotation: CTP_CleavageSite=60; ConfidenceScore=5.00e-01
MQNGSGGGGGLAAGVRLHRWTAHQWQQKCFTAAAPADARARRRSWRAFARPRRSDHRECEAATETSTKETYVLMEPGMDEAFVSREELEESLXKNWPVDTLSLDLARFGMVDEAVSYLVRSVCVLEIDGDVGSVEWYQVQLD

SEQ ID NO: 8986 - protein, 179 aa, Zea mays
  Coding DNA Sequence Number=SeqID_2676
  Subcellular localization annotation: CTP_CleavageSite=32; ConfidenceScore=5.28e-01
LLSFWGRFRPASLFASLFLLAPGRCAAFALVLVSSPWPSGCCVVLAVLWLRLHVFHRVVVPFVCPAGSFAPFLMSGLLLAARRRPLAPSPCACGSSAFVVGVLSSLVWFLLLSSRPPGGSSSRLVGSPCGRLYRRLAPPRPLVPPLSAAGSLDNSEHDPRACFSRSCLLWLWRAPPLFG

SEQ ID NO: 8987 - protein, 61 aa, Zea mays
  misc_feature (5)..(5): Xaa can be any naturally occurring amino acid
  Coding DNA Sequence Number=SeqID_2678
VRAFXHLASSFPFSAMDSLRLYQHRWLVYSFFSPILNNLIVVSITVLLSLRKKYFSAQRVL

SEQ ID NO: 8988 - protein, 90 aa, Zea mays
  Coding DNA Sequence Number=SeqID_2680
  Gene Ontology: Mol. function=DNA binding; Cellular component=nucleus; Biological process=regulation of transcription
  Homolog annotation: Hit_ID=Q2QZJ8; Match level="QueryCoverage=48%, HitCoverage=15%, E-value=3e-09, Identity=59%"; Hit description =Expressed protein
NSAASLGKGVRVIGVAGAPGGPTVSRKQIGRHIEPYLPRRTANEINNYWKTRLHKHTKHVNCHVSNKRYKDDMRYLCDAYLLDATVTVDD

SEQ ID NO: 8989 - protein, 77 aa, Zea mays
  Coding DNA Sequence Number=SeqID_2681
ACHHVHKQGRSTVAPGDNSGRRSEGGGQGQGTFRWVVAQRDREPTDSRLAAHDEPTAPGWPSLICVRGDMAHLNTRN

SEQ ID NO: 8990 - protein, 122 aa, Zea mays
  Coding DNA Sequence Number=SeqID_2682
  Gene Ontology: Mol. function=oxidoreductase activity, acting on CH-OH group of donors; Cellular component=plasma membrane; Biological process=electron transport
  Homolog annotation: Hit_ID=A0GD17; Match level="QueryCoverage=72%, HitCoverage=14%, E-value=5e-13, Identity=49%"; Hit description =Glucose-methanol-choline oxidoreductase
KLDAPLASPGARPSFAEWVKQHNVPYLLGPITKKEVDVVVCGLGWSGSLMSIELALAGLDVCALELGGERDYLDFAYPKPADEDAYDVRNRVFATPKEVAVTAPHDMDHTALPPRLWGEKGP

SEQ ID NO: 8991 - protein, 131 aa, Zea mays
  misc_feature (49)..(49): Xaa can be any naturally occurring amino acid
  misc_feature (90)..(90): Xaa can be any naturally occurring amino acid
  Coding DNA Sequence Number=SeqID_2683
  Gene Ontology: Mol. function=transferase activity, transferring phosphorus-containing groups; Cellular component=integral to membrane; Biological process=two-component signal transduction system (phosphorelay)
  Homolog annotation: Hit_ID=Q8GMB7; Match level="QueryCoverage=100%, HitCoverage=14%, E-value=1e-26, Identity=51%"; Hit description =Sensor protein
  Pfam annotation: Domain name=HATPase_c; Domain location=1-118; Score =64.7; E_value=3e-16; Accession=PF02518.16; Description=Histidine kinase-, DNA gyrase B-, and HSP90-like ATPase
QQILINLIGNAIKFTERGHIDLRVELRHFSITRAELEIQVHDTGIGIFXQQQLQLFQAFCQADANILRRHGGTGFGLVNTQKLVHEIGGXIAFHNRQNQGSPFLGQGHLDFHPKAPANPSKLDHLPPPPVG

SEQ ID NO: 8992 - protein, 86 aa, Zea mays
  Coding DNA Sequence Number=SeqID_2684
  Gene Ontology: Mol. function=oxidoreductase activity; Biological process=metabolic process
  Homolog annotation: Hit_ID=A6T9B7; Match level="QueryCoverage=100%, HitCoverage=23%, E-value=4e-25, Identity=65%"; Hit description =Putative NADH:flavin oxidoreductase/NADH oxidase
MSLLFSATQLGELSLENRIVIAPMCQYSAEEGQATAWHRIHLGQLALSGAGLLIIEATAVEAIGRITPGDLGLWDDATEAALASVL

SEQ ID NO: 8993 - protein, 75 aa, Zea mays
  Coding DNA Sequence Number=SeqID_2685
YSITGRETSSTQAFYNSRNCQTICELRNQVRKQLFAYITIEPFGFFSSHAHRTSRCTRTNTHTRVLVVHLMCECV

SEQ ID NO: 8994 - protein, 76 aa, Zea mays
  Coding DNA Sequence Number=SeqID_2687
  Gene Ontology: Mol. function=transferase activity
  Homolog annotation: Hit_ID=Q5ZCH7; Match level="QueryCoverage=86%, HitCoverage=12%, E-value=9e-20, Identity=69%"; Hit description=O -acetyltransferase-like
  Pfam annotation: Domain name=Cas1p; Domain location=1-77; Score= -78.1; E_value=0.00022; Accession=PF07779.2; Description=Cas1p-like protein
CDRTDIFPESKKSYNRDLFLFLYILLIIASTLTSLKKHHEKSAFSGKSILYLNRHQTEEWKGWMQVSDFASLIYFS

SEQ ID NO: 8995 - protein, 216 aa, Zea mays
  Coding DNA Sequence Number=SeqID_2688
  Homolog annotation: Hit_ID=A7Q9M8; Match level="QueryCoverage=37%, HitCoverage=8%, E-value=6e-09, Identity=42%"; Hit description =Chromosome chr5 scaffold_67, whole genome shotgun sequence
HEWLDHSADTDDSVLTSMSGCTKLAELHLRGINFRGRIPDALFDVGLETLNVSSHALSGVLPLGSTRLAEMLQSVHQLTCGILTEMSLFFKLRVDLYCAIPADLCESVTQGDIPVGEDDPPDNPTRFILPTDAPNAPARTNSGVVDDSVFVIAELTGYDESKLHATSVLAVMYGAHTASCTMPDPTLDAHFANKRRMRCSRNGTSTAGAALEFDPD

SEQ ID NO: 8996 - protein, 100 aa, Zea mays
  Coding DNA Sequence Number=SeqID_2689
RLRQDGWAGDAMLYVNVELVGVDTRPHIERALSFGEKPRTSMVPPQLPTTRDGRKSLEAATYHDVLDLKQVGLRCTEYRNADYRRINLNYKSSHVISQGS

SEQ ID NO: 8997 - protein, 89 aa, Zea mays
  Coding DNA Sequence Number=SeqID_2690
MDGGEGDHGRAEDQIIGNCSRYHASVVMPLCAVAGSPCHLHSMSSRGDGARELWAGQAMVASARLLGRHKMAIGVGRRWLDRWVHIARA

SEQ ID NO: 8998 - protein, 172 aa, Zea mays
  Coding DNA Sequence Number=SeqID_2692
  Gene Ontology: Mol. function=glycerol-3-phosphate dehydrogenase activity; Cellular component=glycerol-3-phosphate dehydrogenase complex; Biological process=glycerol-3-phosphate metabolic process
  Homolog annotation: Hit_ID=Q1M356; Match level="QueryCoverage=87%, HitCoverage=25%, E-value=1e-33, Identity=48%"; Hit description =Putative glycerol-3-phosphate dehydrogenase
MVYFENQEARVCLMFPWFGKVLVGSPDIRVDDPEGGVCEAEDQIYILESLRFVFPDIVVPASAVVYTFWGVRPLPASEAKVNGQISRNLSLVLLPPDHARAWSTLCLVVGKWTTFRRFGEEAADRVLRLLGKKRRVSSSDLPIGAARDFPAPSAQPKGTVRWHSNMTFRWRA

SEQ ID NO: 8999 - protein, 104 aa, Zea mays
  Coding DNA Sequence Number=SeqID_2693
  Gene Ontology: Mol. function=Rab GTPase activator activity; Cellular component=intracellular; Biological process=regulation of Rab GTPase activity
  Homolog annotation: Hit_ID=A2Y5J3; Match level="QueryCoverage=80%, HitCoverage=10%, E-value=3e-25, Identity=76%"; Hit description =Putative uncharacterized protein
MPSFHSNCSFYLFLSFCFCLADELETALMEMVKQDNRRQLSAKVEQFEQEISEFREALSDKQEQEQAMFQVLMRVEQELKIAEEARISAEQDAAAQRYAANVLQ

SEQ ID NO: 9000 - protein, 171 aa, Zea mays
  Coding DNA Sequence Number=SeqID_2694
  Homolog annotation: Hit_ID=Q0SCH0; Match level="QueryCoverage=74%, HitCoverage=80%, E-value=4e-48, Identity=71%"; Hit description =Putative uncharacterized protein
  Pfam annotation: Domain name=AHSA1; Domain location=50-118; Score =3.5; E_value=0.077; Accession=PF08327.1; Description=Activator of Hsp90 ATPase homolog 1-li
DAIQQQIGYEIIRGPGGTAWLRLGVFALTCAVISALVINRRLPTASRDIAAPAAEIFELIADPAQQPRWDGNDNLAEAPAGQRVHAVGDVFVMGLTVGATRENHVVEFVEGRRIAWKPSEPGLPQPGHLWRWELEPIDDGHTHVTHTYDWTALTDEKRLNRARQTSADWLQ

SEQ ID NO: 9001 - protein, 157 aa, Zea mays
  Coding DNA Sequence Number=SeqID_2695
  Subcellular localization annotation: CTP_CleavageSite=32; ConfidenceScore=5.66e-01
CMPAAARRRALTPSRLPAFRRSGFPLPSPFVRCSAQPGGHMPTSLIACSVRLSAVLPQCLLRGAAGSRAIAWRLAPASSAPQHEFKIEGIQPIRESSVRGRGVPGLGDSGLLPETLRKPSRSSGAAGINAAALAADSVGVGARKRTGVMVGNRAGVC

SEQ ID NO: 9002 - protein, 108 aa, Zea mays
  Coding DNA Sequence Number=SeqID_2697
  Gene Ontology: Mol. function=cycloeucalenol cycloisomerase activity; Cellular component=integral to membrane
  Homolog annotation: Hit_ID=Q9M643; Match level="QueryCoverage=79%, HitCoverage=30%, E-value=2e-28, Identity=72%"; Hit description =Cycloeucalenol cycloisomerase
HIFFSLLDRCAEAKLPSAALKNVPHTTFLLTHACFLFYHMASNMTLRRLRHSTAHLPQSICWLFEAAWILALSYFIAYLETLAIANVCCSLYLTSTLYSNVKCCISLV

SEQ ID NO: 9003 - protein, 78 aa, Zea mays
  misc_feature (30)..(30): Xaa can be any naturally occurring amino acid
  Coding DNA Sequence Number=SeqID_2698
  Gene Ontology: Mol. function=actin binding; Cellular component =cytoskeleton; Biological process=cytoskeleton organization and biogenesis
  Homolog annotation: Hit_ID=A3AX53; Match level="QueryCoverage=85%, HitCoverage=7%, E-value=4e-18, Identity=61%"; Hit description =Putative uncharacterized protein
  Subcellular localization annotation: CTP_CleavageSite=69; ConfidenceScore=5.33e-01
NLVKNWDGTKSLVHGRSYQRKLGVLKGGAXPTVDKPNRRSPAFTGRSSGLDKSHRSRNMSTSPHRPRVRGKASSPQIW

SEQ ID NO: 9004 - protein, 51 aa, Zea mays
  misc_feature (18)..(18): Xaa can be any naturally occurring amino acid
  misc_feature (29)..(29): Xaa can be any naturally occurring amino acid
  misc_feature (32)..(32): Xaa can be any naturally occurring amino acid
  Coding DNA Sequence Number=SeqID_2699
  Gene Ontology: Cellular component=chloroplast
  Homolog annotation: Hit_ID=P03938; Match level="QueryCoverage=68%, HitCoverage=26%, E-value=3e-09, Identity=77%"; Hit description =Uncharacterized protein ycf68
LFLVSCYKMEHLTMHLHXPRTTRSPLPFXGDXGIIPFNTFFHYRSLLSLDT

SEQ ID NO: 9005 - protein, 122 aa, Zea mays
  Coding DNA Sequence Number=SeqID_2700
  Gene Ontology: Mol. function=NADH dehydrogenase (ubiquinone) activity; Cellular component=integral to membrane; Biological process=ATP synthesis coupled electron transport
  Homolog annotation: Hit_ID=A1T332; Match level="QueryCoverage=100%, HitCoverage=12%, E-value=2e-40, Identity=64%"; Hit description=NADH dehydrogenase
  Pfam annotation: Domain name=Oxidored_q1_N; Domain location=51-115; Score=11.9; E_value=0.0009; Accession=PF00662.11; Description=NADH -Ubiquinone oxidoreductase (complex
MLTVLYVHAIATVLAPLLVRRWGRRAFYPLALAPAGSLIWLASNWPGTGEQTLHIDWVPQLSMDITLRLDSLSAIMSVLVLGVGTLVLVYCAEYFHHADGHTENRLPSFAAELVAFSGAMFG

SEQ ID NO: 9006 - protein, 261 aa, Zea mays
  Coding DNA Sequence Number=SeqID_2701
  Gene Ontology: Mol. function=transporter activity; Cellular component= periplasmic space; Biological process=transport
  Homolog annotation: Hit_ID=UPI00005FA4A6; Match level="QueryCoverage =98%, HitCoverage=49%, E-value=4e-83, Identity=60%"; Hit description =COG4166: ABC-type oligopeptide transport system, periplasmic component
QQALGDEVKVSPLLCTFYYEINNKKAPFDDVRVRSALKLTLDRDIIAQKIMGQGQIPAYGLTPPFIHGISLNTPAWAQQTQAQRNAAAKQLLAEAGFNAQHPLRFTLLYNTSEQNKRQAIAAASMWQKNLGAQVTLQNQEWKTLLETRHQAQFDVVRATWCADYNEPSSFLNLLLSGSSINTAFYHSAAFDALMTQTLNTADDAQRAQLYQQAEQQLDRDSPIIPVYYRVSVRLVKPWVGGFSGKDPQDMLALKYYYIKKH

SEQ ID NO: 9007 - protein, 217 aa, Zea mays
  misc_feature (84)..(84): Xaa can be any naturally occurring amino acid
  misc_feature (95)..(95): Xaa can be any naturally occurring amino acid
  Coding DNA Sequence Number=SeqID_2702
  Gene Ontology: Mol. function=olfactory receptor binding; Cellular component=integral to membrane; Biological process=protein insertion into membrane
  Homolog annotation: Hit_ID=Q10S69; Match level="QueryCoverage=65%, HitCoverage=49%, E-value=2e-64, Identity=79%"; Hit description=HVA22- like protein i, putative, expressed
  Pfam annotation: Domain name=TB2_DP1_HVA22; Domain location=3-98; Score=57.8; E_value=3.8e-14; Accession=PF03134.9; Description=TB2DP1, HVA22 family
MIGSFITGMLTLVLGYAYPAYDCYKTVELNRPEVEQLRFWCQYWILLAFLTVLERVGETFVSWLPMYSEAKLAFIVYLWYPKTXGTAYVYESLLXPYIAKHETEIDRNLLELRTRAGDMAVLYFQRVTNYAQTRSYEILQYIASQSPTQRQAHQQQQRPTTATDSAGQPCTSTYSRTLRASDATTACPSPSSSHSTKAPSSSGSSWRSASCPATNCS

SEQ ID NO: 9008 - protein, 123 aa, Zea mays
  Coding DNA Sequence Number=SeqID_2703
DCWLTGQSGAPPDSPVIYSRTPPLNSREQPVDRRQPGAPDTVRGPYGREAVRERSDRAREHMVCAEEVEDFGHLNGAWPEAEVNPVLPEAKVDPALPPETGEGCLAAPAPTESGEPARAPMAE

SEQ ID NO: 9009 - protein, 241 aa, Zea mays
  Coding DNA Sequence Number=SeqID_2705
  Gene Ontology: Mol. function=oxidoreductase activity; Cellular component=extracellular region; Biological process=electron transport
  Homolog annotation: Hit_ID=Q4VDN6; Match level="QueryCoverage=97%, HitCoverage=40%, E-value=1e-56, Identity=47%"; Hit description =Ascorbate oxidase
  Pfam annotation: Domain name=Cu-oxidase; Domain location=3-105; Score= 105.9; E_value=1.2e-28; Accession=PF00394.12; Description=Multicopper oxidase
AAGCAPPALFTAVPGKTYRLRVGSLTSLSALNFAIEGHSMTVVEADGHYVRPVVVDSLYIYSGESYSVLLTADQDPSRNYWAASHVVARERNTTSAMAILSYAGNDPRAPPPTPRPEGPAWDDARPRLEQSRSLAVAHPDHVVPVPPRPDRALLLLNTQNRIGGHIRWAINGVSLAFPATPYLVSIKRGLRGAYDDQRPPPDTYDYRSYDIASPPTANGTVASKVYRLALGSVVDVVLQVD

SEQ ID NO: 9010 - protein, 161 aa, Zea mays
  Coding DNA Sequence Number=SeqID_2706
  Gene Ontology: Mol. function=prephenate dehydratase activity; Biological process=L-phenylalanine biosynthetic process
  Homolog annotation: Hit_ID=A7PQJ0; Match level="QueryCoverage=75%, HitCoverage=27%, E-value=7e-21, Identity=45%"; Hit description =Chromosome chr6 scaffold_25, whole genome shotgun sequence
  Subcellular localization annotation: CTP_CleavageSite=35; ConfidenceScore=5.44e-01
MDTAAVLDAFSAAPRHQLRPTAWCKSTRFTSQACRATAPFARADWQATCTILASNSTGGGGHNASSNTQPAPRVNGQKPPPALEATPTPTLDEMDLVPMSNLPRPLSISDLYPAPMHGSQLHVAYQGVPGAYSKAAAAKAYPGYDAIPCDQFEVAFQAIEL

SEQ ID NO: 9011 - protein, 74 aa, Zea mays
  Coding DNA Sequence Number=SeqID_2707
MLHRTVHLAQWNGRHQRLVRGKELFETRTTVLMSLFLLTMVAHQDGHEGRLPNALDQRSERRTGAPGERAKPDH

SEQ ID NO: 9012 - protein, 141 aa, Zea mays
  Coding DNA Sequence Number=SeqID_2709
  Gene Ontology: Mol. function=methylenetetrahydrofolate dehydrogenase (NADP+) activity; Cellular component=mitochondrion; Biological process=folic acid and derivative biosynthetic process
  Homolog annotation: Hit_ID=A0K8R4; Match level="QueryCoverage=100%, HitCoverage=49%, E-value=4e-63, Identity=87%"; Hit description =Bifunctional protein folD [Includes: Methylenetetrahydrofolate dehydrogenase (EC ...
  Homolog annotation: Hit description=1.5.1.5); Methenyltetrahydrofolate cyclohydrolase (EC 3.5.4.9)]
  Pfam annotation: Domain name=THF_DHG_CYH; Domain location=4-120; Score=199.6; E_value=7.6e-57; Accession=PF00763.13; Description =Tetrahydrofolate dehydrogenasecyclohydrolase, catalytic domain
MTALLIDGNALSKTLRAQAAERAAALTARGHQPGLAVILVGANPASEVYVRNKIKACEDNGFFSQKDAYPDTLSEADLLARIDELNRDPKIHGILVQLPLPAHIDSHKVIEAIAPEKDVDGFHVANAGALMTGKPLFRPCT

SEQ ID NO: 9013 - protein, 62 aa, Zea mays
  Coding DNA Sequence Number=SeqID_2710
HACRGLLIIGIGYYTRQHVQVVLNLIDLAGSERLAKCGSTGELRKSEPMICHRLQSLTLFLY

SEQ ID NO: 9014 - protein, 129 aa, Zea mays
  misc_feature (65)..(65): Xaa can be any naturally occurring amino acid
  Coding DNA Sequence Number=SeqID_2712
  Gene Ontology: Mol. function=nucleotide binding; Cellular component =nucleus; Biological process=small GTPase mediated signal transduction
  Homolog annotation: Hit_ID=A2ZVB3; Match level="QueryCoverage=73%, HitCoverage=23%, E-value=4e-35, Identity=76%"; Hit description =Putative uncharacterized protein
  Pfam annotation: Domain name=Ras; Domain location=9-83; Score=-97.6; E_value=0.053; Accession=PF00071.12; Description=Ras family
EPSSCLVSKTTLVKIFLIGEFEKKYERFENIPIVLCGNEVHLKNRQVKAKQVTFHKKKSLWYYDXSNYNFEKPFLYLAQKLVGDSNCLFVETRALAPLDVTIDIATQQQHEAELATATTQPLPGWCDSA

SEQ ID NO: 9015 - protein, 331 aa, Zea mays
  Coding DNA Sequence Number=SeqID_2713
  Gene Ontology: Mol. function=oxidoreductase activity; Cellular component=membrane; Biological process=electron transport
  Homolog annotation: Hit_ID=A2XM75; Match level="QueryCoverage=79%, HitCoverage=52%, E-value=7e-71, Identity=55%"; Hit description =Putative uncharacterized protein
  Pfam annotation: Domain name=p450; Domain location=1-332; Score= -159.6; E_value=0.00011; Accession=PF00067.12; Description=Cytochrome P450
  Subcellular localization annotation: CTP_CleavageSite=40; ConfidenceScore=5.43e-01
MVAFNGGTYSVPNPTASLTTCVFLSAHRVACMFPVICAEVCNMVGRLGRLAAGGGARVQLSQCLFELSLGVLMETIAQIKTFRSEACAADTDVSQEVSELTRISEEVMLYLGTTNLWDYLPFLRWFDVFGVRHKLMAAVRWRDVFLWLLIDGERRRMDDDGNGEKKSMTVVMLSLQRLKLEQYTDIMVMALCWDLFGAGTEITSITTEWATSLLLNHPEALKKAQTEINAVVGSSHLITADDMRCLGYLHCIINETLRMYSTAMLFLPHESVVDCKVDGYDGTLSASPWTMAWSMDSENVRNGSGRTYLHRKKQKQVHGSTDSLGKQRNQQ

SEQ ID NO: 9016 - protein, 94 aa, Zea mays
  Coding DNA Sequence Number=SeqID_2714
MRKTGEQLTESRRESASRVAWCSRPPSQVMKKPARRGAVAAVRSRDARTGDGAPVCSLAGLLARAGLLARAGLGPLKHRRLVVRAGLATLIGAA

SEQ ID NO: 9017 - protein, 122 aa, Zea mays
  Coding DNA Sequence Number=SeqID_2716
EVVGPALEKLNPTWVRACINGRRCGGPTGRGWQPRRGLLERSHHRPPFLGPPRPSPLPHARVERSAPEATGSAHASSPSVRPSVTRAAVRASESCNHRVAAGRICRSTEREVRTGSTMPPTL

SEQ ID NO: 9018 - protein, 87 aa, Zea mays
  Coding DNA Sequence Number=SeqID_2718
SFFCCIYVTDLVLAASKYLGSMKVISEASLAPAFCREDASNPGPLTFGSVEKLPTTTPGLSFAFMTCQSNRIPYFISPKSPVSFSFW

SEQ ID NO: 9019 - protein, 241 aa, Zea mays
  Coding DNA Sequence Number=SeqID_2720
  Gene Ontology: Mol. function=protein serine/threonine kinase activity; Cellular component=cell surface; Biological process =protein amino acid phosphorylation
  Homolog annotation: Hit_ID=A7P4Y8; Match level="QueryCoverage=65%, HitCoverage=44%, E-value=3e-54, Identity=64%"; Hit description =Chromosome chr4 scaffold_6, whole genome shotgun sequence
  Pfam annotation: Domain name=Pkinase; Domain location=108-242; Score=- 109.7; E_value=0.049; Accession=PF00069.15; Description=Protein kinase domain
  Pfam annotation: Domain name=Pkinase_Tyr; Domain location=106-240; Score=-119.3; E_value=4.2e-05; Accession=PF07714.7; Description =Protein tyrosine kinase
  Pfam module annotation: Pfam domain module=Pkinase::Pkinase_Tyr; Domain location=108-242::106-240
MNRLALGGIITSGIVIILVMKFVTRWIEVTREWQMERARLQALEMQAAAAAAGAPMIQQPAANGSAAPPYAIAANHVVEMGAVNRFLDDILREKPARFTPENLREFTRNYAERLGSGGFGVVYRGAFPNGVQVAVKILNSTLDRRAEEQFMAEVGTAGRTYHINLVRLYGFCFDATTKALVYEYLEKGSLDRVLFDLEGDALGFDALSGIVAGTARGVRYLHEECQHRIIHYDIKPGNVLL

SEQ ID NO: 9020 - protein, 112 aa, Zea mays
  misc_feature (73)..(73): Xaa can be any naturally occurring amino acid
  Coding DNA Sequence Number=SeqID_2721
  Subcellular localization annotation: CTP_CleavageSite=37; ConfidenceScore=5.26e-01
LPGRVALSLFPKRRISLPRARPHGVFPMARPLILPPMASSPAMLLLQLVSRPSLLLRRHDFLLDAPLHSAHHXHGRRMPSRPALCSNFCSAELLMARVLPPCSIPHAPGARA

SEQ ID NO: 9021 - protein, 78 aa, Zea mays
  misc_feature (36)..(36): Xaa can be any naturally occurring amino acid
  misc_feature (56)..(56): Xaa can be any naturally occurring amino acid
  Coding DNA Sequence Number=SeqID_2723
  Gene Ontology: Mol. function=phosphoglycolate phosphatase activity; Biological process=metabolic process
  Homolog annotation: Hit_ID=Q9FN41; Match level="QueryCoverage=84%, HitCoverage=13%, E-value=3e-15, Identity=60%"; Hit description =Similarity to enolase-phosphatase
LQRRKEEDRQRWPQRSVVLDIEGTTSSISFVTDVLXPYARDNVRTHLDATYFTREXQDDIALLRAQVLPVCIASLDSQ

SEQ ID NO: 9022 - protein, 81 aa, Zea mays
  Coding DNA Sequence Number=SeqID_2724
  Gene Ontology: Mol. function=protein serine/threonine kinase activity; Biological process=protein amino acid phosphorylation
  Homolog annotation: Hit_ID=A3B967; Match level="QueryCoverage=81%, HitCoverage=8%, E-value=1e-11, Identity=50%"; Hit description =Putative uncharacterized protein
FGDLLEPGRPEWAMDQGHRFAEGFLRWCELRGKGRPELGTGGVPEVKRLGALGEDKMDFCANINGRGGMDKFFFGFHREPL

SEQ ID NO: 9023 - protein, 102 aa, Zea mays
  Coding DNA Sequence Number=SeqID_2725
  Gene Ontology: Cellular component=integral to membrane
  Homolog annotation: Hit_ID=Q0TCM3; Match level="QueryCoverage=52%, HitCoverage=80%, E-value=1e-19, Identity=81%"; Hit description =Protein aaeX
  Pfam annotation: Domain name=DUF1656; Domain location=3-68; Score =55.2; E_value=2.3e-13; Accession=PF07869.3; Description=Protein of unknown function (DUF1656)
MSVLPVFVVFGLSFPPIFIELLVSLALFWLVKRVLTPSGIYDLVWHPALFNTALKIARYAITLLLVIIAVIIIFRAWVFYTEVAWTRERQFFADVVGISPDV

SEQ ID NO: 9024 - protein, 84 aa, Zea mays
  Coding DNA Sequence Number=SeqID_2726
MHDDGETGVETYDDTTRPKNEIRLSLSLGTKLRKWGRPLKKERIENNATPTATIIAKLRNASGSRQNKTLLSHPVLEGKPNANH

SEQ ID NO: 9025 - protein, 49 aa, Zea mays
  Coding DNA Sequence Number=SeqID_2727
  Gene Ontology: Mol. function=cation transmembrane transporter activity; Cellular component=integral to membrane; Biological process=cation transport
  Homolog annotation: Hit_ID=Q94IH5; Match level="QueryCoverage=95%, HitCoverage=11%, E-value=3e-16, Identity=89%"; Hit description =Ca2+/H+ antiporter
ISLSDFCIPFCVVIGWMMGQRMDLNFQLFETATLFITVLVVAFMLQVGS

SEQ ID NO: 9026 - protein, 72 aa, Zea mays
  Coding DNA Sequence Number=SeqID_2728
MDTEPGPGSGTGTVAPTAALTARRPICLWPREAHSAQRDSGLPTPGGRSLRSTCVRRHRQGSPPPRATTSTG

SEQ ID NO: 9027 - protein, 79 aa, Zea mays
  misc_feature (34)..(34): Xaa can be any naturally occurring amino acid
  misc_feature (44)..(44): Xaa can be any naturally occurring amino acid
  Coding DNA Sequence Number=SeqID_2730
  Gene Ontology: Mol. function=tetracycline:hydrogen antiporter activity; Cellular component=integral to membrane; Biological process=response to antibiotic
  Homolog annotation: Hit_ID=Q37953; Match level="QueryCoverage=79%, HitCoverage=61%, E-value=3e-11, Identity=50%"; Hit description=LacZ protein
KCGIKAHCTHASLTLDARIQRRDWKNRDVTQHSXFATHPYSTSXSNTKQALTDQTSQQLRNLNGKWCLMRNPSIRICAV

SEQ ID NO: 9028 - protein, 81 aa, Zea mays
  Coding DNA Sequence Number=SeqID_2731
GCRSRRCLEGLPGSQTGRAMPPFVRAMINRACGEVSRASIPEGTIEVGPTAGFSAAPTSGARGTEGAAHPRDVTRPEDQPP

SEQ ID NO: 9029 - protein, 81 aa, Zea mays
  Coding DNA Sequence Number=SeqID_2733
  Homolog annotation: Hit_ID=A3BQT2; Match level="QueryCoverage=76%, HitCoverage=13%, E-value=8e-31, Identity=96%"; Hit description =Putative uncharacterized protein
  Pfam annotation: Domain name=DUF266; Domain location=1-79; Score= -171.7; E_value=0.0041; Accession=PF03267.4; Description=Arabidopsis protein of unknown function, DUF266
PGMEEGRNCYADEHYLPTLFHMMDPAGIANWSVTYVDWSEGKWHPRSFRAKDVTYERLKNMTVCLPLFCHFNMINMILLCL

SEQ ID NO: 9030 - protein, 81 aa, Zea mays
  Coding DNA Sequence Number=SeqID_2734
  Homolog annotation: Hit_ID=A2Y6Z7; Match level="QueryCoverage=50%, HitCoverage=5%, E-value=1e-11, Identity=73%"; Hit description =Putative uncharacterized protein
CLGCIFGGQKGRSNDTSSAWPVTNPVMTCGIATKAGYPSNFVADPFLYVEVRQRHCCCLFCRSSPGWNSASRRCRDGLQIA

SEQ ID NO: 9031 - protein, 92 aa, Zea mays
  misc_feature (20)..(20): Xaa can be any naturally occurring amino acid
  Coding DNA Sequence Number=SeqID_2735
  Gene Ontology: Mol. function=nucleotide binding; Cellular component =protein complex; Biological process=protein polymerization
  Homolog annotation: Hit_ID=A2XYN7; Match level="QueryCoverage=50%, HitCoverage=9%, E-value=2e-09, Identity=69%"; Hit description =Putative uncharacterized protein
ADAWADAWASLADPSANIIXFGAADDDRLTGEIHVTIICTGSSQTFQKYLSADPKGARIVKSIETAATLAHKAAAAAVQPVPASSWSRKLFS

SEQ ID NO: 9032 - protein, 127 aa, Zea mays
  misc_feature (33)..(33): Xaa can be any naturally occurring amino acid
  Coding DNA Sequence Number=SeqID_2736
  Gene Ontology: Mol. function=oxidoreductase activity; Cellular component=membrane; Biological process=electron transport
  Homolog annotation: Hit_ID=O49859; Match level="QueryCoverage=100%, HitCoverage=24%, E-value=9e-49, Identity=80%"; Hit description =Cytochrome P450 82A4
MGLSLPFLNPNTIGGGSFNLPLGLVLEGPLKKXVNGTSKKAPTVGGAWPLLGHLPWLMGSKSPNKALGALAEKHGPWFTIKLGAKKALVVSDWEMARECFTTNDVAVSVRPKLLVAELMCYNNAMLL

SEQ ID NO: 9033 - protein, 325 aa, Zea mays
  Coding DNA Sequence Number=SeqID_2737
  Gene Ontology: Mol. function=N-acetyltransferase activity; Biological process=metabolic process
  Homolog annotation: Hit_ID=Q67UR2; Match level="QueryCoverage=100%, HitCoverage=73%, E-value=5e-54, Identity=43%"; Hit description=GCN5 -related N-acetyltransferase-like
  Pfam annotation: Domain name=Acetyltransf_1; Domain location=90-200; Score=32.4; E_value=1.6e-06; Accession=PF00583.14; Description =Acetyltransferase (GNAT) family
MDEAEPVKKTMLRVRGFDVERDLRAVEELERLCQVGLSGDQGSDPVADLDGGAKKTRSSKKKKGMSLYVEQIGDPFARVRHATDNVMLVAEYGEKDEVVGVIKACTRMVSRGKKQQSFSGSSKQFVKVACLLGLRVSPSHSALTGPSTIVSACRRLGVATELVRRAEAWCAARGAAYATMATTESNAASLALFTGRFAYAPFRRPAFLGRPVHRHRVRVPRAHRVLRLPPPLASAAYAALLPPSAAEFLPADLPALLNHKLTLGTYLAIQRGGPEEPARAPSFAMLSVWDATRSLRLRVGGAPALLRASLAAARALDRHVPWLQV

SEQ ID NO: 9034 - protein, 70 aa, Zea mays
  misc_feature (30)..(30): Xaa can be any naturally occurring amino acid
  Coding DNA Sequence Number=SeqID_2738
  Gene Ontology: Mol. function=protein binding; Cellular component =integral to membrane; Biological process=protein amino acid phosphorylation
  Homolog annotation: Hit_ID=A2Y611; Match level="QueryCoverage=98%, HitCoverage=34%, E-value=1e-14, Identity=58%"; Hit description =Putative uncharacterized protein
SYSEIFGNSISGPIPSEFGSLANLISLDLXQNSISGAIPAALENAKRLDHNRLKGPIPRELAGLPNLGIV

SEQ ID NO: 9035 - protein, 168 aa, Zea mays
  Coding DNA Sequence Number=SeqID_2739
  Gene Ontology: Cellular component=integral to membrane
  Homolog annotation: Hit_ID=A4W8X2; Match level="QueryCoverage=100%, HitCoverage=23%, E-value=7e-72, Identity=75%"; Hit description =Hypothetical membrane protein
  Pfam annotation: Domain name=BofA; Domain location=7-76; Score=-19.9; E_value=0.025; Accession=PF07441.2; Description=SigmaK-factor processing regulatory protein
  Pfam annotation: Domain name=DUF893; Domain location=1-168; Score= -438.9; E_value=0.048; Accession=PF05976.2; Description=Bacterial membrane protein of unknown function (DUF893)
  Pfam module annotation: Pfam domain module=BofA::DUF893; Domain location=7-76::1-168
LWLVPSIEGQLVLIVLSGVLFFAFRQIQYAQATLFITLLVLLCFNLLGEGFDVALPRVVDTLLGCGLAWLAVAFVWPDWRFRQLTTVADRTLNANCRYLDAILEQYHQGKDNRLAYRVARRDAHNADAELASVVSNISGELKQQPPLRENAFRLMCLNHSFLSYISAL

SEQ ID NO: 9036 - protein, 219 aa, Zea mays
  Coding DNA Sequence Number=SeqID_2740
  Gene Ontology: Mol. function=oxidoreductase activity; Cellular component=extracellular region; Biological process=response to oxidative stress
  Homolog annotation: Hit_ID=A2YDW8; Match level="QueryCoverage=86%, HitCoverage=59%, E-value=3e-86, Identity=82%"; Hit description =Putative uncharacterized protein
  Pfam annotation: Domain name=peroxidase; Domain location=1-188; Score= 250.0; E_value=5.1e-72; Accession=PF00141.13; Description=Peroxidase
ANSVPGYEVIDAIKARVEASCNATVSCADILALAARDAVNLLGGPSWTVYLGRRDARTASQSDANANLPGPGSSLATLVTMFGNKGLSARDMTALSGAHTVGQARCATFRNRIYNDGNINATFASLRQQTCPLAGGDAALAPIDVQTPEAFDNAYYKNLMARQGLFHSDQESFNGGSQDALVKKYSGKAAHVSPPTLPKAIVKDWRQSARFTAKQGKSQ

SEQ ID NO: 9037 - protein, 77 aa, Zea mays
  Coding DNA Sequence Number=SeqID_2741
  Gene Ontology: Mol. function=transcription regulator activity; Cellular component=nucleus; Biological process=regulation of transcription
  Homolog annotation: Hit_ID=Q5Z610; Match level="QueryCoverage=100%, HitCoverage=15%, E-value=8e-16, Identity=54%"; Hit description=Basic helix-loop-helix protein-like
MDAIFTLAAGPRARVLQRAAARIPGCLYICLWAPMIAGQQLPSRHLFCVDAWISNGSVARATAVFDEYRRALCGIVS

SEQ ID NO: 9038 - protein, 210 aa, Zea mays
  Coding DNA Sequence Number=SeqID_2742
  Homolog annotation: Hit_ID=A4WE01; Match level="QueryCoverage=36%, HitCoverage=41%, E-value=1e-17, Identity=48%"; Hit description =Putative uncharacterized protein
CSGTALTLVSSGSCVLLRWDENSNGRWEGVGHSESDYYGYRLRNGQLEMQRGVDECNSNGWERITDPAFLTLSTFRVEPGRHGGPPAGRADDDGGGAESVKQRGNSTLGMVVMLLLMGGLTLHAARTQLAQGMALVADEQQHQQDFWQAQAALTWGRQQNWPQAAGWQCQTALTDAWQSCLLRQEENHGLLLARGTGRALVLYQWVSLRN

SEQ ID NO: 9039 - protein, 106 aa, Zea mays
  misc_feature (1)..(1): Xaa can be any naturally occurring amino acid
  Coding DNA Sequence Number=SeqID_2743
XGRGGRFGGEESAAAPSDYTHSQLGQLAEVIRQAMAKEKHWIQGNTVTVTDSLGLARGGAANEREWPGVINRLVSAADKHLYVAKRNGRNQTSPAIAPRSMAHDVA

SEQ ID NO: 9040 - protein, 106 aa, Zea mays
  Coding DNA Sequence Number=SeqID_2745
  Gene Ontology: Mol. function=coproporphyrinogen dehydrogenase activity; Cellular component=cytoplasm; Biological process=porphyrin biosynthetic process
  Homolog annotation: Hit_ID=A7MMT6; Match level="QueryCoverage=73%, HitCoverage=17%, E-value=1e-28, Identity=71%"; Hit description =Putative uncharacterized protein
MEQLGIEMDEEEDKEAEEDMYRLLKGVSMSAMQLEWDPALIEKYNYAGPRYTSYPTALAFSDNFTADDFRRATERYPQRSLSLYIHIPFSHRLCYFCGCNKIVTRQ

SEQ ID NO: 9041 - protein, 204 aa, Zea mays
  Coding DNA Sequence Number=SeqID_2746
  Gene Ontology: Mol. function=electron carrier activity; Cellular component=integral to membrane; Biological process=cytochrome complex assembly
  Homolog annotation: Hit_ID=A6T9G5; Match level="QueryCoverage=100%, HitCoverage=52%, E-value=6e-49, Identity=53%"; Hit description =Putative cytochrome c biogenesis protein
  Pfam annotation: Domain name=DsbD; Domain location=1-198; Score=16.8; E_value=6.8e-07; Accession=PF02683.6; Description=Cytochrome C biogenesis protein transmembrane region
  Subcellular localization annotation: CTP_CleavageSite=17; ConfidenceScore=5.18e-01
MLTLLSPCTLPIIPFIFASVRGRRGQLLALLSGMVLMFTLVALLVSLTSHWVSQVTRIGRDLALLFLAIAALTLISTRIAQRVTRPFVALGNRLNDASQRRSGVLAALLAGLATGLLWSPCAGPVLGAILSLAVVGDHPLSVGVLLLAYGSGAALMLALLYFAGRSLVARLRPGLAMSARLRQAAGVLMLASVGVIVTGSQSQL

SEQ ID NO: 9042 - protein, 164 aa, Zea mays
  misc_feature (71)..(71): Xaa can be any naturally occurring amino acid
  misc_feature (122)..(122): Xaa can be any naturally occurring amino acid
  Coding DNA Sequence Number=SeqID_2747
  Gene Ontology: Mol. function=cellulose synthase (UDP-forming) activity; Cellular component=membrane; Biological process=cellulose biosynthetic process
  Homolog annotation: Hit_ID=Q84ZN6; Match level="QueryCoverage=96%, HitCoverage=14%, E-value=5e-67, Identity=80%"; Hit description =Probable cellulose synthase A catalytic subunit 8 [UDP-forming]
INKRRRNEQFRVIGSISGHLFAGLQGLLKELACIDTNLTRTYKASDEDGDVAELYMYKWTTLLIPPTTRRXSNLVGVAAGISYAINSGYQSWGPLFGKLFFAFWVIVHLYPFLKGLMGVRKXAPTIVVVWAILLASIFSLLWVRIDPFTTRVTGPDTQTCGINC

SEQ ID NO: 9043 - protein, 133 aa, Zea mays
  Coding DNA Sequence Number=SeqID_2748
  Homolog annotation: Hit_ID=Q851R4; Match level="QueryCoverage=33%, HitCoverage=13%, E-value=3e-13, Identity=84%"; Hit description =Putative uncharacterized protein OSJNBa0052F07.9
PAAAALGATWAATGDSIKASGFGLWVAESLRRLGWPDDTVVFALATLPVIELRGAIPLGIGTDPWLHRSSTIQRESCFLYYGPRSRESWSWMRLLLPPERKTIQCFWTCESSTTALILSLHDPTGNKEEHQWQ

SEQ ID NO: 9044 - protein, 82 aa, Zea mays
  Coding DNA Sequence Number=SeqID_2749
  Gene Ontology: Mol. function=DNA binding; Biological process =regulation of transcription
  Homolog annotation: Hit_ID=A0S5W3; Match level="QueryCoverage=100%, HitCoverage=24%, E-value=3e-19, Identity=59%"; Hit description =KANADI1-like protein
  Subcellular localization annotation: CTP_CleavageSite=23; ConfidenceScore=5.46e-01
GGPHNNRQNWASRAGARYMPKLRVSRRGMPPPRMRGTTTLHPRLVHPVNLFGGHNRATPKSVLKLMDVKDLTLAHVKSHLQV

SEQ ID NO: 9045 - protein, 151 aa, Zea mays
  Coding DNA Sequence Number=SeqID_2750
  Subcellular localization annotation: CTP_CleavageSite=49; ConfidenceScore=5.32e-01
QPRRPGTRTSHTHRHRPPARPRRRTPRNTGCRVSRNLLRPAARLGLPASCEGEDDEDGGGGGIIEAADSRLDLARNRSESWRFGGRVFVSVALACEEGFVRKQARCYGGRRASSAINKSGFTNGSTKEIDAHYPSGKAREVHTVACCAPLD

SEQ ID NO: 9046 - protein, 106 aa, Zea mays
  Coding DNA Sequence Number=SeqID_2752
  Gene Ontology: Mol. function=sequence-specific DNA binding; Cellular component=nucleus; Biological process=regulation of transcription, DNA-dependent
  Homolog annotation: Hit_ID=A2Z9P9; Match level="QueryCoverage=80%, HitCoverage=12%, E-value=2e-21, Identity=63%"; Hit description =Putative uncharacterized protein
LQAVRRALGEKDADDGGGVPAAAGMMAGKGETTPRLRVIDQCLRQHRAYQTGVVLESQPWRPQRGLPERAVSILRAWMFEHFLHPLGSNILPRALLYMTPLILSHI

SEQ ID NO: 9047 - protein, 157 aa, Zea mays
  Coding DNA Sequence Number=SeqID_2753
  Gene Ontology: Mol. function=phospholipase C activity; Biological process=intracellular signaling cascade
  Homolog annotation: Hit_ID=Q53KW8; Match level="QueryCoverage=89%, HitCoverage=18%, E-value=1e-52, Identity=75%"; Hit description =Expressed protein
KKYYFKKKTSSSHSRNGKDDVNHDSTIQPRSPLSRQSLTFDAIPTYHAGAFYEIDHDKLPPKSPIHLKSIRVVKVSECTNLDITVKFPSLQALRSFFSSYPAPGTGPELDERFVMSSNHAARILRRRVTEEELEGEVQQDSFWLIKPRLYDFAAPQQ

SEQ ID NO: 9048 - protein, 83 aa, Zea mays
  Coding DNA Sequence Number=SeqID_2754
  Gene Ontology: Mol. function=RNA-directed DNA polymerase activity; Biological process=RNA-dependent DNA replication
  Homolog annotation: Hit_ID=Q8W0Y2; Match level="QueryCoverage=73%, HitCoverage=3%, E-value=3e-18, Identity=75%"; Hit description =Putative gag-pol
MNRVPKPLRLPRRHGPPGVETPTSGVDLTFETKTSVVSLRHANPKQTDDASTLAKDMLGVSLVPETTVQSIPDAKWSPSVDQE

SEQ ID NO: 9049 - protein, 107 aa, Zea mays
  Coding DNA Sequence Number=SeqID_2755
  Gene Ontology: Mol. function=motor activity; Cellular component =flagellin-based flagellum; Biological process=ciliary or flagellar motility
  Homolog annotation: Hit_ID=Q7BTS9; Match level="QueryCoverage=83%, HitCoverage=36%, E-value=3e-27, Identity=62%"; Hit description=YhgA homolog
  Pfam annotation: Domain name=Transposase_31; Domain location=1-85; Score=-140.6; E_value=0.00045; Accession=PF04754.3; Description =Putative transposase, YhgA-like
DLLDRLAATLLAGHLTGQQLVSLINYLVQAGETDDAEAFVRNLAQRVPQHEDELMTIAQQLEQKGREKGRMEGKMEVARNLLAKGIPLESVRELTGLSDDDLKKIRH

SEQ ID NO: 9050 - protein, 145 aa, Zea mays
  Coding DNA Sequence Number=SeqID_2756
  Homolog annotation: Hit_ID=A2XXV8; Match level="QueryCoverage=81%, HitCoverage=9%, E-value=3e-51, Identity=83%"; Hit description =Putative uncharacterized protein
ARDFSNNKGFIYVFKKLEWQSLSVDLLPHPDMFADARFNSSSSQDDKRDDDGAKRMFFGGERFLEGISGEANITVQRTEQNNPLGLEVQLHITEAVCPALSEPGLRAFLRFMTGVSVCLNRGDIDPKAQQVYFCVLLILCCLQAC

SEQ ID NO: 9051 - protein, 230 aa, Zea mays
  misc_feature (34)..(34): Xaa can be any naturally occurring amino acid
  Coding DNA Sequence Number=SeqID_2757
  Gene Ontology: Mol. function=protein binding; Cellular component=cell wall; Biological process=protein amino acid phosphorylation
  Homolog annotation: Hit_ID=A5LGG6; Match level="QueryCoverage=99%, HitCoverage=48%, E-value=9e-54, Identity=34%"; Hit description=LRR binding protein
  Pfam annotation: Domain name=LRR_1; Domain location=108-130; Score =13.9; E_value=0.59; Accession=PF00560.23; Description=Leucine Rich Repeat
  Pfam annotation: Domain name=LRR_1; Domain location=132-151; Score =7.3; E_value=13; Accession=PF00560.23; Description=Leucine Rich Repeat
  Pfam annotation: Domain name=LRR_1; Domain location=157-179; Score =0.8; E_value=2.2e+02; Accession=PF00560.23; Description=Leucine Rich Repeat
  Pfam annotation: Domain name=LRR_1; Domain location=181-200; Score =3.0; E_value=85; Accession=PF00560.23; Description=Leucine Rich Repeat
  Pfam annotation: Domain name=LRR_1; Domain location=204-226; Score =13.3; E_value=0.94; Accession=PF00560.23; Description=Leucine Rich Repeat
  Pfam annotation: Domain name=LRR_1; Domain location=32-54; Score =11.5; E_value=2.3; Accession=PF00560.23; Description=Leucine Rich Repeat
  Pfam annotation: Domain name=LRR_1; Domain location=5-26; Score=1.7; E_value=1.5e+02; Accession=PF00560.23; Description=Leucine Rich Repeat
  Pfam annotation: Domain name=LRR_1; Domain location=58-80; Score=1.9; E_value=1.4e+02; Accession=PF00560.23; Description=Leucine Rich Repeat
  Pfam module annotation: Pfam domain module=LRR_1::LRR_1::LRR_1::LRR _1::LRR_1::LRR_1::LRR_1::LRR_1; Domain location=108-130::132-151::157- 179::181-200::204-226::32-54::5-26::58-80
VPRFQLRALMLSGCDLDNSIITGPNLLATQRRLXILDLSNNNLSGSIVPSWIFTDGSALAYLNIARNSLAGPLGSMWQHASVLLRVINMSANCFDGHPPGNISSVFPRLVVLDASHNLISGSIPPSLCDIAGMELVDLSSNKLSGEVPSCLFTKNSAPRVLKLSSNGLGGAVFGGASNLSVARAVYLDGNRFEGTLPGNLSAGGLDVIDLHDNRLSGRLDASFWHLPSLQ

SEQ ID NO: 9052 - protein, 244 aa, Zea mays
  Coding DNA Sequence Number=SeqID_2758
  Gene Ontology: Mol. function=[protein-PII] uridylyltransferase activity; Biological process=nitrogen compound metabolic process
  Homolog annotation: Hit_ID=A8GIE8; Match level="QueryCoverage=94%, HitCoverage=25%, E-value=1e-108, Identity=84%"; Hit description =[Protein-PII] uridylyltransferase
  Pfam annotation: Domain name=ACT; Domain location=169-231; Score =40.7; E_value=5.3e-09; Accession=PF01842.15; Description=ACT domain
  Pfam annotation: Domain name=ACT; Domain location=62-125; Score=37.7; E_value=4.1e-08; Accession=PF01842.15; Description=ACT domain
  Pfam module annotation: Pfam domain module=ACT::ACT; Domain location =169-231::62-125
LALLRMENLNEERLHHIWSRCRADYFLRHTPNQLAWHARHLINHDLSKPLVLVSPQATRGGTEIFIWSPDRPYLFAAVAGELDRRNLSVHDAQIFTSRDGMAMDTFIVLEPDGSPLAADRHPLIIQALEQAITQTQWVPPRTRRPSSRLKHFSVDTEVNFLPTHTDRRSYLELVALDQPGLLARVGEVFADLGVSLHGARISTIGERVEDLFILANSERRALDAEMRSVLQQRLTEVLNPNDKM

SEQ ID NO: 9053 - protein, 94 aa, Zea mays
  Coding DNA Sequence Number=SeqID_2759
  Homolog annotation: Hit_ID=A2X828; Match level="QueryCoverage=100%, HitCoverage=54%, E-value=3e-27, Identity=55%"; Hit description =Putative uncharacterized protein
  Pfam annotation: Domain name=C2; Domain location=8-94; Score=7.6; E _value=0.026; Accession=PF00168.20; Description=C2 domain
METREGVLELLLVSAEGLKHAHHHPRRSKRHYVTIECGDKIATSKITQGRGKKIWWNEKFRFALSDAERRELAKVTLTIMEMDRFTEDTSVGET

SEQ ID NO: 9054 - protein, 151 aa, Zea mays
  Coding DNA Sequence Number=SeqID_2760
  Gene Ontology: Mol. function=peptidase activity; Cellular component =mitochondrion; Biological process=response to toxin
  Homolog annotation: Hit_ID=A2WGH6; Match level="QueryCoverage=99%, HitCoverage=63%, E-value=4e-72, Identity=84%"; Hit description =Transcriptional regulator
  Pfam annotation: Domain name=FMN_bind_2; Domain location=1-148; Score= 209.2; E_value=1e-59; Accession=PF04299.3; Description=Putative FMN -binding domain
MYVPADFAESRPDVLRELIVQHPFGSLVTHGKSGLDANHIPFELLPGDGGLGELHAHVARANPVWQEVANGDEVLVIFRGGDAYISPNWYPSKHVAHRQVPTWNYVVVHAHGRITVRDDEKFVHGVVARLTRTHEASQPVPWKMADAPKDD

SEQ ID NO: 9055 - protein, 192 aa, Zea mays
  Coding DNA Sequence Number=SeqID_2761
  Subcellular localization annotation: CTP_CleavageSite=32; ConfidenceScore=5.04e-01
SRRGSPTSRGLTRRRAQWPTQRPSASRKCILAAGTEASPRRVAHAVLPASPPDPFHSPDATASPSCPAARLPPSLYILPSATAPPLSPQLTRRRRRERRILSLPVPAQMFLADKYRSLLPSSHQQPHSKPSRRRQQQQQLLQQEGEADRFGAARLGSLLPLPVSPLAELARATNSPHETTGMCYTAYPGVPP

SEQ ID NO: 9056 - protein, 53 aa, Zea mays
  Coding DNA Sequence Number=SeqID_2762
CMPADFELHGMLVQSPSGRFTSILSIGIGGSALGPQFVAEALAPDNPPLKVCP

SEQ ID NO: 9057 - protein, 47 aa, Zea mays
  Coding DNA Sequence Number=SeqID_2764
  Gene Ontology: Mol. function=aminoacyl-tRNA ligase activity; Cellular component=cytoplasm; Biological process=tRNA aminoacylation for protein translation
  Homolog annotation: Hit_ID=Q6K1T2; Match level="QueryCoverage=93%, HitCoverage=7%, E-value=1e-12, Identity=81%"; Hit description=Lysyl -tRNA synthetase
LYCEKDSLTEDQFEQLKAFIDIGDILGASGSIKKTEKGLLSLSVDSC

SEQ ID NO: 9058 - protein, 209 aa, Zea mays
  misc_feature (56)..(56): Xaa can be any naturally occurring amino acid
  misc_feature (110)..(110): Xaa can be any naturally occurring amino acid
  Coding DNA Sequence Number=SeqID_2765
  Gene Ontology: Mol. function=transcription factor activity; Cellular component=cytoplasm; Biological process=regulation of transcription, DNA-dependent
  Homolog annotation: Hit_ID=Q394W2; Match level="QueryCoverage=100%, HitCoverage=65%, E-value=1e-94, Identity=86%"; Hit description =Transcriptional regulator, LysR family
  Pfam annotation: Domain name=HTH_1; Domain location=9-69; Score=67.1; E_value=5.9e-17; Accession=PF00126.17; Description=Bacterial regulatory helix-turn-helix protein, lysR family
MDWTYRLRLRHLQVLLSLASTGNLSQSAAALATTQPALSKWLKELEEDVGLPLFEXRHARGLRPTAYGDALIEHARRVEAQLDVARDDMAALREGGSGLVTIGTSGVAAXADTVPLAVSQLLKRMPRAQVRLTESTMNQLMPQLARGELDIVVGRSGSASVDPHLHAEALYVDPVVFVARPDHALVGAASVGWDEVLAYSWIVWPSGTP

SEQ ID NO: 9059 - protein, 63 aa, Zea mays
  Coding DNA Sequence Number=SeqID_2766
  Homolog annotation: Hit_ID=A3C0A9; Match level="QueryCoverage=52%, HitCoverage=8%, E-value=2e-09, Identity=90%"; Hit description =Putative uncharacterized protein
MAVDLRKVVAGFLTLSMFVMLGNMIKHDHFSPVTEFLPNLKQFGEPMMKAALTLLCGPMDITQ

SEQ ID NO: 9060 - protein, 253 aa, Zea mays
  Coding DNA Sequence Number=SeqID_2767
  Gene Ontology: Mol. function=ATPase activity, coupled to transmembrane movement of substances; Cellular component=integral to membrane; Biological process=transport
  Homolog annotation: Hit_ID=P0AAG7; Match level="QueryCoverage=100%, HitCoverage=42%, E-value=1e-101, Identity=75%"; Hit description =Multidrug resistance-like ATP-binding protein mdlB
  Pfam annotation: Domain name=ABC_tran; Domain location=48-229; Score =174.1; E_value=3.7e-49; Accession=PF00005.17; Description=ABC transporter
  Pfam annotation: Domain name=Dynamin_N; Domain location=49-213; Score= -48.0; E_value=0.092; Accession=PF00350.13; Description=Dynamin family
  Pfam annotation: Domain name=MMR_HSR1; Domain location=47-170; Score=- 11.0; E_value=0.011; Accession=PF01926.13; Description=GTPase of unknown function
  Pfam annotation: Domain name=SMC_N; Domain location=35-233; Score= -113.9; E_value=0.0029; Accession=PF02463.9; Description=RecFRecNSMC N terminal domain
  Pfam module annotation: Pfam domain module=ABC_tran::Dynamin_N::MMR _HSR1::SMC_N; Domain location=48-229::49-213::47-170::35-233
MDAAQQGYGSDAQPLTSGRITLRDVSFAYRDNRDVLSHIDLEVPARGFVALVGHTGSGKSTLANLLMGYYPVTRGSIELDGRPLRQLTHDALRGSVAMVQQDPVVLADTLLANVRLGRDISEEDVWRALEKVQLAPLARAMRDGIHTRLGEQGNTLSVGQKQLLALARVLVSLPQILILDEATANIDSGTEQAIQQALRTLRQHSTLVVIAHRLSTITEADQILVLHRGQVVERGTHTELLAQQGRYWQMYQL

SEQ ID NO: 9061 - protein, 122 aa, Zea mays
  Coding DNA Sequence Number=SeqID_2768
DFENAVRRYRRALSSTGCWQTPFQVAVTRGTNLMAEPERGLFPTGGISRMSCWCCDREGQRELWPVEQPSSSGGRRHVVELDCGGWPAGRDRRSRRAMACGPVEQWRDSASRTHDDVWWWNC

SEQ ID NO: 9062 - protein, 92 aa, Zea mays
  Coding DNA Sequence Number=SeqID_2770
  Homolog annotation: Hit_ID=Q7XBE0; Match level="QueryCoverage=95%, HitCoverage=11%, E-value=4e-09, Identity=34%"; Hit description =Putative gypsy-type retrotransposon
GVLNQVAIHLKAQAAQVLVQISLSQWDPTILQKRIDDLKAANDAMTRWCFDAEERCARNQEELNQVNRFLDGARTMNSSLQSKLDMENKTHE

SEQ ID NO: 9063 - protein, 219 aa, Zea mays
  Coding DNA Sequence Number=SeqID_2771
  Gene Ontology: Mol. function=transferase activity, transferring phosphorus-containing groups; Cellular component=integral to membrane; Biological process=two-component signal transduction system (phosphorelay)
  Homolog annotation: Hit_ID=A7MPB1; Match level="QueryCoverage=100%, HitCoverage=22%, E-value=1e-61, Identity=56%"; Hit description =Sensor protein
PGGLPLVATITDENYRPLISSRRGGPGYSLDDLPDNSTWFGYLDGYRQLVLKKPLPPSSLNVVWSLSTDVLMDQLKLMLINALLLNILSALILFTLAWVFERRMFLPAEDNAHRLEEHEQFNRKIVASAPVGICILRTSDGTNILSNELAHNYLTLLTQEDRLRLNEIIGGQQVNFVDMLTGSNTNLQISFVHSRYRNENVAICVLVDVSARVRMEQSL

SEQ ID NO: 9064 - protein, 69 aa, Zea mays
  Coding DNA Sequence Number=SeqID_2772
  Gene Ontology: Mol. function=transporter activity; Cellular component= outer membrane-bounded periplasmic space; Biological process=transport
  Homolog annotation: Hit_ID=A8GB28; Match level="QueryCoverage=100%, HitCoverage=23%, E-value=3e-18, Identity=68%"; Hit description =Extracellular solute-binding protein family 3 precursor
MQIRKVALSLLLLGAAAGAAQAEDLTGTLKKINDSGVIVVGHRESSVPFSYYDNQQKVVGYSQDYSNAI

SEQ ID NO: 9065 - protein, 205 aa, Zea mays
  Coding DNA Sequence Number=SeqID_2773
  Gene Ontology: Mol. function=oxidoreductase activity; Cellular component=integral to membrane; Biological process=electron transport
  Homolog annotation: Hit_ID=Q8LGN4; Match level="QueryCoverage=99%, HitCoverage=38%, E-value=2e-84, Identity=75%"; Hit description =Cytochrome P450 monooxygenase CYP72A26
LLVYLQVLLWQAGRLLRQLWWQPRRLERALRAQGIRGTPYRFPAGDLREYSRLANKEAWSKPLPPRCHDIAHRVTPFLHRLVLEHGKTSMSWFGSTPRVTIVDPALAKDVLSSKFGHLEKLNFPALAKVMGDGLASHEGARWAKHRRILGPAFQLEKLKRMLPAFSACCQELVSRWAECLGPDGSCELDVWPELQNLTGDVISRT

SEQ ID NO: 9066 - protein, 132 aa, Zea mays
  misc_feature (98)..(98): Xaa can be any naturally occurring amino acid
  Coding DNA Sequence Number=SeqID_2774
  Homolog annotation: Hit_ID=A2XBN2; Match level="QueryCoverage=99%, HitCoverage=54%, E-value=3e-43, Identity=65%"; Hit description =Putative uncharacterized protein
  Pfam annotation: Domain name=Dabb; Domain location=36-124; Score =26.0; E_value=0.00013; Accession=PF07876.3; Description=Stress responsive AB Barrel Domain
SKVDDMQGSVSVDIDSRVKVHIISDKKMGEDFNYGVEFMLLVSFLKTASREATEDALASLDKLISQCSASIVQATCGCCLDRPDNEYSHAAVIRFPSXSEEYKDMWASKFRPIVERSLHLHFTVDPVGNQLM

SEQ ID NO: 9067 - protein, 156 aa, Zea mays
  misc_feature (49)..(49): Xaa can be any naturally occurring amino acid
  misc_feature (107)..(107): Xaa can be any naturally occurring amino acid
  Coding DNA Sequence Number=SeqID_2775
  Gene Ontology: Mol. function=transferase activity; Cellular component= chloroplast; Biological process=biosynthetic process
  Homolog annotation: Hit_ID=Q40028; Match level="QueryCoverage=96%, HitCoverage=30%, E-value=4e-56, Identity=71%"; Hit description=Beta -ketoacyl-ACP synthase
  Pfam annotation: Domain name=ketoacyl-synt; Domain location=1-156; Score=-80.9; E_value=0.005; Accession=PF00109.16; Description=Beta -ketoacyl synthase, N-terminal domain
HACGGISQMEAFGWSHYPTRIRGKIKSFSTDGGVGPKLVKPMVKNMQYXITAAKKALENAGITEEVMNEFEKSRCGVLIGSAMGGMNVHSDANEAMRVAYKKMNPFXVPLATTNMGAEILAMDLGRMGSNYSISTARATSNFCILDASNHIRKGEA

SEQ ID NO: 9068 - protein, 173 aa, Zea mays
  Coding DNA Sequence Number=SeqID_2776
  Gene Ontology: Mol. function=hydrolase activity; Biological process =pyrroloquinoline quinone biosynthetic process
  Homolog annotation: Hit_ID=P27504; Match level="QueryCoverage=98%, HitCoverage=55%, E-value=1e-70, Identity=73%"; Hit description =Coenzyme PQQ synthesis protein B
QHRALTPLEPFRVDVCASLQFTAIPILSNAPPYSPYRDRPLPGHNVALFIENTASGQTLLYAPGLGEPDAVIMPWLQKADCLLIDGTVWQDDELLTTGVGKNTGKAMGHLALAEEQGLMALLAALPARRKILIHINNTNPILNEHSPQRQFLTQQGIEVSWDGMAIHLQESAS

SEQ ID NO: 9069 - protein, 128 aa, Zea mays
  Coding DNA Sequence Number=SeqID_2777
  Gene Ontology: Mol. function=DNA-3-methyladenine glycosylase I activity; Biological process=response to DNA damage stimulus
  Homolog annotation: Hit_ID=P44321; Match level="QueryCoverage=61%, HitCoverage=42%, E-value=7e-14, Identity=50%"; Hit description=DNA-3- methyladenine glycosylase
  Pfam annotation: Domain name=Adenine_glyco; Domain location=1-102; Score=4.1; E_value=1.4e-10; Accession=PF03352.4; Description =Methyladenine glycosylase
ACLQNSGLIRHRGKLEAIINNAKALLALEATGEDFSRFIWSFVDNQPILHHYADYKLAPTTSEPAIALSKALKKRGFKFRVLALALLMSGSVALSGCTTNPYTGESQAGKSGIGAGLGAVLGAGVGVL

SEQ ID NO: 9070 - protein, 76 aa, Zea mays
  Coding DNA Sequence Number=SeqID_2778
  Homolog annotation: Hit_ID=A3CC78; Match level="QueryCoverage=67%, HitCoverage=16%, E-value=8e-08, Identity=49%"; Hit description =Putative uncharacterized protein
PYATTPGAAPPCCHRPTWDLIDEPTTVDATLPGLQYTHTKADGTLAILSVGDWSRRGQFNQTLVAQQMAVVGQKLD

SEQ ID NO: 9071 - protein, 155 aa, Zea mays
  Coding DNA Sequence Number=SeqID_2779
  Gene Ontology: Mol. function=transcription factor activity; Cellular component=nucleus; Biological process=regulation of transcription, DNA-dependent
  Homolog annotation: Hit_ID=A4W9Q7; Match level="QueryCoverage=98%, HitCoverage=62%, E-value=9e-52, Identity=62%"; Hit description =Putative transcriptional regulator, MerR family
SVLRHVRASKLRTKIATIGREHPDDALIDHVFVPVRQRLGLDQNTARTMCSLLDGALIDYVAFCLAGARKKAGKDALMIGWGVEDRTRIWLEAWRLAQQGWRIDVLAEPLDMPRPELFPGQHLFIWTGKKPTRRQLEQFEHWQAQGFSIHVHEPT

SEQ ID NO: 9072 - protein, 81 aa, Zea mays
  Coding DNA Sequence Number=SeqID_2780
  Gene Ontology: Biological process=cell division
  Homolog annotation: Hit_ID=A7MKL8; Match level="QueryCoverage=95%, HitCoverage=22%, E-value=2e-23, Identity=66%"; Hit description =Putative uncharacterized protein
  Pfam annotation: Domain name=SPOR; Domain location=3-72; Score=35.5; E_value=1.9e-07; Accession=PF05036.4; Description=Sporulation related repeat
VDLQLSGASKEASLNAWAKKQNLSGYHVYKTTRNGQPWYVLVSGAYATPAEAKRAVASLPAEVRAANPWVKPLSQVKKESQ

SEQ ID NO: 9073 - protein, 174 aa, Zea mays
  misc_feature (1)..(1): Xaa can be any naturally occurring amino acid
  Coding DNA Sequence Number=SeqID_2781
  Gene Ontology: Mol. function=sugar:hydrogen symporter activity; Cellular component=integral to membrane; Biological process =carbohydrate transport
  Homolog annotation: Hit_ID=Q8H6J2; Match level="QueryCoverage=94%, HitCoverage=25%, E-value=3e-86, Identity=94%"; Hit description =Putative sugar transporter protein
XHEHMNEHRDGNSDQQTRETYYAGEANNGDGLRASLLSQAANVEVNDTNTSFTSEGSSSYLRRHGTSVLAQEFMASIHDYDIEEEEEEIHRFALPHQSAPRDMESTGRHPFRHQIVRLSETADIKFKWWVLLQPGIRHALCYGMLIQALQQVRLCVIVDYVFSSAWIQQSTVGR

SEQ ID NO: 9074 - protein, 82 aa, Zea mays
  Coding DNA Sequence Number=SeqID_2782
LRVRWLICMRYAGQRQISCNPFSMEAVSVCNVLVDSVTPATSDVNVLGTTGVGAAVCFGQVSPIFSWHWLLTPSLWVFILTK

SEQ ID NO: 9075 - protein, 94 aa, Zea mays
  Coding DNA Sequence Number=SeqID_2784
EGSASRGSACREGDDDRAGVVVVVGFGSGVDADEGARRRLAPARSEYGERERGREREEGGRELGQGREGLEPVPFIERREGGGGMLGRRWSAGH

SEQ ID NO: 9076 - protein, 123 aa, Zea mays
  Coding DNA Sequence Number=SeqID_2786
  Gene Ontology: Mol. function=sugar:hydrogen symporter activity; Cellular component=integral to membrane; Biological process =carbohydrate transport
  Homolog annotation: Hit_ID=A2Y936; Match level="QueryCoverage=56%, HitCoverage=13%, E-value=7e-20, Identity=73%"; Hit description =Putative uncharacterized protein
AAARLREDPRGVSSMGSFLEEFFPDVYRRMKGDVRVSNYCKFDSQPLTLFTSSLYIAGLLTAMLLSSWFTARRGRRPSMVIGGAAFLAGAAVSGGAVNVYMAMTCADHCSDVVHHRSLPAGAF

SEQ ID NO: 9077 - protein, 49 aa, Zea mays
  Coding DNA Sequence Number=SeqID_2787
SARGQIAIERFSTSRAGWAAPPGVSMSRGQCMTLGCWPSCAPPTSPFVA

SEQ ID NO: 9078 - protein, 87 aa, Zea mays
  Coding DNA Sequence Number=SeqID_2789
QGQEPAQRLDVQRSFTGTPPRTRITYDDDHARGDATRQAYTDTSAFSAASDQLRYSVATVSLTPVMYTFMRSESGRLIIAHAVGSSK

SEQ ID NO: 9079 - protein, 187 aa, Zea mays
  Coding DNA Sequence Number=SeqID_2791
  Gene Ontology: Mol. function=oxidoreductase activity; Cellular component=integral to membrane; Biological process=sodium ion transport
  Homolog annotation: Hit_ID=A1FHR5; Match level="QueryCoverage=58%, HitCoverage=46%, E-value=9e-59, Identity=95%"; Hit description=NADPH- dependent FMN reductase
  Pfam annotation: Domain name=FMN_red; Domain location=59-187; Score =38.1; E_value=2.6e-08; Accession=PF03358.6; Description=NADPH -dependent FMN reductase
MPAASNNFELAIAVAIATFGLASPVAFATVIGPLVEVPVLISLVGVALWLKRRWFDQPSGALTQDRLLTEEAARLLEHFGAETRIFNPTGLPLADDVPDDHPIVKELRDLVLWSEGMVWCSPERHGAMTGVFKSQIDWIPLSMGAVRPTQGKTLAVMQVCGGSQSFNVVNQLRVLGRWMRMFTIPNQ

SEQ ID NO: 9080 - protein, 70 aa, Zea mays
  Coding DNA Sequence Number=SeqID_2792
  Homolog annotation: Hit_ID=A7MRF1; Match level="QueryCoverage=75%, HitCoverage=10%, E-value=5e-22, Identity=94%"; Hit description =Putative uncharacterized protein
QASHPLRDAKVVVEDIDDNPGFFRVRLYAIPHFQVEGMDVNLSLVSQMPKAKSGVMVSPQHFQQQVAYAA

SEQ ID NO: 9081 - protein, 76 aa, Zea mays
  Coding DNA Sequence Number=SeqID_2793
  Gene Ontology: Mol. function=sequence-specific DNA binding; Cellular component=nucleus; Biological process=regulation of transcription, DNA-dependent
  Homolog annotation: Hit_ID=Q10PR4; Match level="QueryCoverage=96%, HitCoverage=18%, E-value=5e-13, Identity=51%"; Hit description=HSF -type DNA-binding domain containing protein, expressed
GNVFTAPSALCDWDDMDIFGGGLEPILQQTEQDFQVDPPLTIEDYGYARPWLKQDCQLKAQQNCKNPQYADVITEA

SEQ ID NO: 9082 - protein, 124 aa, Zea mays
  Coding DNA Sequence Number=SeqID_2794
  Gene Ontology: Mol. function=transcription factor activity; Cellular component=intracellular; Biological process=regulation of transcription, DNA-dependent
  Homolog annotation: Hit_ID=A9R1I5; Match level="QueryCoverage=100%, HitCoverage=44%, E-value=2e-50, Identity=79%"; Hit description =Pyruvate dehydrogenase complex repressor
  Pfam annotation: Domain name=GntR; Domain location=11-74; Score=91.3; E_value=3.1e-24; Accession=PF00392.11; Description=Bacterial regulatory proteins, gntR fa
  Pfam annotation: Domain name=HTH_11; Domain location=18-73; Score =3.1; E_value=0.092; Accession=PF08279.2; Description=HTH domain
  Pfam module annotation: Pfam domain module=GntR::HTH_11; Domain location=11-74::18-73
MATSNIRHPMLSDAFEQQVKSLIMEGTLQPGKKLLPERELAKQFDVSRPSVREAIQSLKAKGLLLRRQGGGTFVQQNLWQSLSDPLVGLLAEHPESQFDLLETRQTMEGVAAYYAALRGTDEDL

SEQ ID NO: 9083 - protein, 82 aa, Zea mays
  Coding DNA Sequence Number=SeqID_2795
  Gene Ontology: Mol. function=amino acid-transporting ATPase activity; Cellular component=plasma membrane; Biological process=amino acid transport
  Homolog annotation: Hit_ID=Q98DA2; Match level="QueryCoverage=100%, HitCoverage=23%, E-value=2e-17, Identity=59%"; Hit description =Methionine import ATP-binding protein metN
MEVIKSVAHRVAVIDAGEIVEQGPVWQVFAHPQSALTRTLLPQLPENLAARLSEQREGEAIYSVHFAGVAAQGDLLTQFASA

SEQ ID NO: 9084 - protein, 141 aa, Zea mays
  Coding DNA Sequence Number=SeqID_2796
  Gene Ontology: Mol. function=alpha,alpha-trehalose-phosphate synthase (UDP-forming) activity; Cellular component=cytosol; Biological process=trehalose biosynthetic process
  Homolog annotation: Hit_ID=A7MEE9; Match level="QueryCoverage=99%, HitCoverage=28%, E-value=4e-54, Identity=69%"; Hit description =Putative uncharacterized protein
QTTGGLWFGWNGEISEFSGEEDEELTQIEQDGITYASFPLNQNDYDQYYCQFSNTVIWPAFHYRLDLVQYQREAWEGYCRVNTLLAQRLKPLIKPDDILWIHDYHLLPFAAELRKQGINNRIGFFLHIPFPTPEIFNALPP

SEQ ID NO: 9085 - protein, 72 aa, Zea mays
  Coding DNA Sequence Number=SeqID_2797
MTAPHPWLNKTGFSTCAETVLVLVDSVHRGAGLQECLRALEFAVSSFRGRSVLSERFGIQRGSSSQQDCDSN

SEQ ID NO: 9086 - protein, 74 aa, Zea mays
  misc_feature (43)..(43): Xaa can be any naturally occurring amino acid
  Coding DNA Sequence Number=SeqID_2799
  Gene Ontology: Mol. function=heat shock protein binding; Biological process=protein folding
  Homolog annotation: Hit_ID=Q9FEW7; Match level="QueryCoverage=81%, HitCoverage=18%, E-value=1e-08, Identity=54%"; Hit description=DnaJ like protein
  Pfam annotation: Domain name=DnaJ; Domain location=5-62; Score=31.2; E_value=3.7e-06; Accession=PF00226.21; Description=DnaJ domain
GGRLLLGIYRADDGDLKKAYRKLAIRCYPNKNATNKEAEAKFXDISVAYEVTRPSLSLSIYKQYFVYYLKKQKQ

SEQ ID NO: 9087 - protein, 115 aa, Zea mays
  misc_feature (9)..(10): Xaa can be any naturally occurring amino acid
  Coding DNA Sequence Number=SeqID_2800
  Gene Ontology: Mol. function=calcium ion binding; Cellular component =oxygen evolving complex; Biological process=photosynthesis
  Homolog annotation: Hit_ID=Q6EP57; Match level="QueryCoverage=85%, HitCoverage=43%, E-value=3e-45, Identity=92%"; Hit description =Putative Oxygen-evolving enhancer protein 3-2, chloroplast
  Pfam annotation: Domain name=PsbQ; Domain location=1-115; Score= -18.8; E_value=0.00039; Accession=PF05757.2; Description=Oxygen evolving enhancer protein 3 (PsbQ)
ERYFEPELXXAEEAAARIRQPAEGMRTLRPMLETMSWKYVLFYVRLKSKYLGLDLTTAMAGVPAGRRADYVRVANELVDNMTEFDRFVRTPKVYESYLFYEKTLKSLDDVAEFLV

SEQ ID NO: 9088 - protein, 195 aa, Zea mays
  misc_feature (142)..(142): Xaa can be any naturally occurring amino acid
  misc_feature (171)..(171): Xaa can be any naturally occurring amino acid
  Coding DNA Sequence Number=SeqID_2801
  Gene Ontology: Mol. function=nucleotide binding; Cellular component =plasma membrane; Biological process=intracellular protein transport across a membrane
  Homolog annotation: Hit_ID=A1SGL9; Match level="QueryCoverage=91%, HitCoverage=19%, E-value=5e-79, Identity=82%"; Hit description =Protein translocase subunit secA
QNYFRLYDKLSGMTGTAMTEAAEFDKIYKLGVVPIPTNRPMARQDQADLVYRTEEAKFNAVVEDIAERHATGQPVLVGTTSVEKSELLSGLLKRKGVPHTVLNAKQHADEAKVVALAGHKGAVTVATNMAGRGTDIMLGGSXEFLADQELRKRGLDPVENAEEYDAAWPGXTVEKIQAQGRRGGMTQVKRKPGGA

SEQ ID NO: 9089 - protein, 91 aa, Zea mays
  Coding DNA Sequence Number=SeqID_2802
  Gene Ontology: Mol. function=DNA binding; Cellular component=nucleus; Biological process=regulation of transcription
  Homolog annotation: Hit_ID=Q9FG27; Match level="QueryCoverage=58%, HitCoverage=14%, E-value=1e-18, Identity=81%"; Hit description =Similarity to transfactor
  Pfam annotation: Domain name=Myb_DNA-binding; Domain location=26-77; Score=26.3; E_value=0.00011; Accession=PF00249.21; Description=Myb -like DNA-binding domain
APAYHVGSGNVAAAAAPGHGAPSKTRIRWTQDLHERFVDSVNQLGGADKATPKGILKLMNSDGLTIYHIKSHLQIYGLTNNYVNLYDQSFK

SEQ ID NO: 9090 - protein, 92 aa, Zea mays
  Coding DNA Sequence Number=SeqID_2803
  Gene Ontology: Biological process=intracellular signaling cascade
  Homolog annotation: Hit_ID=Q6YWS2; Match level="QueryCoverage=98%, HitCoverage=17%, E-value=3e-43, Identity=84%"; Hit description=Leaf senescence protein-like
ACDLTRGQWVPDDVAPYYTNLTCPFIDDLQNCIKFGKPSLEFLRWRWQPDGCDLPRFDAARFLEAMRGKSMAFVGDSLARNHLKSLLCILSQ

SEQ ID NO: 9091 - protein, 132 aa, Zea mays
  Coding DNA Sequence Number=SeqID_2804
  Gene Ontology: Mol. function=ATPase activity, coupled to transmembrane movement of substances; Cellular component=integral to membrane; Biological process=transport
  Homolog annotation: Hit_ID=A2WZG1; Match level="QueryCoverage=100%, HitCoverage=10%, E-value=3e-66, Identity=91%"; Hit description =Putative uncharacterized protein
  Pfam annotation: Domain name=ABC_membrane_2; Domain location=4-132; Score=-79.6; E_value=0.00085; Accession=PF06472.5; Description=ABC transporter transmembrane region 2
VGHRLAKVQGYLFRSAFLRRIPTFTRLIIENLLLCFLQSTLYQTSKYLTGSLGLRFKKILTDLVHADYFENMVYYKISHVDHRITNPEQRIASDIPKFCSELSDLVQDDLAAIVEGLIYIWRLCSYASPKYV

SEQ ID NO: 9092 - protein, 115 aa, Zea mays
  Coding DNA Sequence Number=SeqID_2805
  Gene Ontology: Mol. function=transferase activity
  Homolog annotation: Hit_ID=A8G7V9; Match level="QueryCoverage=97%, HitCoverage=55%, E-value=1e-34, Identity=63%"; Hit description =Glutathione S-transferase domain
  Pfam annotation: Domain name=GST_C; Domain location=12-105; Score =43.5; E_value=7.6e-10; Accession=PF00043.15; Description=Glutathione S-transferase, C-terminal domain
QIRQLEKLADGINDAAVMIVREQMRPGDRQSEEVLLRNREKIARGLDALETAAAQGELLNSGTLNLADIATGCTLGYLNFRRVLPNWCVNRPALVKLAETLFERESFARTVPPTH

SEQ ID NO: 9093 - protein, 74 aa, Zea mays
  Coding DNA Sequence Number=SeqID_2806
MNDSDNHARHDDTDPQPDKACARPPAPHKENRTTEEHGHERQQATKMRTKPTDWRRQGTAPKTAGKRRRTPTSH

SEQ ID NO: 9094 - protein, 157 aa, Zea mays
  Coding DNA Sequence Number=SeqID_2808
  Subcellular localization annotation: CTP_CleavageSite=49; ConfidenceScore=5.04e-01
PGGALVCVDCGVGVFLCCLPGSRVVSVCRAVCESFGVPGAGGRALRAVRGWVGRSLRFRRLAGGRVWFLVLRPGLFRVLVFCPAPLLLGLLVCVALWALSRAPAGPAPGLVLAFRSAVSGAGSPALARGMWSSPLVNTISGGVAGPSPVLAPGPLFL

SEQ ID NO: 9095 - protein, 126 aa, Zea mays
  misc_feature (69)..(69): Xaa can be any naturally occurring amino acid
  misc_feature (78)..(78): Xaa can be any naturally occurring amino acid
  Coding DNA Sequence Number=SeqID_2809
  Homolog annotation: Hit_ID=Q336V4; Match level="QueryCoverage=86%, HitCoverage=10%, E-value=1e-47, Identity=88%"; Hit description =Expressed protein
LFNQINVIYLSKVNLFFQSTLRLEQLDKIAERLAHHVMGHHEEMVKGMQLVMELEHDLKVANVICMNGXRHITSSKNXVSRDLVVNVKSKKKQALLGCLPILTELRHALDMQMELETFVEKDNYFQ

SEQ ID NO: 9096 - protein, 197 aa, Zea mays
  Coding DNA Sequence Number=SeqID_273
  Gene Ontology: Mol. function=transferase activity
  Homolog annotation: Hit_ID=Q5N724; Match level="QueryCoverage=75%, HitCoverage=28%, E-value=2e-64, Identity=80%"; Hit description =Putative ceramide glucosyltransferase
MAAMEAVADAMLAAASRAFTGTFAIAIQIQGCWICLVLSLGWVAASIVRKRVIKNMRRSIADGNSFAFLCDNIDELEHSVQENLPRVSVIMPLKGFGEHNLQNWRTQITSLYGGPLEFLFVVESEDDPAYHVVSHLIVEYKDNLGAKVVVAGLSTTCSQKIHNQLVCKWHCSHPHCIFHGLNAHFRVVAMMRQDEMG

SEQ ID NO: 9097 - protein, 118 aa, Zea mays
  Coding DNA Sequence Number=SeqID_274
  Subcellular localization annotation: CTP_CleavageSite=39; ConfidenceScore=5.64e-01
RSFWSASCAPCDTSCSMRNNNPLSSQHRSMTRALPMSKSCSSGRQDMIMGWLSTASPHFFWRIKHHRRARIAGRFYKGSLWRPPQVKGNLLQAIPRRVLLDVVAAQVQGYRKFLVMMV

SEQ ID NO: 9098 - protein, 115 aa, Zea mays
  Coding DNA Sequence Number=SeqID_276
  Subcellular localization annotation: CTP_CleavageSite=51; ConfidenceScore=5.27e-01
PFSPFLSAVRLSPETLGNLLVASVHRRGGGLIRRPLLRCRRTPRRRALSCEGAAVGEILGGASALARRYGVGLRVANCELPTARPRIDCGEMCCLDYEQEIRHSSVSCSSTNQHH

SEQ ID NO: 9099 - protein, 255 aa, Zea mays
  Coding DNA Sequence Number=SeqID_278
  Homolog annotation: Hit_ID=A2XGU9; Match level="QueryCoverage=21%, HitCoverage=23%, E-value=6e-25, Identity=89%"; Hit description =Putative uncharacterized protein
  Subcellular localization annotation: CTP_CleavageSite=28; ConfidenceScore=5.04e-01
MAAPAPHVAVSAAAVLLLLPFLLAPLAVAQPPKSAKAFCISQFAIASQACSILPPSPPDEHHHHDDDDDEDDDHDDDEHHDRRSHHAAAISISGLLASNNGSHGVVSGNRTVGHHPHQGNRTRGGHGRGRGRGRGRGRRGRLRDDDDNHDADDPDHDDDHDDDDDHDDDDDHHDTDDLDHDDDHDDDDDDDDHDHEHHDEELRAYRDCCRWLKEVQKECVCEALLRLPPFLVKPQHTYVVRVGRTCNITYRCGGV

SEQ ID NO: 9100 - protein, 44 aa, Zea mays
  Coding DNA Sequence Number=SeqID_279
VSVQPGCFMLSFMSSSGLLYMVLLNHIWKVARSKEHFGVFGFRD

SEQ ID NO: 9101 - protein, 153 aa, Zea mays
  Coding DNA Sequence Number=SeqID_281
  Homolog annotation: Hit_ID=A2XR95; Match level="QueryCoverage=88%, HitCoverage=100%, E-value=3e-35, Identity=57%"; Hit description =Putative uncharacterized protein
MASKQQQKQFLDEAMIKQPTPEEDREGAWPSVLTIIGFGFLTFNSFMAVYRSNGDVGSISFVVFSYLVLVLLFYCLRRFETTPPESPSREHIKMAVWVLTTLLTAAFSYKVAAIMPLPVQVLVWAMAGATVFGGFYAFFIHQEKTAQLEPPKP

SEQ ID NO: 9102 - protein, 184 aa, Zea mays
  misc_feature (155)..(155): Xaa can be any naturally occurring amino acid
  Coding DNA Sequence Number=SeqID_282
  Gene Ontology: Mol. function=hydrolase activity
  Homolog annotation: Hit_ID=A7QH51; Match level="QueryCoverage=78%, HitCoverage=84%, E-value=4e-21, Identity=40%"; Hit description =Chromosome chr3 scaffold_95, whole genome shotgun sequence
  Pfam annotation: Domain name=DUF55; Domain location=26-167; Score =166.1; E_value=9.3e-47; Accession=PF01878.9; Description=Protein of unknown function DUF55
TPHRMARKAKPGAQGTAVVAAATGVQYWLLKTEPGEWSWSDQARAPGGVAPWDGVRNRQAMNSLRAMRPGDRCLFYHSGAGAASRRVVGVVEVARPWYEGEGEGEEAVAGGAVDVRAVGQFRSPVPLGVIKKAAGEVEGMKDFALLRQARLSVMXVPAKIWDWVCDAGGGFVQDGEGEDEEEEV

SEQ ID NO: 9103 - protein, 92 aa, Zea mays
  misc_feature (28)..(28): Xaa can be any naturally occurring amino acid
  misc_feature (51)..(51): Xaa can be any naturally occurring amino acid
  Coding DNA Sequence Number=SeqID_283
  Gene Ontology: Mol. function=aspartic-type endopeptidase activity; Cellular component=chromatin; Biological process=chromatin assembly or disassembly
  Homolog annotation: Hit_ID=Q9FW76; Match level="QueryCoverage=83%, HitCoverage=4%, E-value=9e-17, Identity=55%"; Hit description =Putative gag-pol polyprotein
LTRWKIQLYKCSFASCQIVYLGNTISEXGRATDPAKISPIVQCPVPANQKXSAAFLDWPGYYRKYVRNFGPISKPLTELRAWLVQLFSDQLF

SEQ ID NO: 9104 - protein, 95 aa, Zea mays
  Coding DNA Sequence Number=SeqID_284
VADFASVGGQGASPRYVGDVRGIVVQLGAPARAISRRRWSYAADPPCAASGAPLRVIRVVRSRESEESPWYLESQVPGEEQVVQEEPHNEEFDSI

SEQ ID NO: 9105 - protein, 400 aa, Zea mays
  misc_feature (295)..(295): Xaa can be any naturally occurring amino acid
  Coding DNA Sequence Number=SeqID_286
  Gene Ontology: Mol. function=triacylglycerol lipase activity; Cellular component=chloroplast stroma; Biological process=lipid metabolic process
  Homolog annotation: Hit_ID=Q6F358; Match level="QueryCoverage=99%, HitCoverage=99%, E-value=1e-147, Identity=66%"; Hit description =Putative lipase
  Pfam annotation: Domain name=Lipase_3; Domain location=139-298; Score= 170.7; E_value=3.8e-48; Accession=PF01764.16; Description=Lipase (class 3)
MSQHGGLGDTARRWRELHGDGGWAGTLDPLDLDLRRTVLRYGEMAQATYDAFNNERASPHAGLSRFARARFFDRVRLPAHAAAYRVTRFLYATSSVAVPDAFILRSVSRSRRCRESNWIGYVAVATDEGKAALGRRDVVVAWRGTMRALEWADDLEFPMVPTGGLLGDGDAMVHRGWLSMYTSSDPASSHNQDSARHQALGEVRRLVDAYRGEELSITVTGHSLGAALATLNAFDIAANGYNVTATGAAACPVTSFAFASPRVGGGGFKKRFDAVPGLRLLRVRNARDVVPKYPXCSYHDVGAELAIDTGESPYLRSPGGEQTWHNLEVYLHGVAGTRGARGGFELAVARDVALVNKAYDALRDHHGVPPGWWVPLNRGMVEGADGRWSLVDCEEDEDDE

SEQ ID NO: 9106 - protein, 319 aa, Zea mays
  misc_feature (182)..(319): Xaa can be any naturally occurring amino acid
  Coding DNA Sequence Number=SeqID_288
KLPTVKQAEQGALVNFMAESVAADARAHGEEASQFDETVAGRTLWLGLLRDQDSCRDAHDIATPQHHHDQARPWARRAGRTRGQDPGARLAEEHARTTPRTRARCNISWSKQRARLRGVAIVVATARPGRGHAQRKDNTREGATKVAAHQRRRERPWTDLGVLEIEQRRRERKGYARPPGNXXXXXXXXXXXXXXXXXXXXXXXXXXXXXXXXXXXXXXXXXXXXXXXXXXXXXXXXXXXXXXXXXXXXXXXXXXXXXXXXXXXXXXXXXXXXXXXXXXXXXXXXXXXXXXXXXXXXXXXXXXXXXXXXXXXXXXXXXX

SEQ ID NO: 9107 - protein, 383 aa, Zea mays
  misc_feature (37)..(37): Xaa can be any naturally occurring amino acid
  Coding DNA Sequence Number=SeqID_289
  Gene Ontology: Cellular component=integral to membrane
  Homolog annotation: Hit_ID=A7P951; Match level="QueryCoverage=95%, HitCoverage=96%, E-value=1e-117, Identity=61%"; Hit description =Chromosome chr3 scaffold_8, whole genome shotgun sequence
  Pfam annotation: Domain name=DUF677; Domain location=44-378; Score =560.0; E_value=2.5e-165; Accession=PF05055.3; Description=Protein of unknown function (DUF677)
  Pfam annotation: Domain name=DUF793; Domain location=3-378; Score= -213.3; E_value=0.0063; Accession=PF05633.2; Description=Protein of unknown function (DUF793)
  Pfam module annotation: Pfam domain module=DUF677::DUF793; Domain location=44-378::3-378
MGNNSSSGGGNRRPEHSETALPPEASPAEELSSYEAXCRSDPELRTFDTTLQRRTSRAISTLAVGVEVRSMSLDSLREVTGCLLDMNQEVVRVILDCKKDIWKSPELFDLVEDYFESSLQTLDFCTALDKCLKRARDSQLLLHVALQRFDDEEGSDAAATAAPSARYARTLHELRQFKAAGDPFTDEFFAAFQAVYRQQLAMLEKLQQRKHRLDKKVKTIKAWRRVSSIIFATTFAAVLICSVVAAAIAAPPVAAALAAAAAVPLGSMGKWIDSLLKGYQDALRGQKEVVSAMQVGTFIAIKDLDSIRVLINRVEVEISSMVDCVEFAERDEEAVKFGVEEIKKKLENFMKSVEDLGEQADRCSRDIRRARTVVLQRIIRHPN

SEQ ID NO: 9108 - protein, 274 aa, Zea mays
  Coding DNA Sequence Number=SeqID_2810
  Gene Ontology: Mol. function=oxidoreductase activity; Cellular component=cytoplasm; Biological process=metabolic process
  Homolog annotation: Hit_ID=A6T7L0; Match level="QueryCoverage=97%, HitCoverage=67%, E-value=1e-120, Identity=80%"; Hit description =Putative oxidoreductase
  Pfam annotation: Domain name=ADH_zinc_N; Domain location=63-226; Score=71.4; E_value=3e-18; Accession=PF00107.16; Description=Zinc -binding dehydrogenase
AALFGYSKLYGGVPGGQAEYVRVPKANVGPFKVPLALPDEKVLFLSDILPTAWQAVQNAGLDKGSSVAIFGAGPVGLLSAACARLAGAEEIFMIDHNAYRLEFARQRYGVTPINFDEIDDPAGWIIDHTQGHRGVDAVIDAVGFEAKGSLTETVMSNLKLEGSSGKALRQCIAAVRRGGVVSVPGVYAGFIHGFLFGDAFHKGLTFKMGQTHVQAYLPRLLSLIEQGLLTPEEIVTHHMPLKEAARAYEIFEKRKEDCRKVILVPGMASTTPAA

SEQ ID NO: 9109 - protein, 135 aa, Zea mays
  Coding DNA Sequence Number=SeqID_2811
  Gene Ontology: Mol. function=oxidoreductase activity; Cellular component=chloroplast; Biological process=metabolic process
  Homolog annotation: Hit_ID=Q5YUI9; Match level="QueryCoverage=100%, HitCoverage=37%, E-value=3e-16, Identity=35%"; Hit description =Putative monooxygenase
QWDHKLHYVDYGQQKAHGLVFRNGRRYEADIVIGADGAWSRVRRYLTPVRPVYTGITFFEGWIDHPSDQINSIAGNGTAFSFGGAQALVTQRNGGGRICVYAAMKRAPDVIDQHIASSGLTAWVRDSYRDWAASL

SEQ ID NO: 9110 - protein, 172 aa, Zea mays
  Coding DNA Sequence Number=SeqID_2812
  Gene Ontology: Mol. function=DNA binding; Biological process=DNA recombination
  Homolog annotation: Hit_ID=A4VPS9; Match level="QueryCoverage=100%, HitCoverage=23%, E-value=5e-55, Identity=56%"; Hit description=Site -specific recombinase, phage integrase family
LRCGLWLAREKPEICEPSDWTMETCASFIAMVGRLKVDELSLDTNKGGRRSNRSGKPLMPHSRSRFVYAVRRFMLDYESWGWGKLKFSPARHLSSPDTPLFRQGVNPRVIDDPVWLKLVWASLNLRKEDLLSEIHYPLSMLQAMAVIWTHAGLRQNELMRLTMNCITPQADD

SEQ ID NO: 9111 - protein, 194 aa, Zea mays
  misc_feature (1)..(106): Xaa can be any naturally occurring amino acid
  Coding DNA Sequence Number=SeqID_2813
XXXXXXXXXXXXXXXXXXXXXXXXXXXXXXXXXXXXXXXXXXXXXXXXXXXXXXXXXXXXXXXXXXXXXXXXXXXXXXXXXXXXXXXXXXXXXXXXXXXXXXXXXXALAVGAACRAPLLPPRPSSSSIQATAPSSLYVAPTPSSVSSSLVRGSLCSLDSAPCASVCPLQRPAHRFHAILAPSSIVGEESRDLMV

SEQ ID NO: 9112 - protein, 204 aa, Zea mays
  Coding DNA Sequence Number=SeqID_2815
  Subcellular localization annotation: CTP_CleavageSite=2; ConfidenceScore=5.68e-01
ARGETPTKRTLQTPPTGGTSTKPGPNNSTENPTGQRQRSSLQPPAKNTSEPPPNRNRAPPAAPTPRTRPERPRQAPRRAPTRRRRDPHGATRSLRRARKPTRRPPPPGHPAAPPPPTTPRGPRRRRRPTTGPRPPPRRGPDAHHGRPRARRDRARHDADGPGRLQRAPAARGRTPPGPRRAAPPRRPAAGATPLGRPGTQPPTT

SEQ ID NO: 9113 - protein, 78 aa, Zea mays
  misc_feature (55)..(55): Xaa can be any naturally occurring amino acid
  Coding DNA Sequence Number=SeqID_2817
  Gene Ontology: Mol. function=alcohol dehydrogenase activity; Cellular component=cytoplasm; Biological process=metabolic process
  Homolog annotation: Hit_ID=Q9SM47; Match level="QueryCoverage=79%, HitCoverage=39%, E-value=7e-19, Identity=74%"; Hit description =Alcohol dehydrogenase 2
MATAAKVIKCKAAVAWEAVKPLLIEEVGVAPPQAMEERVKILFTLLCRTDVYFWXVQGPTPEGPRILGHEAVGIIPSD

SEQ ID NO: 9114 - protein, 136 aa, Zea mays
  Coding DNA Sequence Number=SeqID_2818
  Gene Ontology: Mol. function=phosphoprotein phosphatase activity; Cellular component=intracellular; Biological process=embryonic development ending in birth or egg hatching
  Homolog annotation: Hit_ID=Q75KI1; Match level="QueryCoverage=96%, HitCoverage=25%, E-value=3e-27, Identity=47%"; Hit description =Putative uncharacterized protein OJ1057_G07.1
  Pfam annotation: Domain name=BRCT; Domain location=40-120; Score =21.2; E_value=0.0037; Accession=PF00533.16; Description=BRCA1 C Terminus (BRCT) domain
GLEEREHDGSLAVVLGALQRIHQGFFDGHRADVREVIAKVRSQVLPECTLAFSFLEQVMEDYPEATLPWRLAEAFGAACRKDVDEEVTHVVAEDPAAEKAQWARDNGKFLVNTEWVKAASFRWCRQDEQAFPVNLL

SEQ ID NO: 9115 - protein, 71 aa, Zea mays
  Coding DNA Sequence Number=SeqID_2819
  Gene Ontology: Mol. function=binding
  Homolog annotation: Hit_ID=Q336U8; Match level="QueryCoverage=78%, HitCoverage=4%, E-value=3e-20, Identity=80%"; Hit description=TPR Domain containing protein, expressed
YSIIKLNSGLYWSWKYLRALCVHQRKWSEAIQSLQHGIRGYPTCADLWEALGLAYHRLGMFTAAVKVCCFQ

SEQ ID NO: 9116 - protein, 172 aa, Zea mays
  misc_feature (33)..(33): Xaa can be any naturally occurring amino acid
  Coding DNA Sequence Number=SeqID_2820
  Gene Ontology: Mol. function=hydrolase activity, acting on acid anhydrides, catalyzing transmembrane movement of substances; Cellular component=integral to membrane; Biological process=mercury ion transport
  Homolog annotation: Hit_ID=B0KLD8; Match level="QueryCoverage=100%, HitCoverage=23%, E-value=5e-29, Identity=45%"; Hit description=Heavy metal translocating P-type ATPase
EKVLGRVPGVQAPSVNLALERAHVRVTAEVGLXALPAAVERAGYSAGPVKSVRPDASWREQIELMAAFLLAVPVVLDSMVMPVPKLVPLICAALVQVWLGARFYRAGFLALRAGGGNMDLLVALGTSAAYGLSLWDVFAGGPLYLESSVAVIALVRLGKYLEGQAKRDAAKA

SEQ ID NO: 9117 - protein, 153 aa, Zea mays
  Coding DNA Sequence Number=SeqID_2821
  Gene Ontology: Mol. function=two-component response regulator activity; Cellular component=cytoplasm; Biological process=two -component signal transduction system (phosphorelay)
  Homolog annotation: Hit_ID=Q2NSR4; Match level="QueryCoverage=86%, HitCoverage=79%, E-value=6e-50, Identity=72%"; Hit description =Putative two-component regulator protein
  Pfam annotation: Domain name=Response_reg; Domain location=21-132; Score=157.0; E_value=5e-44; Accession=PF00072.14; Description =Response regulator receiver domain
MVTRVILPAISKRPPLPGDRMKILVIEDEAGARDYMRKGLTEAGFIVDVAENGQDGLFYAQEHHYDLILLDVMMPGINGWEVMAQLDKQLQTPVIFLTAKGTVEDRIKGLELGADDYLVKPFSFAELLARVRTQLRRGSQQKLPDILTLADLQ

SEQ ID NO: 9118 - protein, 75 aa, Zea mays
  Coding DNA Sequence Number=SeqID_2822
  Gene Ontology: Mol. function=chorismate synthase activity; Cellular component=chloroplast; Biological process=aromatic amino acid family biosynthetic process
  Homolog annotation: Hit_ID=Q10NY1; Match level="QueryCoverage=76%, HitCoverage=13%, E-value=2e-15, Identity=70%"; Hit description =Chorismate synthase
GCCLFLFFCSAGVTTGTPILVIVPNTDQIGSDHREIANVYRPSHADATYDFKYGVRAVQVEFFFSIPLEEPQFFF

SEQ ID NO: 9119 - protein, 97 aa, Zea mays
  Coding DNA Sequence Number=SeqID_2823
  Gene Ontology: Mol. function=iron ion transmembrane transporter activity; Cellular component=periplasmic space; Biological process =high-affinity iron ion transport
  Homolog annotation: Hit_ID=A7MGS6; Match level="QueryCoverage=93%, HitCoverage=34%, E-value=5e-28, Identity=61%"; Hit description =Putative uncharacterized protein
QNEVITLCGGRNIFADSIVSWPQVSREQVLTRHPQAIVTGGDASRAASVARFWQPQLNVPVIALNDDWLSRPGPRLLLAAKQLCEALHPTKNKALPD

SEQ ID NO: 9120 - protein, 101 aa, Zea mays
  Coding DNA Sequence Number=SeqID_2824
  Subcellular localization annotation: CTP_CleavageSite=33; ConfidenceScore=5.07e-01
VPHDLTIPCPSPRPTHRCRRAPRLKTCPAVRPCPSAIWYQLAGSAGVHHGPCPSRRRASAWQQPAAKGSEPAAGPSAVKSTGPPSRPSSSWGSHRSSTGTS

SEQ ID NO: 9121 - protein, 137 aa, Zea mays
  Coding DNA Sequence Number=SeqID_2826
LLQLSCPRVLPLPAPGANDELVERRDSGLQNRTSEPLCRTEYIRYLAWVDSRPVPPESFAVFVLRRGSASRRGQRSALRSLGRRVGYRNIGPGVSGHGTTAGRKRAAAWPPLGWVMEPIVGSGSNGAILRRGSDLVI

SEQ ID NO: 9122 - protein, 142 aa, Zea mays
  Coding DNA Sequence Number=SeqID_2828
MGGGGSAQENETIVSCLADVIRGAAPPPSPSPWPPVAAAASDAAAASYGPAPMQMQMQMMQASGSGHSASVAQDGGATMMTTMIGTDDTDFSWDPSLADHQMMEQVHRDMLHVVGVARLADTVWPRHTTPAGAWHCPLCPQI

SEQ ID NO: 9123 - protein, 114 aa, Zea mays
  Coding DNA Sequence Number=SeqID_2830
GAGGAGEPMAGHGRAQRTTGGELGWLAAGLVSKEDAATARGWLGGRAAAEGKGSGGAATGWLCGQRPEGRGGREQRRPAWGGREQRRPAGEGESRGGGQGLGGGRLGGGIEFRV

SEQ ID NO: 9124 - protein, 141 aa, Zea mays
  Coding DNA Sequence Number=SeqID_2832
FGGSCNRSERNQISHPLPDDLLILVHLEVGQKHRLGLLDQLLRVLLVLLLILSRQGLHTQLTSRAAQHHPVRRRADHTTPVGQASHARGTPCAVRPSIGLAPCSRHSWRRSLCPGLPVGRAGPQCMIVVPGSQRICIHLHC

SEQ ID NO: 9125 - protein, 125 aa, Zea mays
  Coding DNA Sequence Number=SeqID_2834
  Gene Ontology: Mol. function=unfolded protein binding; Cellular component=cytoplasm; Biological process=response to stress
  Homolog annotation: Hit_ID=A5VX31; Match level="QueryCoverage=88%, HitCoverage=37%, E-value=1e-51, Identity=88%"; Hit description=33 kDa chaperonin
  Pfam annotation: Domain name=HSP33; Domain location=1-105; Score= -137.2; E_value=0.018; Accession=PF01430.10; Description=Hsp33 protein
LPRDRQPDDEEREESWQHVVALATTLLADEWALDNETLLHRLYHEDAERLFDIQPLRFKCSCSRERSGNALVRLGEHDAKALVEECGGQVEIDCQFCNERYFFYASDVAQLFAGGGTDVASETRH

SEQ ID NO: 9126 - protein, 70 aa, Zea mays
  misc_feature (53)..(53): Xaa can be any naturally occurring amino acid
  Coding DNA Sequence Number=SeqID_2835
  Gene Ontology: Mol. function=G-protein coupled photoreceptor activity; Cellular component=membrane; Biological process=regulation of transcription, DNA-dependent
  Homolog annotation: Hit_ID=P93527; Match level="QueryCoverage=98%, HitCoverage=5%, E-value=1e-13, Identity=55%"; Hit description =Phytochrome B
STGLTLDSLVAAGCLGADALCHAVCGKSVDYSTPTDELSWSSSRTATEMRWEXVRHQPEERPDGQRTLPG

SEQ ID NO: 9127 - protein, 220 aa, Zea mays
  Coding DNA Sequence Number=SeqID_2836
  Gene Ontology: Mol. function=transferase activity, transferring phosphorus-containing groups; Cellular component=integral to membrane; Biological process=two-component signal transduction system (phosphorelay)
  Homolog annotation: Hit_ID=Q6AGI6; Match level="QueryCoverage=55%, HitCoverage=21%, E-value=6e-32, Identity=57%"; Hit description =Sensor protein
  Pfam annotation: Domain name=HATPase_c; Domain location=1-111; Score =129.5; E_value=9.7e-36; Accession=PF02518.16; Description=Histidine kinase-, DNA gyrase B-, and HSP90-like ATPase
MDPRRIRRIIRNLIGNAIEHGEGKPIHVLVDSNAGAVALAVRDHGMGMSEGDVGHVFDRFWRADPSRRRTIGGTGLGLAISQEDALIHGGVIDVWSQLGDGSCFRLTLPRRRSGSAANSPIPLPPADALDLAELEREANAAAEDLEEGELGDVVRGGSVSAQDNGFDQLDFHPNPPAKGESQQDILNGFIDAAVSPDGGYQIARAFLSDSNQSQWNPDYS

SEQ ID NO: 9128 - protein, 78 aa, Zea mays
  Coding DNA Sequence Number=SeqID_2837
  Gene Ontology: Mol. function=nucleoside-triphosphatase activity; Cellular component=cytoplasm; Biological process=protein metabolic process
  Homolog annotation: Hit_ID=A3AJA8; Match level="QueryCoverage=92%, HitCoverage=10%, E-value=2e-23, Identity=76%"; Hit description =Putative uncharacterized protein
LIALDMGALIAGAKYRGEFEDRLKAVLKEVTDSDGQTVLFIDEIHTVVGAGNYAGYLDTNSLRSPLRKQGDITKNRVG

SEQ ID NO: 9129 - protein, 208 aa, Zea mays
  misc_feature (199)..(199): Xaa can be any naturally occurring amino acid
  Coding DNA Sequence Number=SeqID_2838
  Subcellular localization annotation: CTP_CleavageSite=62; ConfidenceScore=5.61e-01
MASPLVTHAVMRVVALHFGSGQCNPSRTATPHSQTSFTNRRVDACPVATHYCPFLPQSRPISVDSAECESDACTPRRAFFRFVPSRRAADESSLSRRLLLEKHMHVVPAEARAPQAIAPSPSASYVQCVRRRPDSEHHDPSSLVRVAVLATQRKRENQSRGRPGGARARLVSLSLAAHGPGVVFGRKRWSDLTRDDRRXGETAPTGIC

SEQ ID NO: 9130 - protein, 115 aa, Zea mays
  Coding DNA Sequence Number=SeqID_2840
QQLETLLSEQVIPLDQQIASRAQQLEQQQALLSEQQKTLLLSQQALDQHQQASERLQQQLAQQQAFRLSEAAVARWGGELARWQAELARLEEREQTLTQLSAQQQQLQSQLEQQL

SEQ ID NO: 9131 - protein, 72 aa, Zea mays
  Coding DNA Sequence Number=SeqID_2842
  Homolog annotation: Hit_ID=Q9AV50; Match level="QueryCoverage=44%, HitCoverage=6%, E-value=6e-07, Identity=75%"; Hit description =Putative extensin
LQNWRMELLNLPSYTCLRVGPDHAPREKASVNSKGEQLKSPKILKHAPPSTPLRREGADRPTTATQCVLPRS

SEQ ID NO: 9132 - protein, 95 aa, Zea mays
  Coding DNA Sequence Number=SeqID_2843
LTAPIKPPPTNQSVAHLHPCPLWPGWLQGYGETFSECTRDDHDADLDLAELYYIPMMLSVGANVPDTMLKEAAPMTIMAPVAAHHFMNAVALRSP

SEQ ID NO: 9133 - protein, 116 aa, Zea mays
  Coding DNA Sequence Number=SeqID_2845
  Gene Ontology: Mol. function=polyphosphate kinase activity; Cellular component=polyphosphate kinase complex; Biological process =polyphosphate biosynthetic process
  Homolog annotation: Hit_ID=Q2NS64; Match level="QueryCoverage=83%, HitCoverage=13%, E-value=1e-23, Identity=56%"; Hit description =Polyphosphate kinase
KARGAECDLVTQRESSRLEMMSPSLKQRLSSKTGVALVLIMREYSPTAMVETLRHKLSISRYNSIVPGGGYHNFKDFIGLPNVGEAHLENRPLPQIRHIGCSWVPHRPSLPSRNAR

SEQ ID NO: 9134 - protein, 87 aa, Zea mays
  misc_feature (64)..(64): Xaa can be any naturally occurring amino acid
  misc_feature (69)..(69): Xaa can be any naturally occurring amino acid
  Coding DNA Sequence Number=SeqID_2846
  Homolog annotation: Hit_ID=A2WLC2; Match level="QueryCoverage=97%, HitCoverage=23%, E-value=7e-09, Identity=41%"; Hit description =Putative uncharacterized protein
  Subcellular localization annotation: CTP_CleavageSite=30; ConfidenceScore=5.07e-01
FLQSLLRWIYGMFMDKRPFFSKSVSRFFFRFAFDMSHHIGIAELRLVFGSVISGFAPPLKEKHXLLLWXALMPLHVPRSLGVDKPQG

SEQ ID NO: 9135 - protein, 126 aa, Zea mays
  Coding DNA Sequence Number=SeqID_2847
  Subcellular localization annotation: CTP_CleavageSite=31; ConfidenceScore=5.14e-01
MDKEGRDDCVRTSDSFQAVAIASTLAFPVVSAALVRTCGSGFACVAATKALASGGSDRRGWIIYEATWAYGTHERRCTNSPSKVRRRLTRRLWSATYVSDSRTLWLWLAARVSCEAAARSNGSSSQ

SEQ ID NO: 9136 - protein, 138 aa, Zea mays
  Coding DNA Sequence Number=SeqID_2849
  Gene Ontology: Mol. function=metalloendopeptidase activity; Cellular component=membrane; Biological process=proteolysis
  Homolog annotation: Hit_ID=Q39DA4; Match level="QueryCoverage=100%, HitCoverage=23%, E-value=2e-62, Identity=88%"; Hit description =Peptidase M48, Ste24p
  Pfam annotation: Domain name=Peptidase_M48; Domain location=2-120; Score=-1.2; E_value=9.1e-06; Accession=PF01435.8; Description =Peptidase family M48
MIGANEKTGYTALATMLLGVLAGVLARSGDLGSAIAMGGQAYAVDNQLRFSRSAEREADRVGFQLLAGAGYDPYGMPGFFERLERASMGDAGVPAYARTHPLTGERIADMEDRARRAPYRQPRQSAEYGFVRARLRIL

SEQ ID NO: 9137 - protein, 98 aa, Zea mays
  Coding DNA Sequence Number=SeqID_2850
SELSRQCRCKNRAGIVDNLVFGCRGVLSRQELQGRDSSDRLAAYGDPASTLMISTQLQQTIHTSSADGSNTAQHPAILASSRNSGRLTGNSRRQLPGL

SEQ ID NO: 9138 - protein, 121 aa, Zea mays
  misc_feature (20)..(20): Xaa can be any naturally occurring amino acid
  misc_feature (44)..(44): Xaa can be any naturally occurring amino acid
  Coding DNA Sequence Number=SeqID_2852
  Gene Ontology: Cellular component=integral to membrane; Biological process=cellulose biosynthetic process
  Homolog annotation: Hit_ID=A8G819; Match level="QueryCoverage=95%, HitCoverage=14%, E-value=5e-39, Identity=66%"; Hit description =Cellulose synthase subunit B precursor
  Subcellular localization annotation: CTP_CleavageSite=34; ConfidenceScore=5.11e-01
PIGPWVGFQSPFHDQRSVVXALLAASPRGWDLLNAAMRDSGKRXAMFGSVSIVRESGVNSVRVGDTYFVGHLPWWERLWNLLATHPVWLTVCAVLVVILFALMAWRLMRMVSRRRLAELDA

SEQ ID NO: 9139 - protein, 131 aa, Zea mays
  Coding DNA Sequence Number=SeqID_2853
  Gene Ontology: Mol. function=amino acid transmembrane transporter activity; Cellular component=integral to membrane; Biological process=amino acid transport
  Homolog annotation: Hit_ID=Q1IJW5; Match level="QueryCoverage=95%, HitCoverage=28%, E-value=3e-19, Identity=37%"; Hit description=Amino acid transporter
MGADGMLFRAVGQIDPRTLAPQVALALLGAWTVVLMLWGNFGQLVDYTTVGEWLGHAFGIGTLFWYRWKFVDEPAPYRVPLFPLMPLVFVVTVLGVIDVTDIANPGDAGMSLVIIALGVPVYWIWRRWQRA

SEQ ID NO: 9140 - protein, 109 aa, Zea mays
  Coding DNA Sequence Number=SeqID_2854
  Gene Ontology: Mol. function=transferase activity, transferring phosphorus-containing groups; Cellular component=integral to membrane; Biological process=two-component signal transduction system (phosphorelay)
  Homolog annotation: Hit_ID=A8ANK8; Match level="QueryCoverage=97%, HitCoverage=23%, E-value=2e-13, Identity=42%"; Hit description =Sensor protein
  Pfam annotation: Domain name=HATPase_c; Domain location=54-109; Score= 8.6; E_value=0.0088; Accession=PF02518.16; Description=Histidine kinase-, DNA gyrase B-, and HSP90-like ATPase
QLAQIKARHGEDKPFSEVNLSDIVQQACFSGYAAARRKQIDLGFEEQTASQVQGDALLLAELCANLLDNAIKYTPHGGTVTARLKQKVKEIEDSGPGIAADQQRQAKQV

SEQ ID NO: 9141 - protein, 105 aa, Zea mays
  Coding DNA Sequence Number=SeqID_2855
  Subcellular localization annotation: CTP_CleavageSite=31; ConfidenceScore=5.08e-01
QGPWASTSWPPVLQPEPKRPTTAGRPPATIRLMVPMGEWAAPVPKIMNQNHYQTQQASNSFANQWLTNPLVNNSVMWNKAPNAAHGSAAYGGGPDPEGAAPSNVG

SEQ ID NO: 9142 - protein, 153 aa, Zea mays
  Coding DNA Sequence Number=SeqID_2857
  Gene Ontology: Cellular component=membrane
  Homolog annotation: Hit_ID=A2VRG7; Match level="QueryCoverage=100%, HitCoverage=37%, E-value=7e-59, Identity=80%"; Hit description =Putative uncharacterized protein
  Pfam annotation: Domain name=DUF6; Domain location=1-109; Score=26.7; E_value=8.6e-05; Accession=PF00892.11; Description=Integral membrane protein DUF6
QSFPPLLLSGLRNLLGGIGLFIFALRRKPEWPTLLEIRNSAIVGTMLVALSSGTIALGMRTVSSGSAAVMVATVPLFATVIAAVAGRPVTKGEWAAVALGMVGIVVLNSGGAAAANSALGTICVLAGALFWAGGAHLATRLKLPSDLFLSTSL

SEQ ID NO: 9143 - protein, 184 aa, Zea mays
  Coding DNA Sequence Number=SeqID_2858
  Gene Ontology: Mol. function=oxidoreductase activity; Biological process=metabolic process
  Homolog annotation: Hit_ID=A0TB75; Match level="QueryCoverage=100%, HitCoverage=34%, E-value=1e-64, Identity=71%"; Hit description =Aldehyde dehydrogenase
  Pfam annotation: Domain name=Aldedh; Domain location=9-184; Score= -257.3; E_value=0.0009; Accession=PF00171.12; Description=Aldehyde dehydrogenase family
MLIGGERRHSSSGATFVRRNPLDGEVASAAPACTVDDARAAADAAARAFPEWAALGPGARRALLLKAAAALEAKHEQFVAAMAAETGASALWAGFNVHLAASGLVEAASLTTQVGGELIPSDVPGALAMGVRQPAGVVLGIAPWNAPVILATRALALPLACGNTVVLKGSELCPVTHGLIVEAL

SEQ ID NO: 9144 - protein, 89 aa, Zea mays
  Coding DNA Sequence Number=SeqID_2859
QADGARAPAGGRHTERQGERGRTRGSQGEESQTARPEGRREPPENERGSLRRAGIRKTGAPTPRNPATAGSTRRRGARRATPATRATRA

SEQ ID NO: 9145 - protein, 75 aa, Zea mays
  Coding DNA Sequence Number=SeqID_2861
  Gene Ontology: Mol. function=glycerol-3-phosphate dehydrogenase activity; Cellular component=glycerol-3-phosphate dehydrogenase complex; Biological process=glycerol-3-phosphate metabolic process
  Homolog annotation: Hit_ID=A0ZKF7; Match level="QueryCoverage=73%, HitCoverage=10%, E-value=2e-15, Identity=60%"; Hit description =Putative oxidoreductase protein
  Pfam annotation: Domain name=Rieske; Domain location=1-74; Score =11.0; E_value=0.0001; Accession=PF00355.16; Description=Rieske [2Fe -2S] domain
MRRTSGRAWKANRGSTANDQGQLHAMSALCPHLKCVVQWNGHERTWDCPCHGSRFSATGALMEGSATQGLTPEPT

SEQ ID NO: 9146 - protein, 87 aa, Zea mays
  Coding DNA Sequence Number=SeqID_2862
SANMLVHARATEMAVHRQAPLGHRVVQELRLDIVCVHPGLHGGTDAGVTGQSGLRWNRCRRLRLHGGRCRSEWRDWSWSMPRDRLGT

SEQ ID NO: 9147 - protein, 234 aa, Zea mays
  Coding DNA Sequence Number=SeqID_2864
  Gene Ontology: Mol. function=ATPase activity, coupled to transmembrane movement of substances; Cellular component=integral to membrane; Biological process=transport
  Homolog annotation: Hit_ID=A2WL88; Match level="QueryCoverage=72%, HitCoverage=11%, E-value=1e-63, Identity=73%"; Hit description =Putative uncharacterized protein
LWWAFFLLLSLLAVADHVATRLDGLLVPALSWAFDAVSVAAAVVLLCAGLVGRREGGGSAAEEPLLNGTHESADGSGRGDAEASRFTGAGFFSLLTFSWMGPLLAVGHKKTLGLDDVPGLDPGDSISSLLPMFKVNLEAVAGDVSGSGRKAVTAFKLTKALLRTVWWHVAVTAFYALVYNVATYVGPYLIDSLVQYLNGDERYASKGQLLVLAFIVAKVFECVSQRHWFFRLQV

SEQ ID NO: 9148 - protein, 114 aa, Zea mays
  Coding DNA Sequence Number=SeqID_2865
  Gene Ontology: Mol. function=oxidoreductase activity; Cellular component=extracellular region; Biological process=hydrogen peroxide catabolic process
  Homolog annotation: Hit_ID=A2YC52; Match level="QueryCoverage=78%, HitCoverage=26%, E-value=6e-27, Identity=70%"; Hit description =Putative uncharacterized protein
  Pfam annotation: Domain name=peroxidase; Domain location=5-114; Score= -30.5; E_value=4.6e-05; Accession=PF00141.13; Description=Peroxidase
YPRSSRYDLQGCDAYELLNSTAGNRLSEMDATPHRSLPGFGSVDRVKAKLEAACPNTVSCADVLTLMARDAVGLAKGPVWAVALGRQDRRVFTPTEANQVEPLVLPFYYQLIFF

SEQ ID NO: 9149 - protein, 181 aa, Zea mays
  Coding DNA Sequence Number=SeqID_2866
  Gene Ontology: Mol. function=diaminopimelate decarboxylase activity; Biological process=lysine biosynthetic process via diaminopimelate
  Homolog annotation: Hit_ID=A8GIJ2; Match level="QueryCoverage=100%, HitCoverage=43%, E-value=4e-69, Identity=71%"; Hit description =Diaminopimelate decarboxylase
  Pfam annotation: Domain name=Orn_Arg_deC_N; Domain location=32-180; Score=23.4; E_value=3.5e-09; Accession=PF02784.7; Description =Pyridoxal-dependent decarboxylase, pyridoxal binding domain
MPRPLNDSQTALNATNLLPLAQRYSGPFWAYDAEIIQQRIAQLSAFDVVRFAQKACSNIHILRLMRAAGVKVDSVSLGEIERALAAGFQPGGEDIVFTADVLDSPTLARIAELKVPVNAGSVDMLHQLGAVSPGHSVWLRINPGFGHGHSQKTNTGGENSKHGIWHSDLPLALAAIQQHGL

SEQ ID NO: 9150 - protein, 68 aa, Zea mays
  Coding DNA Sequence Number=SeqID_2867
MANEDSARPSAMGEHRGFNELEPAVRRVSRGSTTRGARGATVGAGGHGQGHAAMGAGVIEKALEAGVG

SEQ ID NO: 9151 - protein, 204 aa, Zea mays
  Coding DNA Sequence Number=SeqID_2869
MNYLLPSTTEAGEQERCAAKPTVARRGELGWARRLEQAATGAAPRHARRESKQGQCAATMEKIRAGLRKLEGEQENPGWGITVCCATMETSKGSRAPQGRSWGLGTWLEEARRAEEAPAPGRKTRMALGAVRAEASQTRGASREQARRATQRKIKLRSTELELRTGARRREGRDAGQEQGGNSGAGSRAQEEQRPSSVSCAQGS

SEQ ID NO: 9152 - protein, 38 aa, Zea mays
  Coding DNA Sequence Number=SeqID_2871
PTCCLQSITYPEGTWQILELFDGYFLEHPEGLSLFMLI

SEQ ID NO: 9153 - protein, 44 aa, Zea mays
  Coding DNA Sequence Number=SeqID_2873
  Gene Ontology: Mol. function=nucleic acid binding; Cellular component= intracellular; Biological process=regulation of transcription
  Homolog annotation: Hit_ID=A2XWI2; Match level="QueryCoverage=95%, HitCoverage=7%, E-value=8e-15, Identity=92%"; Hit description =Putative uncharacterized protein
SLFDSSDPDAEVIALSPKTLLATNRFVCEVCNKGFQREQNLQAC

SEQ ID NO: 9154 - protein, 62 aa, Zea mays
  Coding DNA Sequence Number=SeqID_2874
CYRIHSMGIAFSLILIRVSEEERHAVGDQGHVKPWIHSINSISRHPSASTCEPPGSCRTVRT

SEQ ID NO: 9155 - protein, 84 aa, Zea mays
  Coding DNA Sequence Number=SeqID_2876
  Gene Ontology: Mol. function=electron carrier activity; Cellular component=mitochondrial respiratory chain; Biological process =electron transport
  Homolog annotation: Hit_ID=O22490; Match level="QueryCoverage=45%, HitCoverage=35%, E-value=2e-15, Identity=97%"; Hit description =Cytochrome C
MHTGLSPPAGRLAIARDAIRPDAPTISACGLAMASFSEAPPGNPKAGEKIFKTKCAQCHTVEKGAGHKQGELHPAPLVDQIRAR

SEQ ID NO: 9156 - protein, 113 aa, Zea mays
  Coding DNA Sequence Number=SeqID_2877
  Homolog annotation: Hit_ID=Q0V310; Match level="QueryCoverage=99%, HitCoverage=27%, E-value=2e-13, Identity=33%"; Hit description =Putative uncharacterized protein
ISILLFYRRMVKGTFRRRWKWSVWAAIGITVCWTLAFCIMLIVTCNPTEASWKVYDLTYTKDWKCADTRTSSFVAGILAVISDTYSLVLPWSMIWPLEMPRRQKLALNMVFSF

SEQ ID NO: 9157 - protein, 107 aa, Zea mays
  Coding DNA Sequence Number=SeqID_2878
  Subcellular localization annotation: CTP_CleavageSite=34; ConfidenceScore=5.08e-01
HEVASVKDNGYQIEIYSRASRNRRSRFGEPLVLRSSSSSSTRSKTLSICLVKVAFGAIYAQVKKKAPRLISGSSRTSASSRIRLATSPSQLPMVGLFTLATFRFCVL

SEQ ID NO: 9158 - protein, 111 aa, Zea mays
  Coding DNA Sequence Number=SeqID_2880
  Gene Ontology: Mol. function=transferase activity, transferring phosphorus-containing groups; Cellular component=membrane; Biological process=two-component signal transduction system (phosphorelay)
  Homolog annotation: Hit_ID=Q2ACC1; Match level="QueryCoverage=97%, HitCoverage=13%, E-value=1e-37, Identity=66%"; Hit description =Histidine kinase
  Pfam annotation: Domain name=Response_reg; Domain location=1-100; Score=16.8; E_value=0.00019; Accession=PF00072.14; Description =Response regulator receiver domain
AAAFKKYDANVSCVESGKDAISLLQPPHCFDACFMDVQMLEMDGYELNKYKRSTFVEYHLRILAMTTDVIRATYGERMKFGMDGYLIKLCDEEQVYQAVSRLVEGTTDLAR

SEQ ID NO: 9159 - protein, 119 aa, Zea mays
  Coding DNA Sequence Number=SeqID_2881
RTDGEGGPAEQPPTPKTGGAGNEKETKRQGRRTDPGRKTGSRQAHSNERRIGRTEGQHGANEGDPRATRANSGDGDGKKTKAKEGQGGETQGAGTPGIKSRQGRHAHAGGRKALHYAWQ

SEQ ID NO: 9160 - protein, 155 aa, Zea mays
  Coding DNA Sequence Number=SeqID_2883
MSAGQAQRRRRNATREANQAETPRDKDRHTRHSAGDEANANSYTRNQTESQDTNRAPPPTETTEKKRATEASEAATTHNDMQCSCKGDAAAGEGARGNLHTGAGKNKPKGHQDEANAGNAGHQGGADHAYSQPLAPTRRKGPRHGGRTRRTSPGG

SEQ ID NO: 9161 - protein, 135 aa, Zea mays
  Coding DNA Sequence Number=SeqID_2885
  Gene Ontology: Mol. function=oxidoreductase activity, acting on the CH-CH group of donors; Cellular component=mitochondrial inner membrane; Biological process=energy derivation by oxidation of organic compounds
  Homolog annotation: Hit_ID=P49748; Match level="QueryCoverage=100%, HitCoverage=20%, E-value=4e-58, Identity=85%"; Hit description=Very long-chain specific acyl-CoA dehydrogenase, mitochondrial precursor
LSGLVHPELSRSGELAVRALEQFATVAEAMLIMHKKGIVNEQFLLQRLADGAIDLYAMVVVLSRASRSLSEGHPTAQHEKMLCDTWCIEAAARIRENMTALQSDPQQQELFRNFKSISKALVERGGVVTSNPLGF

SEQ ID NO: 9162 - protein, 112 aa, Zea mays
  Coding DNA Sequence Number=SeqID_2886
  Gene Ontology: Mol. function=pantothenate kinase activity; Cellular component=cytoplasm; Biological process=coenzyme A biosynthetic process
  Homolog annotation: Hit_ID=A7FNJ3; Match level="QueryCoverage=100%, HitCoverage=35%, E-value=7e-49, Identity=82%"; Hit description =Pantothenate kinase
QSGMDYPHDPHHVFVSDFVDFSIYVDAPEDLLERWYVNRFLKFREGAFSEPDSYFHHYSQLPEEEAESIARGLWKEITWLYLKENILPTRERASLIMTKSADHAVQSVRLRK

SEQ ID NO: 9163 - protein, 161 aa, Zea mays
  Coding DNA Sequence Number=SeqID_2887
MGCFCASCASRAWMGLLLSLGVLALLAFAAGWRPCCPAFVWFWPVCLIGGGSSSFGWPSPFRWPARLVCSAGFPWSGRALELLFVSRPVRRLAPRRSVGSPPMLRVRPLGISVLPLPACPQLWGSGPLRQLPAALSCYGLSPRPAENTACAFRSEAFFSSG

SEQ ID NO: 9164 - protein, 97 aa, Zea mays
  misc_feature (77)..(77): Xaa can be any naturally occurring amino acid
  Coding DNA Sequence Number=SeqID_2888
  Gene Ontology: Cellular component=cell projection
  Homolog annotation: Hit_ID=A7QUN0; Match level="QueryCoverage=100%, HitCoverage=100%, E-value=9e-38, Identity=80%"; Hit description =Chromosome chr10 scaffold_179, whole genome shotgun sequence
MLRAKGENKHGKAIVPDKRKEGGSCTNERVARKINENKLLSKKNRWTPYGNTKCIICKQQVHQDAKYCHTCAYSNGXVCAMCGKQVLDTKLYKQSNV

SEQ ID NO: 9165 - protein, 245 aa, Zea mays
  Coding DNA Sequence Number=SeqID_2889
  Gene Ontology: Mol. function=ATPase activity, coupled to transmembrane movement of substances; Cellular component=integral to membrane; Biological process=response to antibiotic
  Homolog annotation: Hit_ID=A6TBS8; Match level="QueryCoverage=99%, HitCoverage=44%, E-value=3e-83, Identity=65%"; Hit description =Putative ATP-binding component of a transport system
  Pfam annotation: Domain name=ABC_tran; Domain location=150-244; Score= -34.5; E_value=0.00051; Accession=PF00005.17; Description=ABC transporter
QLNRERARLIYDTVYQEIATDYRRHIVRADTFHLSAVNWSNIMMLGAIGIVFFMANGLGWANTAVAATYSLTLLFLRTPLLAAVGALPTLLSAQVALRKINTFDLAPYSAGFKALPTVSDWQTLELRDVCFHYGEHGFAVGPINLTLRRGELVFLIGGNGSGKSTLAMLLTGLYQPHSGRLLLDGNEVDWHNLDAYRQHFSAVFTDVHLFDRLIRRGGEPANPALVQQWLERLKMQDKLKLQGNR

SEQ ID NO: 9166 - protein, 168 aa, Zea mays
  Coding DNA Sequence Number=SeqID_2890
  Subcellular localization annotation: CTP_CleavageSite=29; ConfidenceScore=5.30e-01
PIVSVARCPPRVRVPRFGLAASVPGHPLRSACRSCLWVSSGLLAPGSALPGLGAVPRYLLRGAAGLRVSCPPPPVVVGALVRPRGGAGPCAVWCRVRRGSCLAAAWGGARWGPAVVGCVCLLALWAPGLGFGFGGVVFLPGGRCVSAAAPVVVCLWHDGGLLGVGAVV

SEQ ID NO: 9167 - protein, 246 aa, Zea mays
  Coding DNA Sequence Number=SeqID_2891
  Homolog annotation: Hit_ID=Q7XIG3; Match level="QueryCoverage=100%, HitCoverage=29%, E-value=1e-122, Identity=84%"; Hit description =Putative uncharacterized protein OJ1339_F05.132
AVSLSEGERCHLNFGSHPFRYPVDGFDPLEAPPRSWSFVTYLLRCLFRLLEVHNLEKSESAYFEKLRRVKKFAPLQELFGPISEGICAEIFSAIEASQGCLEYIAWGSLITLLLDVFRTREPHDFSCLDQVLDLFLRFPGCTSLFQELIVALSCMCKVAPLVLTECPYSGSYPFLALVCHLLRHKDVMCLWWKAEDFVFSFEGFLTRKIPNKQDLQCLVPSVWWPGSSEDEVSMTLTMTTLSDAIK

SEQ ID NO: 9168 - protein, 138 aa, Zea mays
  Coding DNA Sequence Number=SeqID_2892
  Gene Ontology: Mol. function=transporter activity; Cellular component= membrane; Biological process=transport
  Homolog annotation: Hit_ID=A0HBS6; Match level="QueryCoverage=68%, HitCoverage=17%, E-value=3e-21, Identity=54%"; Hit description=RND efflux system, outer membrane lipoprotein, NodT family
VQSNVAAAQVSAADLANATLSAQASLAQDYVYLRTADANIALLNQTIAAYQDSLRITQNKYNAGTVSQADVLTAQTELEGAQSSLISEQATRAQYEHAIALLTGHAPADLSIPDGKQIASVPVAPPQVPSTLLQACKL

SEQ ID NO: 9169 - protein, 123 aa, Zea mays
  Coding DNA Sequence Number=SeqID_2893
QEQRRFAEELRSKGRWGELLLCEGEGAGEQGRPAQRRRGRPWRLLPLRKGGQGGGVKKSGRPWELLPLLCVVARPWEESAGLDAMEGSRGARPQGEEGGDHRAPWNRESSTMGEACLGACVLA

SEQ ID NO: 9170 - protein, 138 aa, Zea mays
  Coding DNA Sequence Number=SeqID_2895
MPAPLLRLCLGPAPIRDSHDAANTHQWGLTVDTLTRTMRRRGETSKQWQGSATGRLGLLLLGHDGCAATGPCERRHLLLRCAAAASSCPVSFLPPVPLLSPSLGPSIQRRGSPCGRRARRRRNHGTERQKKTMLDPAC

SEQ ID NO: 9171 - protein, 155 aa, Zea mays
  Coding DNA Sequence Number=SeqID_2897
  Gene Ontology: Mol. function=2-methylcitrate dehydratase activity; Biological process=propionate catabolic process
  Homolog annotation: Hit_ID=Q6D0L4; Match level="QueryCoverage=88%, HitCoverage=31%, E-value=1e-32, Identity=49%"; Hit description =Putative uncharacterized protein
MNLSHALAERILQSQPDTAARDTARTGVQDFLAVSWPVLQQQVPDSGLPALRQVYGDGSVRSQALLLGYAGHALDYDDFHADFRGHPSVAILPALNAWQQQQPATAEAFLDAYVIGVEVAGRLGLSASQQHYALGYHNTATLGTLSAAAALARLL

SEQ ID NO: 9172 - protein, 120 aa, Zea mays
  Coding DNA Sequence Number=SeqID_2898
  Gene Ontology: Mol. function=urea carboxylase activity; Cellular component=cytoplasm; Biological process=metabolic process
  Homolog annotation: Hit_ID=Q6D598; Match level="QueryCoverage=100%, HitCoverage=9%, E-value=1e-41, Identity=68%"; Hit description=Urea amidolyase
  Pfam annotation: Domain name=CPSase_L_chain; Domain location=1-113; Score=98.1; E_value=2.7e-26; Accession=PF00289.12; Description =Carbamoyl-phosphate synthase L chain, N-terminal domain
MFSTVLIANIDEIAYRAISTIKRLGVTSVAVYSDTDRNARHVTEADVAIALGGDKASDSYLRIDKILAAAQLAGAQAIWPVYGFLSESMPFAAACEEAGIAFVGPTAQQIGEFGLKHKRK

SEQ ID NO: 9173 - protein, 265 aa, Zea mays
  Coding DNA Sequence Number=SeqID_2899
  Gene Ontology: Mol. function=peptidase activity; Cellular component =integral to membrane; Biological process=intracellular signaling cascade
  Homolog annotation: Hit_ID=A8GK60; Match level="QueryCoverage=99%, HitCoverage=20%, E-value=3e-89, Identity=57%"; Hit description =Putative uncharacterized protein
RVDLQPRGYIDALALDIPLAQPEHTRLQARWRDLAWQHWELLPGISNLSGSASGSLNHGQLDVQMGQAEVPYGDMFQAPLQIQQVTGRINWLRDGNGLTLDGQQLDVQARSLWARGDFRYQQNVGKAPRLDILAGIRVTDAGDAWRYFPEPLMGHDLTQYLSEAVKGGQVENATLLFAGDPRLFPFKHHDGMFEVAVPVRNATFQFQPGWPALQNLDIDLDFINDGLWMKAAQTRLGAVDARNVSAVIPDYLKEKLIIDGNLSGE

SEQ ID NO: 9174 - protein, 72 aa, Zea mays
  misc_feature (8)..(8): Xaa can be any naturally occurring amino acid
  Coding DNA Sequence Number=SeqID_2900
  Gene Ontology: Cellular component=integral to membrane; Biological process=enterobacterial common antigen biosynthetic process
  Homolog annotation: Hit_ID=Q7MYM5; Match level="QueryCoverage=80%, HitCoverage=12%, E-value=1e-12, Identity=63%"; Hit description =Putative ECA polymerase
NAAILQAXCFGAIINMIVLAREGMDSFVYRVVFFGVVFGLCLIVAKLLYWLFDSARLVRNLSSPICLYHQKH

SEQ ID NO: 9175 - protein, 120 aa, Zea mays
  Coding DNA Sequence Number=SeqID_2901
  Gene Ontology: Mol. function=receptor activity
  Homolog annotation: Hit_ID=Q53PX8; Match level="QueryCoverage=34%, HitCoverage=8%, E-value=2e-17, Identity=90%"; Hit description=S -receptor kinase-like protein, putative
CWGAVHSGASGYCYLIDFPVETLVYEADDRKVGYFKVKKPPARPGDALASAVLSLVLASVILGRPGTASGRRAVPMCPSTVASFNVRPLGFDVVRQNRVSVAYKEELPFETNRTTEECEA

SEQ ID NO: 9176 - protein, 293 aa, Zea mays
  Coding DNA Sequence Number=SeqID_2902
  Homolog annotation: Hit_ID=A2YLN7; Match level="QueryCoverage=96%, HitCoverage=42%, E-value=3e-59, Identity=44%"; Hit description =Putative uncharacterized protein
MALDTGTAAGIDEAYEFSAPRFFDFVVEETEEAVRAAESWFEAARSHAPSPFNPRIKESRAEVKLAVLCDFAQAEEPAPEVNKQKEPADEMSGPPAAQEERDESPPSLEFLSATDLSVKSADGGSTSTLKMQTRYPAPPTNVAPASSTCDSSSVNTDARTPKMQVNMCRAGPTAASTNVKRSVMIKGGRDLVGTGKVATAGAEIAQENQAVKRQKLDDGRARQILNVKTKVLPHKARVDLAGSEMRRSHEDMRSAKEADPYVSAAELVKKFESGTRELSITHSRCRSHEDAAS

SEQ ID NO: 9177 - protein, 42 aa, Zea mays
  Coding DNA Sequence Number=SeqID_2903
  Gene Ontology: Mol. function=metalloendopeptidase activity; Cellular component=membrane; Biological process=proteolysis
  Homolog annotation: Hit_ID=Q94DI2; Match level="QueryCoverage=88%, HitCoverage=11%, E-value=7e-11, Identity=83%"; Hit description =Peptidase M48-like
AVLAHELGHLKCDHGVWLTFANILTMQTYTVPRVGYVPKNTS

SEQ ID NO: 9178 - protein, 247 aa, Zea mays
  Coding DNA Sequence Number=SeqID_2904
  Gene Ontology: Mol. function=pyridoxal phosphate binding; Cellular component=flagellum; Biological process=lipopolysaccharide biosynthetic process
  Homolog annotation: Hit_ID=Q39FL2; Match level="QueryCoverage=63%, HitCoverage=38%, E-value=2e-60, Identity=71%"; Hit description =DegT/DnrJ/EryC1/StrS aminotransferase
  Pfam annotation: Domain name=DegT_DnrJ_EryC1; Domain location=1-165; Score=-191.6; E_value=0.0088; Accession=PF01041.8; Description =DegTDnrJEryC1StrS aminotransferase family
MQGITRSGFDGMDCNVLAGKYNLTDVAARVGLGQLPHLERFTAQRRALARAYFAALAGGPAAKLGLGLPVADFENSNWHMFQVTLPLDRLSISRADFMAQMKERGIGTGVHYPAIHLFTLYRSLGFKEGMFPHAERYGASTVTLPLFTQMTEDDVPRAGHPGAANPEVSVIIPVYNEEDGLAALFARLYPALDALGTSYEVILINDGSRDRSAAMLADQFHVGPDTKGVVLLNGHYGQHMAILAGFA

SEQ ID NO: 9179 - protein, 127 aa, Zea mays
  Coding DNA Sequence Number=SeqID_2905
  Gene Ontology: Mol. function=thiamin phosphate kinase activity; Biological process=thiamin biosynthetic process
  Homolog annotation: Hit_ID=A6T5F0; Match level="QueryCoverage=97%, HitCoverage=38%, E-value=6e-45, Identity=71%"; Hit description =Thiamine monophosphate kinase
QGQALRNLATSAIDLSDGLISDLGHILTASRVGARINLDALPLSAALRDHFEPEQVLRWALSRGEDYELCFTVPEVNRGALDVALGHLGVAYSCIGQIAPEAEGLTLLENGKPRSFHHKGFDHFDAK

SEQ ID NO: 9180 - protein, 184 aa, Zea mays
  Coding DNA Sequence Number=SeqID_2906
AAMKTLTTFYGYHPLEMVMHPLGLFPTEKRDDPMWCNRVSHVKDMWAMPPDQVGRITVQCMSTLYRLQALQSYTVAHLTNLAQTTKLTLDSREDFVVDLSSELLYDVQEELEEANDHLEMHHQDMEANEAESEGEEAPEKLEPAPDSDEKKRDCFQRGLNTKLRECLNTVHADNFNELVNLAIS

SEQ ID NO: 9181 - protein, 82 aa, Zea mays
  Coding DNA Sequence Number=SeqID_2907
  Gene Ontology: Mol. function=DNA-directed RNA polymerase activity; Cellular component=chloroplast; Biological process=transcription, DNA-dependent
  Homolog annotation: Hit_ID=Q6L3A5; Match level="QueryCoverage=63%, HitCoverage=3%, E-value=1e-14, Identity=71%"; Hit description=DNA -directed RNA polymerase subunit beta''
IPHRKRYGLDHDRQPNGDRQSFNNVLHGEGILDYLTPDRIVFNYHWNCFYPSILQDNSDLLAKKQRIFVLVIMLYHEKDEQK

SEQ ID NO: 9182 - protein, 70 aa, Zea mays
  misc_feature (22)..(22): Xaa can be any naturally occurring amino acid
  misc_feature (28)..(28): Xaa can be any naturally occurring amino acid
  misc_feature (51)..(51): Xaa can be any naturally occurring amino acid
  Coding DNA Sequence Number=SeqID_2908
  Gene Ontology: Mol. function=oxidoreductase activity; Cellular component=chloroplast; Biological process=electron transport
  Homolog annotation: Hit_ID=Q10RT5; Match level="QueryCoverage=88%, HitCoverage=9%, E-value=7e-14, Identity=62%"; Hit description =Pheophorbide a oxygenase, chloroplast, putative, expressed
AGREKGACYSSWTGNLVYDGAXDMMDLXGQENTLLSAYKESSVDVNHEYTXSHYTHTQCDRFVLAFRTWL

SEQ ID NO: 9183 - protein, 260 aa, Zea mays
  Coding DNA Sequence Number=SeqID_2909
  Gene Ontology: Mol. function=argininosuccinate synthase activity; Cellular component=cytoplasm; Biological process=amino acid biosynthetic process
  Homolog annotation: Hit_ID=A8GL82; Match level="QueryCoverage=100%, HitCoverage=64%, E-value=1e-137, Identity=91%"; Hit description =Argininosuccinate synthase
  Pfam annotation: Domain name=Arginosuc_synth; Domain location=1-259; Score=225.5; E_value=1.3e-64; Accession=PF00764.9; Description =Arginosuccinate synthase
QTGALYEGTYLLGTSMARPIIAKAQVELALKVGADALCHGATGKGNDQVRFETTYTALAPQLKVVAPWREWNLRSREALLDYLKERNIPTTASLEKIYSRDENAWHISTEGGVLESPWNAPNKDCWVWTVDPLEAPDQPENVTVSVEKGQVVAVNGEKLSPFQCLEKLNALGAKHGVGRIDIVENRLVGIKSRGCYETPGGTIMVNALRAVEQLVLDRDSFKWREQLGQEMSYVVYDGRWFAPLRQSIQAAAASLAELVN

SEQ ID NO: 9184 - protein, 70 aa, Zea mays
  misc_feature (23)..(23): Xaa can be any naturally occurring amino acid
  misc_feature (49)..(49): Xaa can be any naturally occurring amino acid
  Coding DNA Sequence Number=SeqID_2910
  Homolog annotation: Hit_ID=A7BPF2; Match level="QueryCoverage=98%, HitCoverage=94%, E-value=3e-16, Identity=65%"; Hit description=LacZ alpha peptide
MDAPCSGTFSALGVGVTRRETAXLASDLAPDPFAFFPYFVDTFAGYPRXAFTWGLPLRIHSNALQILDPT

SEQ ID NO: 9185 - protein, 140 aa, Zea mays
  Coding DNA Sequence Number=SeqID_2911
PPPAWEALAPHAVERAIPATPDLPPVGQEEPVIPWQDMTRAGGEPSVFNPIPFQPSFDTSSVTRLYVGLPFPSGCLDSEEEGSLSFGLDFSGLRDPDGESYDPTRECLHIDPEIPDEGDHLGMPREGKKPPPRVREAVEP

SEQ ID NO: 9186 - protein, 111 aa, Zea mays
  Coding DNA Sequence Number=SeqID_2913
  Gene Ontology: Mol. function=protein binding; Cellular component =nucleus; Biological process=regulation of transcription
  Homolog annotation: Hit_ID=A2Y676; Match level="QueryCoverage=97%, HitCoverage=25%, E-value=1e-43, Identity=80%"; Hit description =Putative uncharacterized protein
TPAPRERAMSVTELAEYVDLMPWHRFGFTASNGAILRAVVGSAAVHVVDLSVTRCMQWPTLIDMLSKRPGGPPELRITVPSARPAVPPQLGVSDAEIGLRLANFAKSKGVQ

SEQ ID NO: 9187 - protein, 153 aa, Zea mays
  Coding DNA Sequence Number=SeqID_2914
  Gene Ontology: Mol. function=signal transducer activity; Cellular component=membrane; Biological process=signal transduction
  Homolog annotation: Hit_ID=A7MQ09; Match level="QueryCoverage=100%, HitCoverage=12%, E-value=1e-48, Identity=60%"; Hit description =Putative uncharacterized protein
MLNMLFAVLTSRLAWGFVGITALSFIIWVIGPVFSIVDSRPLEPEQNRIISIALLYLVWGLSQAIPRLYNFWLNRKLMSSLETSKSDAPEQDRKRLTNEEQVLASRFSEATDMLKKAHFQRASSKGAPFWAQRFSHQYLYQLPWYMIIGAPGA

SEQ ID NO: 9188 - protein, 127 aa, Zea mays
  Coding DNA Sequence Number=SeqID_2915
  Homolog annotation: Hit_ID=A2WLM0; Match level="QueryCoverage=98%, HitCoverage=33%, E-value=3e-44, Identity=72%"; Hit description =Putative uncharacterized protein
  Pfam annotation: Domain name=Ndr; Domain location=1-127; Score=-94.3; E_value=0.0025; Accession=PF03096.5; Description=Ndr family
DVPVPSVDDLADQVADVLDFFSLGSVMCLGVTAGAYVLTLFAVKCYVHAPSQTKYRERVLGLMLVSPVCKAPSWSEWLYNKVLSNLLYYYGTRGLVKESLLQRYFSMDVRGNGQDPESEMYQACRHA

SEQ ID NO: 9189 - protein, 110 aa, Zea mays
  Coding DNA Sequence Number=SeqID_2916
DPWKEGRPTPFETAPVATNVVVATNDVALAAGALGEITPRWWRQRRVRWWWWLWWQRTRWWWWRRHNEPMRALSLGAGLLGPTSSPLTLLGGSKGLGVEAGPALGAPLAG

SEQ ID NO: 9190 - protein, 118 aa, Zea mays
  Coding DNA Sequence Number=SeqID_2918
  Homolog annotation: Hit_ID=A8GBP8; Match level="QueryCoverage=99%, HitCoverage=11%, E-value=5e-38, Identity=66%"; Hit description =Virulence protein SrfB
MLAPLTDYKHGITLIQDSGIQFMDFALTPRLDAEFPGKFVRKTASGPLLRLQWEAESGKYQLPAEGGQAAEVVRPEFSYPLQQSLGLLEKLWLPLPFLRHTPAGLFLPGPDNWPLLQG

SEQ ID NO: 9191 - protein, 74 aa, Zea mays
  misc_feature (6)..(6): Xaa can be any naturally occurring amino acid
  Coding DNA Sequence Number=SeqID_2919
  Gene Ontology: Mol. function=nucleotide binding; Cellular component =myosin complex; Biological process=signal transduction
  Homolog annotation: Hit_ID=A2YD34; Match level="QueryCoverage=100%, HitCoverage=4%, E-value=3e-16, Identity=60%"; Hit description =Putative uncharacterized protein
LQNLAXRYQLNEIYVILGNILIAVNTFHRLPDLCDPHMMHPYKSARFGEKYSHVGAAADDVYTVSISAGSKKCI

SEQ ID NO: 9192 - protein, 129 aa, Zea mays
  Coding DNA Sequence Number=SeqID_2920
  Gene Ontology: Mol. function=N-acetyltransferase activity; Biological process=metabolic process
  Homolog annotation: Hit_ID=P76562; Match level="QueryCoverage=99%, HitCoverage=19%, E-value=9e-41, Identity=59%"; Hit description =Uncharacterized protein ypfI
MQQAGIRRLCVIAGEAGWARQEAATWQAALPGDWLTVSDSDDFPQRVAPAALRTLLGREFQHAIFDARHGFHAEAFAALAGTLRAGSWLLLLTPDWNAWPAQPDRDSLRWADVDQPIATPHFIHHLQQH

SEQ ID NO: 9193 - protein, 144 aa, Zea mays
  Coding DNA Sequence Number=SeqID_2921
AVLLPRLRCVHGTLAYEKAELDPVLMSNYAVTVTEIDEVRPVQTVQWFGCWNGRCLLMYSSASTGYTCMCFPEFGVRTSERYMGINGVGRAGGTKWWLVLGIAYDQPTRLPPANQCGPRMTRAFVDLLGRDQHGEPVPAERFLS

SEQ ID NO: 9194 - protein, 81 aa, Zea mays
  misc_feature (54)..(54): Xaa can be any naturally occurring amino acid
  Coding DNA Sequence Number=SeqID_2922
  Gene Ontology: Mol. function=catalytic activity; Biological process =metabolic process
  Homolog annotation: Hit_ID=Q41743; Match level="QueryCoverage=81%, HitCoverage=2%, E-value=4e-16, Identity=65%"; Hit description=Acetyl- coenzyme A carboxylase
LSEIPLQRGVELGSRLQINENTCLLQNDHAPSKLLHESPYKLLRYLVANGAHAXSYVPYPQVELMHMRKPLQSPESDVSSQ

SEQ ID NO: 9195 - protein, 96 aa, Zea mays
  Coding DNA Sequence Number=SeqID_2923
  Gene Ontology: Mol. function=nutrient reservoir activity; Cellular component=cell outer membrane; Biological process=defense response
  Homolog annotation: Hit_ID=P07728; Match level="QueryCoverage=97%, HitCoverage=18%, E-value=1e-35, Identity=82%"; Hit description =Glutelin type-A 1 precursor (Glutelin type I) [Contains: Glutelin type-A 1 acidic chain; ...
  Homolog annotation: Hit description=Glutelin type-A 1 basic chain]
MRAPKRPNPQAYRREVEERSQNIFSGFSTELLNEALGVSSQLARQLPCLNDQRGEIVRVEHRLILLQPYASLVEQEQRQVPSIERYQKGQYHQSQY

SEQ ID NO: 9196 - protein, 159 aa, Zea mays
  Coding DNA Sequence Number=SeqID_2924
WAVVSRGGDEEARYRGRRFALRARAARLGARAGEFALKRDSPCAQQLRFRILSQLLHPFAFELSTPLCIRTLLLCARAAADAMTLLCHLERFQSKGALNLVRNLLGWSAPVHAGRIRAGATPLGDLAAGEFVLFVSYLSYGLALSISPFFLVLLEEFGL

SEQ ID NO: 9197 - protein, 269 aa, Zea mays
  Coding DNA Sequence Number=SeqID_2926
  Gene Ontology: Mol. function=recombinase activity; Biological process= DNA recombination
  Homolog annotation: Hit_ID=P77698; Match level="QueryCoverage=97%, HitCoverage=51%, E-value=6e-74, Identity=51%"; Hit description =Uncharacterized protein ybcK
  Pfam annotation: Domain name=Recombinase; Domain location=96-192; Score=58.8; E_value=1.9e-14; Accession=PF07508.4; Description =Recombinase
  Pfam annotation: Domain name=zf-GRF; Domain location=212-247; Score =0.9; E_value=0.024; Accession=PF06839.3; Description=GRF zinc finger
  Pfam module annotation: Pfam domain module=Recombinase::zf-GRF; Domain location=96-192::212-247
DATERLKIFLRSGVEVVTLCDHTHYSIDSLDDPYVLIKAILIAQRANEESETKSRRMRAAWQKKREDAAATGKLITRSCPRWLTVSPDGEKFELIEEHARTINVIFRLRLKGSSLNGITKTLNERGVPTLTGEIGRWNPSTIESLLGNKALTGTFTPSYQTMAKGVSEISGYFPQVVPDKLFHDVQGVRLARFGNPGVSDNPYLINIFRSLMYCGTCGHSIILTSVDKKGRGYYACPMRRLKRCNEPAIRRDHVDAALVDVLLCSMDML

SEQ ID NO: 9198 - protein, 155 aa, Zea mays
  misc_feature (138)..(138): Xaa can be any naturally occurring amino acid
  Coding DNA Sequence Number=SeqID_2927
  Gene Ontology: Mol. function=transporter activity; Cellular component= integral to membrane; Biological process=transport
  Homolog annotation: Hit_ID=A8AJV6; Match level="QueryCoverage=96%, HitCoverage=36%, E-value=3e-60, Identity=76%"; Hit description =Putative uncharacterized protein
PHVVDLQAQRHETLAQSATQPDSRSFWQRSRAFWTMVGLRIGENGPSYLAQGFIVCYVAKVLMLDKSVPTTAVFIASLLGFLIIPFAGWLSDRFGRRIIYRGFCLLLMVYAWPAFSLMDSLEPAIVIPVIVVGMALAXLGIFGVQAAWGVEMLGV

SEQ ID NO: 9199 - protein, 90 aa, Zea mays
  misc_feature (81)..(81): Xaa can be any naturally occurring amino acid
  Coding DNA Sequence Number=SeqID_2928
  Gene Ontology: Mol. function=nucleic acid binding; Cellular component= nucleus; Biological process=DNA integration
  Homolog annotation: Hit_ID=A3AQP5; Match level="QueryCoverage=100%, HitCoverage=10%, E-value=7e-25, Identity=66%"; Hit description =Putative uncharacterized protein
LHDEKGFSPDDLQELVHSLFYGGQRGPPAISVVAPIWYAHLAAAQIGPFIKFHKMSETSSSHGGHISAGSVPVQELPRLHXKVRSPMFFC

SEQ ID NO: 9200 - protein, 102 aa, Zea mays
  Coding DNA Sequence Number=SeqID_2929
  Homolog annotation: Hit_ID=A2Z0I5; Match level="QueryCoverage=98%, HitCoverage=30%, E-value=4e-16, Identity=44%"; Hit description =Putative uncharacterized protein
QGQEPERSQEEDAAPPANALMLMRCRSAPAKGLARRVEAEEEREDVKIATNKTPEKETEKERESLVLMTYSPDFFKVSLDIAKETWIVGGDDAVLRCRSWKR

SEQ ID NO: 9201 - protein, 68 aa, Zea mays
  misc_feature (30)..(30): Xaa can be any naturally occurring amino acid
  Coding DNA Sequence Number=SeqID_2930
  Gene Ontology: Mol. function=rRNA N-glycosylase activity; Cellular component=nucleus; Biological process=negative regulation of translation
  Homolog annotation: Hit_ID=Q8LM02; Match level="QueryCoverage=89%, HitCoverage=4%, E-value=6e-19, Identity=68%"; Hit description =Putative TNP2 transposon
TYLFGKGSGRQPTPSEDGNVLMWKKNSILXHLPYWIVLDVFHSFDIMHLTKNLCVNILGFLSLALKEL

SEQ ID NO: 9202 - protein, 63 aa, Zea mays
  Coding DNA Sequence Number=SeqID_2931
  Homolog annotation: Hit_ID=Q2HV32; Match level="QueryCoverage=74%, HitCoverage=14%, E-value=6e-14, Identity=78%"; Hit description =Cellular retinaldehyde binding/alpha-tocopherol transport; Cellular ...
  Homolog annotation: Hit description=retinaldehyde-binding/triple function, N-terminal
DLSYFVRKGLPIFGIGVGHSTYDKASVHYYVQSHIQINEYRDRIILVSIRQNALSLRITYVNI

SEQ ID NO: 9203 - protein, 170 aa, Zea mays
  Coding DNA Sequence Number=SeqID_2932
  Gene Ontology: Mol. function=cation transmembrane transporter activity; Cellular component=integral to membrane; Biological process=cation transport
  Homolog annotation: Hit_ID=Q1IBV8; Match level="QueryCoverage=100%, HitCoverage=16%, E-value=4e-82, Identity=92%"; Hit description=RND divalent metal cation efflux transporter CzcA
IIVDGAVVIVENAIRRLAHAQQRHGRMLTRTERFHEVFAAAREARRPLIYGQLIIMVVYLPIFALTGVEGKMFQPMAFTVVIALLGAMILSVTFVPAAIALFVTGKVKEEEGLIMRTARQRYAPVLAWVLGRRKLAFAGAATLVLLSGVMASRMGSEFIPSLSEGDFALQ

SEQ ID NO: 9204 - protein, 181 aa, Zea mays
  Coding DNA Sequence Number=SeqID_2933
  Homolog annotation: Hit_ID=A1TIT9; Match level="QueryCoverage=83%, HitCoverage=44%, E-value=7e-11, Identity=28%"; Hit description =Mannosyltransferase OCH1-related enzyme
MDVIGYYREIATVNYLAPVIENWFLAAAPNNPFIREWQKQYAPIKHLGAHNYFNELAKRDDFALLTQKIAEPAQQLGSLAQQAAMREHRRVNLYLRKCEANAYYYQRLNNWQSDAFAHTVLFHQRPHTPPPVIKLSGIEQLHLDFNLRLGNYNRRSLLGAMMQPSAPLSAPLASPINKARA

SEQ ID NO: 9205 - protein, 219 aa, Zea mays
  Coding DNA Sequence Number=SeqID_2934
  Gene Ontology: Mol. function=structural constituent of ribosome; Cellular component=ribonucleoprotein complex; Biological process =translation
  Homolog annotation: Hit_ID=Q4PM05; Match level="QueryCoverage=98%, HitCoverage=99%, E-value=6e-83, Identity=69%"; Hit description=60S ribosomal protein L10a
  Pfam annotation: Domain name=Ribosomal_L1; Domain location=7-215; Score=247.7; E_value=2.6e-71; Accession=PF00687.11; Description =Ribosomal protein L1pL10e family
MVVYSKITKDALFECVNYVVEKSQEKKRNFVETVELQVGLKNYDPQRDKRFSGTVKLRNIPRPRFTVCILGDQQHCDEAAANNLPFKSAEDLKKLNKNKKLIKKLAKKYDAFLASESLIKQIPRLLGPGLNKAGKFPTLLTHSENMIEKIDEVKATIKFQMKKVLCLGLAVGNVGMSSEQLAQNINLAINFLVSLLKKNWQNVKSLHVKSTMGPSFRLY

SEQ ID NO: 9206 - protein, 104 aa, Zea mays
  misc_feature (32)..(32): Xaa can be any naturally occurring amino acid
  Coding DNA Sequence Number=SeqID_2935
  Homolog annotation: Hit_ID=A6T6J7; Match level="QueryCoverage=98%, HitCoverage=25%, E-value=9e-36, Identity=66%"; Hit description =Putative uncharacterized protein
  Pfam annotation: Domain name=BLUF; Domain location=2-94; Score=144.8; E_value=2.4e-40; Accession=PF04940.3; Description=Sensors of blue -light using FAD
MLTTILYRSHLYDHVPIKTLEDMVGKANKKNXSSDVTGILLFDGRHFFQLLEGPDQAVQGIYDRICRDARHHNLVELMHDFAPARRFGNVGMELFDLREHDKYS

SEQ ID NO: 9207 - protein, 122 aa, Zea mays
  Coding DNA Sequence Number=SeqID_2936
  Homolog annotation: Hit_ID=O48967; Match level="QueryCoverage=100%, HitCoverage=26%, E-value=2e-39, Identity=68%"; Hit description =Putative uncharacterized protein
MMVRIVEHRAETLKDFVMEQEVASSVPRVPDRPDSGTAAVHAARQHTTAQTSRTPSRAAPGALSAARELLRHPPSSTASLGAMKQWQDDVDRLLSMAHSTSTRSRPRSSRCQHEVSTSVHLP

SEQ ID NO: 9208 - protein, 80 aa, Zea mays
  Coding DNA Sequence Number=SeqID_2937
PNNGGKEEPATRALGRPRPSGLHPPGIGDLGGPGKSKGPHLRDLGPHPPGKPGPQAERDWPKQGKPLGKGVHAPARAAKG

SEQ ID NO: 9209 - protein, 259 aa, Zea mays
  Coding DNA Sequence Number=SeqID_2938
  Gene Ontology: Mol. function=protein binding
  Homolog annotation: Hit_ID=Q5PC33; Match level="QueryCoverage=98%, HitCoverage=44%, E-value=6e-91, Identity=59%"; Hit description =Putative exported protein
LACLQGPDWTVTDLDLTLKNITLRGDDWQSDDGSLAMNAGNFINGSFELNDPIVNAEFSPQGIQLTQFSSRWVNGVIRASGSWTRSDKRLTLDDLAIAGLEYTLPQNWRDRWQQTLPGWLDSVLVKRATANRNLVIDINPAFPFQMTALDGNAENLLLARQHQWGIWAGKATFNAAEATFNRTDLRHPSISLNASDRQIEVSEMSAFNGSGLLEGTATAGQEAQRPFTLNLKGQAVPANVLQNWGWPALPLSGSSNLQL

SEQ ID NO: 9210 - protein, 264 aa, Zea mays
  Coding DNA Sequence Number=SeqID_2939
MASSSSVGTNLTQALEHQTRVLLSALDMRLQPHDGDYESRVADSERACLVALPTATNHSILAELDKRFAAGDSKWELRVGALEPSTVGFAQHRDECSSVFRADVKAHLSAATLPCVGTRVAALQSALHVFDARRPRVMLPVFEDHVISEQLPGVHDCLDNPITTFLGPNINTDGAAGRTVRAAAAGWSRVPHAGSDPYEPDGAAPGRGRAGAATPAPGRHVRGLPQQAACHDQEGNYKIIAKAVNEVYRAVDPFGAVVARGNKQ

SEQ ID NO: 9211 - protein, 101 aa, Zea mays
  Coding DNA Sequence Number=SeqID_2941
  Gene Ontology: Mol. function=lipid transporter activity; Cellular component=integral to membrane; Biological process=lipid transport
  Homolog annotation: Hit_ID=Q8X4N7; Match level="QueryCoverage=100%, HitCoverage=25%, E-value=1e-32, Identity=69%"; Hit description =Lysophospholipid transporter lplT
MLRSLIASAQLLWRNGETRFSLLGTSLFWGAGVTLRFLLVLWVPMALGITDNKTPTTLNAMVAIGIVIGAAAAAKLVTLQTVRRCMPAGVLIGVMVVLFSL

SEQ ID NO: 9212 - protein, 229 aa, Zea mays
  Coding DNA Sequence Number=SeqID_2942
  Gene Ontology: Mol. function=signal transducer activity; Cellular component=membrane; Biological process=signal transduction
  Homolog annotation: Hit_ID=A7MK60; Match level="QueryCoverage=98%, HitCoverage=35%, E-value=1e-45, Identity=46%"; Hit description =Putative uncharacterized protein
MGLVSRLRNVRITRKLAAGFGIVLLLVALATALSVQRFNQIHDIYQKTNLIYDINIEVFQAKINRLKYLYGEDKAGGTMTDYVTHAQQLTQQAQQLPWTADARGLLNDVASHLARFQHSITAMTQATRQLNDLRSQLDALSQQDMTSRYTALIRTPVSTPELTNQIYQLLFAISNVREEAWALRFNVSEALRNKLEHDFQRAGQDMNTLLTQLPAEQQGGFNALWQDTE

SEQ ID NO: 9213 - protein, 80 aa, Zea mays
  misc_feature (9)..(9): Xaa can be any naturally occurring amino acid
  misc_feature (14)..(14): Xaa can be any naturally occurring amino acid
  Coding DNA Sequence Number=SeqID_2943
QTPPPHARXTDRQXHAKLHNSPLTSGNNAEDPEEQDSLFSTLIFAAKVECLAGCYFFLPLGYVRVLRNGGFLYGTVGYNN

SEQ ID NO: 9214 - protein, 115 aa, Zea mays
  Coding DNA Sequence Number=SeqID_2945
  Subcellular localization annotation: CTP_CleavageSite=52; ConfidenceScore=5.55e-01
PPPPPPPHPPPPHHPPLSPSYSSFSPHSPPPPPPPPPAHPPPTPPQKPQETRAPTRKGFRGCTISSLLHAEQKMILAPLIPSDPRTPQLVLIIVDKCSYSILYFVVVNNIAVVWV

SEQ ID NO: 9215 - protein, 129 aa, Zea mays
  Coding DNA Sequence Number=SeqID_2947
  Gene Ontology: Mol. function=transcription factor activity; Biological process=regulation of transcription, DNA-dependent
  Homolog annotation: Hit_ID=Q02IU8; Match level="QueryCoverage=73%, HitCoverage=31%, E-value=1e-26, Identity=66%"; Hit description =Probable transcriptional regulator
  Pfam annotation: Domain name=HTH_1; Domain location=42-101; Score =69.3; E_value=1.3e-17; Accession=PF00126.17; Description=Bacterial regulatory helix-turn-helix protein, lysR family
MPRAHSVRYGSFAIIAHLKLNQVQRGNESGDTKMPALQRNELADLNVFLLICRRKSFRLAALELGVTTSAISHTLRSLEARLGVRLLNRTSRAVVPTDAGAAFLRHLETGFAQIELALNDLHLYRESPS

SEQ ID NO: 9216 - protein, 126 aa, Zea mays
  Coding DNA Sequence Number=SeqID_2948
GVCMSPAKNSSIGMYGLDRWNVSRYLEQLGRSGSPNGALAGAQSSDRLESSALGEREPGHGLLQSTHSHPRRYRRSSAFGTGVLVERAVVEWPGLSGQAERIQVLLYRAREATVTGEPEIGTPPHA

SEQ ID NO: 9217 - protein, 135 aa, Zea mays
  misc_feature (45)..(45): Xaa can be any naturally occurring amino acid
  Coding DNA Sequence Number=SeqID_2950
  Gene Ontology: Mol. function=protein transporter activity; Cellular component=fimbrium; Biological process=cell adhesion
  Homolog annotation: Hit_ID=A7MIF7; Match level="QueryCoverage=97%, HitCoverage=90%, E-value=3e-40, Identity=56%"; Hit description =Putative uncharacterized protein
IELMIVIGIVAILSAIGLPAYQNYLQRAALTDMLQTMVPYKTAVXLCAIERGGPAQCQAGERGIPAAKGSRYVASLSVVNGAITLTGQESLTGLTVAMLPIWNAAEGALSWQRSCTSDNASLRDSCLEQFRFADK

SEQ ID NO: 9218 - protein, 102 aa, Zea mays
  Coding DNA Sequence Number=SeqID_2951
  Subcellular localization annotation: CTP_CleavageSite=41; ConfidenceScore=5.88e-01
MRAPSSTRRKMQNPPKKNVKLSSTSAGPAAVLPRTRRLAVVAAAPRPARPGPRARRPAVAVGVAARRCFVPRPHPELLHRLDGQHDLRHGGAAPGVPLEAAQ

SEQ ID NO: 9219 - protein, 138 aa, Zea mays
  Coding DNA Sequence Number=SeqID_2953
  Gene Ontology: Mol. function=protein binding; Cellular component =flagellin-based flagellum; Biological process=ciliary or flagellar motility
  Homolog annotation: Hit_ID=A8G9B5; Match level="QueryCoverage=97%, HitCoverage=42%, E-value=4e-62, Identity=83%"; Hit description =Putative transposase YhgA family protein
  Pfam annotation: Domain name=Transposase_31; Domain location=3-138; Score=172.9; E_value=8.3e-49; Accession=PF04754.3; Description =Putative transposase, YhgA-like
IIVKKPTPVPHDAAFKAFLTHPETARDFIELHLPPALRAVCDLSTLKLESGSFVEESLRAYYSDVLYSLKTTAGDGYIHVLIEHQSTPDRHMAFRLMRYAVAAMQRHLDAGHKKLPLVIRLLFYTGRRSPYPYSTDWL

SEQ ID NO: 9220 - protein, 158 aa, Zea mays
  Coding DNA Sequence Number=SeqID_2954
  Gene Ontology: Mol. function=aspartic-type endopeptidase activity; Cellular component=chromatin; Biological process=chromatin assembly or disassembly
  Homolog annotation: Hit_ID=Q8SA91; Match level="QueryCoverage=94%, HitCoverage=6%, E-value=4e-36, Identity=50%"; Hit description =Putative gag-pol polyprotein
  Pfam annotation: Domain name=Chromo; Domain location=53-109; Score =43.8; E_value=6.2e-10; Accession=PF00385.14; Description='chromo' (CHRromatin Organisation MOdifier)
YQVLERIGRVAYKLQLPADSAVHPVFHVSQLKRAVGRDSTLIPQLPNLSDPLQVPLSILHDQTRLVERGGELIRQVKVTWSDMPVELATWEDADALRARFPAAPAWGQAGSEGWGNVSTTQPVNEKEATEESSEGTKRLNRKRYRRPNMKYVGPQWVN

SEQ ID NO: 9221 - protein, 187 aa, Zea mays
  Coding DNA Sequence Number=SeqID_2955
  Gene Ontology: Mol. function=protein binding
  Homolog annotation: Hit_ID=A2WVV8; Match level="QueryCoverage=30%, HitCoverage=6%, E-value=3e-16, Identity=73%"; Hit description =Putative uncharacterized protein
MVDRELRFDELTFNDESAPHHLTPIHEALFSDGADPFFGEELDILTTSEFDIEQSSVDTRSLRTPPSAGEFERVEDMPGLRHLVVLSDRAVADVFVAYSTLKVFDQMPNPGFDGGPIFDEEPVFEGEPFPSTTDYIDALRNEMNEFKSKRDDVKRMVDSSERQGMEATSHVKWWLECVILLEDAAVR

SEQ ID NO: 9222 - protein, 76 aa, Zea mays
  Coding DNA Sequence Number=SeqID_2956
  Gene Ontology: Mol. function=sequence-specific DNA binding; Cellular component=nucleus; Biological process=regulation of transcription, DNA-dependent
  Homolog annotation: Hit_ID=A7UMR7; Match level="QueryCoverage=100%, HitCoverage=55%, E-value=5e-21, Identity=62%"; Hit description =Homeodomain-leucine zipper transcription factor
  Pfam annotation: Domain name=HALZ; Domain location=19-63; Score=36.4; E_value=9.9e-08; Accession=PF02183.8; Description=Homeobox associated leucine zipper
QPRQVAIWFQNRRARWKTKQLEKDYDALRRQLDAARAENDALLSLNKKLQAEVCTMMQEAASELINLNVKETEASC

SEQ ID NO: 9223 - protein, 133 aa, Zea mays
  Coding DNA Sequence Number=SeqID_2957
  Gene Ontology: Cellular component=membrane
  Homolog annotation: Hit_ID=Q4IW25; Match level="QueryCoverage=89%, HitCoverage=28%, E-value=1e-42, Identity=68%"; Hit description=MscS Mechanosensitive ion channel
TKPSHNYKRMQQRRIVFKFGINYGTPAEKVRQIGGMVQRIIEGVPDTRFDRAHFLSFDESQLTFEVVYFVLSADYNKYMDIQQEINLQLMAQLEQKQIRFAFPMRRVEFTGGVLPRINLSDASNEAAAERAQH

SEQ ID NO: 9224 - protein, 80 aa, Zea mays
  Coding DNA Sequence Number=SeqID_2958
  Gene Ontology: Mol. function=hydrolase activity, acting on glycosyl bonds; Cellular component=cell outer membrane; Biological process =cell wall organization and biogenesis
  Homolog annotation: Hit_ID=Q52VQ8; Match level="QueryCoverage=98%, HitCoverage=40%, E-value=8e-32, Identity=83%"; Hit description =Membrane-bound lytic murein transglycosylase
QDSALAGIRDPLTLRYATIVSYANGAGALLRTFSRDRERAIAMINAMTPDEFYQHVQNKHPAAQAPRYLWKVTTAYRTIG

SEQ ID NO: 9225 - protein, 113 aa, Zea mays
  Coding DNA Sequence Number=SeqID_2959
  Gene Ontology: Mol. function=glyceraldehyde-3-phosphate dehydrogenase (phosphorylating) activity; Cellular component=cytoplasm; Biological process=pyridoxal phosphate biosynthetic process
  Homolog annotation: Hit_ID=Q57K44; Match level="QueryCoverage=100%, HitCoverage=32%, E-value=3e-49, Identity=82%"; Hit description=D -erythrose-4-phosphate dehydrogenase
  Pfam annotation: Domain name=DapB_N; Domain location=3-83; Score= -39.0; E_value=0.093; Accession=PF01113.11; Description =Dihydrodipicolinate reductase, N-terminus
  Pfam annotation: Domain name=Gp_dh_N; Domain location=3-112; Score =112.7; E_value=1.1e-30; Accession=PF00044.14; Description =Glyceraldehyde 3-phosphate dehydrogen
  Pfam module annotation: Pfam domain module=DapB_N::Gp_dh_N; Domain location=3-83::3-112
MTIRIAINGFGRIGRNVLRALYETGRRAEITVVAINELAEAAGMAHLLKYDTSHGRFAFDVRQEREQLWVGDDTIRILHQAEIAALPWRELNVDIVLDCTGVYGSRDDGEAHL

SEQ ID NO: 9226 - protein, 70 aa, Zea mays
  Coding DNA Sequence Number=SeqID_2960
  Gene Ontology: Mol. function=monooxygenase activity
  Homolog annotation: Hit_ID=A2VYR8; Match level="QueryCoverage=100%, HitCoverage=12%, E-value=9e-33, Identity=92%"; Hit description =Luciferase
FAGQLAELDAFLGWGVAEDHPLAGAVAMPVPPHAPERILLGGSPDSGALAARHGWRLCYAGHFDGDDANL

SEQ ID NO: 9227 - protein, 302 aa, Zea mays
  Coding DNA Sequence Number=SeqID_2961
  Gene Ontology: Mol. function=aspartic-type endopeptidase activity; Cellular component=chromatin; Biological process=DNA integration
  Homolog annotation: Hit_ID=Q10C26; Match level="QueryCoverage=88%, HitCoverage=23%, E-value=2e-81, Identity=55%"; Hit description =Retrotransposon protein, putative, unclassified
  Pfam annotation: Domain name=RVT_2; Domain location=118-303; Score =311.9; E_value=1.2e-90; Accession=PF07727.4; Description=Reverse transcriptase (RNA-dependent
  Subcellular localization annotation: CTP_CleavageSite=49; ConfidenceScore=5.75e-01
EGTASPTTPNAALATPPSLSATSTSRTSTPTCGSASRTPQAPGSGSGARSALLPEVDDNLDVDPNHAPLRYQSITDIMGQEPAPGLVEQASDQELLMATGNEPLTTEEAMSSEQWRTAMLEEMASIEHNKTWTLVNLPAGQRAIGLKWVFKIKHNEHGDVTKYKARLVAKGYVQKKGIDFEEVFAPVARMESVRLMLAVAAHRGWSVHHMDVKSAFLNGDLHEEVYVTQPPGFQNPEKGQLVLKLNKAVYGLKQAPRAWNIKLDSELASLGFSRCKVEHVVYRRGVGKSMLIIGVYVDDLIK

SEQ ID NO: 9228 - protein, 104 aa, Zea mays
  Coding DNA Sequence Number=SeqID_2962
  Gene Ontology: Mol. function=transporter activity; Cellular component= integral to membrane; Biological process=cell division
  Homolog annotation: Hit_ID=Q84CV4; Match level="QueryCoverage=79%, HitCoverage=27%, E-value=3e-28, Identity=68%"; Hit description =Putative resistance protein YegO
HLQRGEGIAPEEAIFRAAVLRFRPILMTTFAAVLGALPLAIGIGQGASLRQPLGLTIIGGLLVSQALTLYTTPVLYLWLERLGTTLRGGRDKAAPRSGSIVEAP

SEQ ID NO: 9229 - protein, 71 aa, Zea mays
  Coding DNA Sequence Number=SeqID_2963
  Gene Ontology: Mol. function=alcohol dehydrogenase activity; Cellular component=membrane; Biological process=electron transport
  Homolog annotation: Hit_ID=Q3KK78; Match level="QueryCoverage=97%, HitCoverage=15%, E-value=2e-14, Identity=60%"; Hit description =Cytochrome c, class I precursor
MKLKSLLIAHAVLLGSCAVQAQAADDASLIKKGEYLARLGDCMACHTVAGKADYAGGLAIESNLGTIYSTN

SEQ ID NO: 9230 - protein, 167 aa, Zea mays
  Coding DNA Sequence Number=SeqID_2964
  Gene Ontology: Mol. function=pyruvate dehydrogenase (cytochrome) activity; Cellular component=plasma membrane; Biological process =electron transport
  Homolog annotation: Hit_ID=P07003; Match level="QueryCoverage=99%, HitCoverage=29%, E-value=3e-79, Identity=86%"; Hit description =Pyruvate dehydrogenase [cytochrome] (EC 1.2.2.2) (Pyruvate oxidase) (POX) (Pyruvate ...
  Homolog annotation: Hit description=dehydrogenase [Ubiquinone]) [Contains: Alpha-peptide]
  Pfam annotation: Domain name=TPP_enzyme_N; Domain location=3-167; Score=251.6; E_value=1.7e-72; Accession=PF02776.8; Description =Thiamine pyrophosphate enzyme, N-termina
MKQTVAALLAKTLESAGVKRIWGVTGDSLNGLNDSLNRMGTIEWMPTRHEEVAAFAAGAEAQISGELAVCAGSCGPGNLHLINGLFDCHRNHVPVLAIAAHIPSSEIGSGYFQETHPQELFRECSHYCELVSNPEQLPQVLGIAMRKAILNRGVSVIVLPGDVALQV

SEQ ID NO: 9231 - protein, 82 aa, Zea mays
  Coding DNA Sequence Number=SeqID_2965
  Gene Ontology: Mol. function=oxidoreductase activity; Biological process=metabolic process
  Homolog annotation: Hit_ID=A8AGR4; Match level="QueryCoverage=96%, HitCoverage=17%, E-value=5e-23, Identity=65%"; Hit description =Putative uncharacterized protein
ACLQLANDSEFGLSATVWSGNEALAQELAEQLETGAVFINGNGASDPRVAIGGVKKSGYGRELSSFGVHEFCNIQTVWKNRR

SEQ ID NO: 9232 - protein, 144 aa, Zea mays
  misc_feature (94)..(94): Xaa can be any naturally occurring amino acid
  Coding DNA Sequence Number=SeqID_2966
  Gene Ontology: Mol. function=protein serine/threonine kinase activity; Cellular component=integral to membrane; Biological process=protein amino acid phosphorylation
  Homolog annotation: Hit_ID=Q9FI77; Match level="QueryCoverage=99%, HitCoverage=12%, E-value=3e-27, Identity=47%"; Hit description =Receptor protein kinase-like protein
CSGVVCRVNITPGRVISVKKCVPSHQTRGQFKDDGTNGRVRDLFSGRVGRVGSIRPKDIVRFLGWCWNKSHRLVMYEYMAHGNLGRCLQQRAGXAAHLNWKPRDNKAHHILIGLGFQANHSGFGLAQLVQDGGFGRLFNNVAGF

SEQ ID NO: 9233 - protein, 171 aa, Zea mays
  Coding DNA Sequence Number=SeqID_2967
  Gene Ontology: Mol. function=transcription factor activity; Cellular component=intracellular; Biological process=regulation of transcription, DNA-dependent
  Homolog annotation: Hit_ID=A2Z2H7; Match level="QueryCoverage=100%, HitCoverage=21%, E-value=2e-50, Identity=61%"; Hit description =Putative uncharacterized protein
MAANGALTLQVARALQRLTLRWGESIGLLGFDELEWAALAGVGITTLKQPTWQIGYAALEQVIARIEGSEQPIREQVFSARQAGGKMSKAEIIVVTAAYGAHKVAELGGQAALLPLIKAAGADGVEIRRELFSDDELCQLHTLSDALRQHQLSVSYSVPEALWQADGALNP

SEQ ID NO: 9234 - protein, 72 aa, Zea mays
  Coding DNA Sequence Number=SeqID_2968
  Gene Ontology: Mol. function=phosphoprotein phosphatase activity
  Homolog annotation: Hit_ID=Q8ZNY9; Match level="QueryCoverage=97%, HitCoverage=32%, E-value=5e-20, Identity=64%"; Hit description =Serine/threonine-protein phosphatase 1
MFYQTLRANNWRNIWVVGDLHGCRAQLDAQLLRQGFDRQQDLLLSVGDLIDRGPDSLGCLQLLEEPWFRCVR

SEQ ID NO: 9235 - protein, 96 aa, Zea mays
  Coding DNA Sequence Number=SeqID_2969
  Gene Ontology: Mol. function=hydrolase activity, acting on glycosyl bonds; Cellular component=beta-galactosidase complex; Biological process=carbohydrate metabolic process
  Homolog annotation: Hit_ID=Q10RB4; Match level="QueryCoverage=71%, HitCoverage=8%, E-value=3e-24, Identity=72%"; Hit description=Beta -galactosidase 5 precursor
  Pfam annotation: Domain name=Gal_Lectin; Domain location=1-72; Score =87.7; E_value=3.6e-23; Accession=PF02140.8; Description=Galactose binding lectin domain
QSISAIRFASFGTPVGTCGNFQQGGCHSASSHAVLEKRCIGLHTCVVAISPDNLGGDPCPSVTKSVSIETGVLSHRLGLACPPALTSPTHRATDLK

SEQ ID NO: 9236 - protein, 78 aa, Zea mays
  Coding DNA Sequence Number=SeqID_290
RGLQLLHRHLLTLSIMRILRVMRSKGRYGVVMVVAAMRRATWRRLMGACPINLSSQPAEKRELVSRQFSRAVGAKRCT

SEQ ID NO: 9237 - protein, 241 aa, Zea mays
  misc_feature (32)..(32): Xaa can be any naturally occurring amino acid
  Coding DNA Sequence Number=SeqID_292
  Homolog annotation: Hit_ID=Q67V39; Match level="QueryCoverage=78%, HitCoverage=44%, E-value=5e-13, Identity=61%"; Hit description =Phosphatase-like
MAAGDAGRAPTAAAAQSLVESFCGVTSATPQXAAFYLESHNWALESAVRSYYDSVDGEADAVAADPVPPPPAAPAGGGEDTEDEDCVVGGGGGGDDDEDDEDYVDGDGSDDEDAALAAEAAEEEERRRPFKRLKRTHDARGGSGSSAKARGNVRTLADLDSGKGTAGSDENSEDDDEWTPPPEYETRDRSRRKNNTDEIFKQALNARVRVVVSSLQLYIVYTYPVWLSSFHREPLLEYMGN

SEQ ID NO: 9238 - protein, 111 aa, Zea mays
  Coding DNA Sequence Number=SeqID_293
  Subcellular localization annotation: CTP_CleavageSite=56; ConfidenceScore=5.15e-01
KSPCLANKGPHRAPPHPQPASCMSSSPAAYHPPLTPLLIIVVPSPHRICCCYAAFRCSASSSELRAPPSALYRYPVPRHAGAQAIITPRLADFLRPTDPPPVPCCLLNPCV

SEQ ID NO: 9239 - protein, 340 aa, Zea mays
  Coding DNA Sequence Number=SeqID_295
  Gene Ontology: Mol. function=methyltransferase activity; Cellular component=cytoplasm; Biological process=ribosome biogenesis and assembly
  Homolog annotation: Hit_ID=Q94H97; Match level="QueryCoverage=92%, HitCoverage=92%, E-value=1e-150, Identity=82%"; Hit description =Putative methyltransferase
  Pfam annotation: Domain name=Ank; Domain location=47-79; Score=37.8; E_value=3.9e-08; Accession=PF00023.20; Description=Ankyrin repeat
KGDSIAPPKKMAAAPEELLCAAAKSGEEGEVAKLLASGADATHFDADGLTPLMHAAAGGHAAVARLLLDCGAPWNALSPSGLSAGDIASDPDTYDLLLGHALRSELVLGTVARRQAAPANGPPAESYLESRVSFSEERVMDAESKAVMMAWERPLMEAHARAVCQGGGKVLNVGFGMGLVDEAIQRYGPEEHTIVEAHPEVYERMLKLGWGDKKNVRIVFGRWQDVMPQLGSYDGIFFDTYGEYYEDMREFHQHLPKLLKPGGIYSYFNGLCGDNAFFHAVYCQLVALELANLGYSTQFIPLPVKDCLAEEVWKGVKRKYWQLDTYYLPACQPESESTIS

SEQ ID NO: 9240 - protein, 173 aa, Zea mays
  Coding DNA Sequence Number=SeqID_296
SPSTLLYTAAVSQPLSHQVNSERRQAPTHDDHHHHLELQAMANVLLRSSSLPLALVPPPLLLLLVAGSLAGATALGSFPGERRGRSLQQLPNPMPQPVPQPQPDPNVRPQPGSPNPLPPQPLPQPNPNPQPQPLPQPQPGPQPDPNPQPQPQPQPLPQPQPGPIPPQPDPNRN

SEQ ID NO: 9241 - protein, 84 aa, Zea mays
  Coding DNA Sequence Number=SeqID_298
IISLLFNHFEFDHLLFCNLLYMHACMHVFLDLSAAVFVAFRSPLSNLFSNIYKVSGVPNQVPSLYVYIISSNYIALLGCPQFSL

SEQ ID NO: 9242 - protein, 239 aa, Zea mays
  Coding DNA Sequence Number=SeqID_300
CTTPWSSPAEPLSHALGPPLVGHGRRVIRPPFYYLPARPCLFFLEPRLHCSSTKPRRRALLAMVGSGLLLPLRYVLALSSSRRPGLHPSSPRSDEDPPRAPLDNRRCLPRRGLRPSTSSGPAASSSLLPCWLSISLSCSALIPPMQRLHGCGQRPMLASCTWSTSVHATPCFSSVRTSSMTVVYVVEARHHSDVLGSSDHYRRPRCCCRHRDSCTACSTKYPSQVDITYNLSCPGQCIV

SEQ ID NO: 9243 - protein, 107 aa, Zea mays
  misc_feature (8)..(9): Xaa can be any naturally occurring amino acid
  misc_feature (69)..(69): Xaa can be any naturally occurring amino acid
  misc_feature (86)..(87): Xaa can be any naturally occurring amino acid
  misc_feature (90)..(90): Xaa can be any naturally occurring amino acid
  misc_feature (92)..(95): Xaa can be any naturally occurring amino acid
  Coding DNA Sequence Number=SeqID_302
PPPPPPLXXLHRGHRHRAGGHLLRQPGRCLDEGRGRLTLARARWRRSTKLGLFLWRKEREHRVCSVGLXTYAIMQSVVGMLVLLLXXLSXSXXXXLFCVVSFSSHQW

SEQ ID NO: 9244 - protein, 129 aa, Zea mays
  Coding DNA Sequence Number=SeqID_304
HGEAWPRYSSWSSPAEAVTHSTIYPGGRDGGQVTPTTNHPKEYLHQTDAQGLRSRRTRRVQSLGRRSLTVDFSKLGNCSRSGTAGFVETTGSGCCDGSGEVLGMAIHAQRGEESGDWSNMGVGGFSSSV

SEQ ID NO: 9245 - protein, 149 aa, Zea mays
  Coding DNA Sequence Number=SeqID_306
NDENADELTLFRSSFARILSSMGKAMENPNLNSQDDDTFLYLGSYSRLLQPKAELPEQGLPPLPPTSRSWYASFHPPRLTTGTGRSRHSSARPSSGCARSLNFEGGTNRQGLRTSHEGTTPWIGGGRQFIGSADQGLKMNVVGCGRERT

SEQ ID NO: 9246 - protein, 68 aa, Zea mays
  Coding DNA Sequence Number=SeqID_2970
  Gene Ontology: Mol. function=protein kinase activity; Biological process=protein amino acid phosphorylation
  Homolog annotation: Hit_ID=Q10S67; Match level="QueryCoverage=48%, HitCoverage=6%, E-value=3e-09, Identity=90%"; Hit description =Protein kinase family protein, putative, expressed
KICFLFSGRVTPESVIFSFGTVLLDLLSGKRIPPSHVSFLLEMSYALLDMRSVSANIKIHMPPMLADC

SEQ ID NO: 9247 - protein, 86 aa, Zea mays
  Coding DNA Sequence Number=SeqID_2971
MPNKGWGKELAAFKRQGHHGLIVGLYGAGGKGGEGTAATTNEFPPRTTTSATEASLGTTTGDGSSRITTLAADDPSASRAIREINA

SEQ ID NO: 9248 - protein, 125 aa, Zea mays
  Coding DNA Sequence Number=SeqID_2973
  Gene Ontology: Mol. function=transcription factor activity; Cellular component=cytoplasm; Biological process=regulation of transcription, DNA-dependent
  Homolog annotation: Hit_ID=A0TDR5; Match level="QueryCoverage=100%, HitCoverage=39%, E-value=2e-66, Identity=100%"; Hit description =Transcriptional regulator, LysR family
MHVRSYTMDRREVATALANGSVDIAIDAPLIGDPHLHQALLVRDRYACMIRDDHPFKGDTLTMDDYLSMGHIHVSSRRKGSGHVDAELTRLGLRRNIQMRVQHYMVAPLIAMRGDLALTAPLRLL

SEQ ID NO: 9249 - protein, 73 aa, Zea mays
  Coding DNA Sequence Number=SeqID_2974
  Subcellular localization annotation: CTP_CleavageSite=69; ConfidenceScore=5.72e-01
NLEPLKVITFFFFFLFFFFFFIFFYFFFFFFFFFFFFFFFFFFFFFFNQLTLFDFKDPKTSCLQLPIKSASIV

SEQ ID NO: 9250 - protein, 110 aa, Zea mays
  Coding DNA Sequence Number=SeqID_2976
  Gene Ontology: Mol. function=pseudouridylate synthase activity; Biological process=pseudouridine synthesis
  Homolog annotation: Hit_ID=Q83LF6; Match level="QueryCoverage=100%, HitCoverage=50%, E-value=1e-50, Identity=83%"; Hit description =Ribosomal large subunit pseudouridine synthase E
  Pfam annotation: Domain name=PseudoU_synth_2; Domain location=2-92; Score=-40.0; E_value=0.1; Accession=PF00849.12; Description=RNA pseudouridylate synthase
QAQLTQPGKRTGKIYYVQVEGVPQESDLSRLRSGITLNDGPTLPAGAEVVPEPAWLWPRTPPIRERKAIPTCWLKITLYEGRNRQVRRMTAHIGFPTLRLIRFAMGDYQL

SEQ ID NO: 9251 - protein, 93 aa, Zea mays
  Coding DNA Sequence Number=SeqID_2977
  Gene Ontology: Mol. function=acid phosphatase activity
  Homolog annotation: Hit_ID=A1YKE7; Match level="QueryCoverage=100%, HitCoverage=38%, E-value=3e-19, Identity=52%"; Hit description=Acid phosphatase
CAPHVRDYVTGSAYRSDLDLVARESTAYARAAAPAGAADGRDAWVFDVDETLLSNLPYYAEHGYGLELHKHRSKFTKKNPLIICFSSIYMYQQ

SEQ ID NO: 9252 - protein, 83 aa, Zea mays
  misc_feature (15)..(15): Xaa can be any naturally occurring amino acid
  Coding DNA Sequence Number=SeqID_2978
  Gene Ontology: Mol. function=oxidoreductase activity; Cellular component=mitochondrion; Biological process=metabolic process
  Homolog annotation: Hit_ID=Q2QYY6; Match level="QueryCoverage=79%, HitCoverage=19%, E-value=6e-18, Identity=64%"; Hit description=Trans- 2-enoyl-CoA reductase, mitochondrial, putative
KDVSLRGFWLQKWLXQTMIDYLFLMVLVHEGKLKCQMESISFGEFSLALEKAMGKHGSQPKQVIKFWDQGGLEDLRAYDCHRS

SEQ ID NO: 9253 - protein, 101 aa, Zea mays
  misc_feature (30)..(30): Xaa can be any naturally occurring amino acid
  misc_feature (75)..(75): Xaa can be any naturally occurring amino acid
  Coding DNA Sequence Number=SeqID_2979
  Gene Ontology: Cellular component=plasma membrane; Biological process= thiamin biosynthetic process
  Homolog annotation: Hit_ID=Q2NTU6; Match level="QueryCoverage=97%, HitCoverage=28%, E-value=7e-22, Identity=57%"; Hit description =Thiamin biosynthesis lipoprotein
HAIFALCSYRNYYELLGTRILHVIDPVQFXPIDHGVVSATVIANTDLEADGWDTGLMVLGTKRAKALALKQHLAXYLITKPGDGLSHWMSTQFKSLFIDQP

SEQ ID NO: 9254 - protein, 65 aa, Zea mays
  Coding DNA Sequence Number=SeqID_2980
  Gene Ontology: Mol. function=binding; Biological process=ethylene mediated signaling pathway
  Homolog annotation: Hit_ID=Q6K4K9; Match level="QueryCoverage=90%, HitCoverage=10%, E-value=1e-10, Identity=62%"; Hit description =Phosphatase 2A regulatory A subunit
MALIKETVILVYHRTDNFCVCWSLFSDQRNFVRLLADEGCAALGKLLEPQDCVAHILLFIVNFSQ

SEQ ID NO: 9255 - protein, 105 aa, Zea mays
  Coding DNA Sequence Number=SeqID_2981
  Gene Ontology: Mol. function=sugar:hydrogen symporter activity; Cellular component=integral to membrane; Biological process =carbohydrate transport
  Homolog annotation: Hit_ID=A2YMW2; Match level="QueryCoverage=66%, HitCoverage=15%, E-value=3e-27, Identity=85%"; Hit description =Putative uncharacterized protein
MCFCRSIVTLALTLLTSSQAILIVWSKRAGKYDYSVTTANFVETLKCLLSLVALSRIWNSQGVTEDNRLITSFDEVRVYPIPAMLYLVKNLLQVCPVAHSFCCRI

SEQ ID NO: 9256 - protein, 143 aa, Zea mays
  Coding DNA Sequence Number=SeqID_2982
  Homolog annotation: Hit_ID=A2YJX0; Match level="QueryCoverage=37%, HitCoverage=9%, E-value=7e-09, Identity=62%"; Hit description =Putative uncharacterized protein
LDPAVEDILITAAHVTLYDFDTDVNQWVRYACSGARLSDSPDPRRKDVEGSLFVVKSGKAPASSSSGRYGRLLFDPAQLHPPPPVFTPAVAGAARRKSGEQRGGRRRDCSLTHFPPFFHPLHSSLFLEVAGDLIRAGKAGSAG

SEQ ID NO: 9257 - protein, 139 aa, Zea mays
  misc_feature (31)..(31): Xaa can be any naturally occurring amino acid
  misc_feature (71)..(71): Xaa can be any naturally occurring amino acid
  Coding DNA Sequence Number=SeqID_2983
  Gene Ontology: Mol. function=methionine adenosyltransferase activity; Cellular component=phagocytic vesicle; Biological process=one-carbon compound metabolic process
  Homolog annotation: Hit_ID=P23686; Match level="QueryCoverage=100%, HitCoverage=35%, E-value=4e-33, Identity=54%"; Hit description=S -adenosylmethionine synthetase 1
  Pfam annotation: Domain name=S-AdoMet_synt_M; Domain location=1-84; Score=-19.2; E_value=0.0001; Accession=PF02772.6; Description=S -adenosylmethionine synthetase, cent
VSKVGSCEWKRPNDTSKGTVQEVFKVEAMVXYRVRYVFIASKYPETVTNSELAAGLKESVIKAVIQERYLXEKTFFHLYLRGRLVIDGPLGCTGVCGSNIIINTYGGYKARDGGAFSGKDPGKVDRIGACVSRQTAESI

SEQ ID NO: 9258 - protein, 113 aa, Zea mays
  Coding DNA Sequence Number=SeqID_2984
  Gene Ontology: Mol. function=catalytic activity; Biological process =cellular metabolic process
  Homolog annotation: Hit_ID=Q39C42; Match level="QueryCoverage=100%, HitCoverage=35%, E-value=1e-43, Identity=79%"; Hit description=NAD -dependent epimerase/dehydratase
LARFVAGAHAAVNLVGVLHGGHGTPYGPGFERAHVALPAALAAACVEVGVRRVLHMSALGADSHGASMYQRSKGDGEAALHAVAATDSLALTIFRPSVVFGTGDAFLNTFANL

SEQ ID NO: 9259 - protein, 86 aa, Zea mays
  Coding DNA Sequence Number=SeqID_2985
MWVLLCRCRIRRKAMQRGEHRVYAAGMYRRMRSLAASGSRTAHYTLKVVHERDVAVAPTQALADQGDQDLQGLRVLFLHRLAVFSP

SEQ ID NO: 9260 - protein, 132 aa, Zea mays
  Coding DNA Sequence Number=SeqID_2986
  Gene Ontology: Mol. function=protein kinase activity; Biological process=protein amino acid phosphorylation
  Homolog annotation: Hit_ID=A1FM79; Match level="QueryCoverage=100%, HitCoverage=27%, E-value=2e-67, Identity=92%"; Hit description =Putative uncharacterized protein
TPRPLAVLEQRVMGLRSRAYLVTEYVDGPDLAECFAPYVDNGDAPEEQVDALVHVMQQLIRERISHGDFKGHNLFWHNGQWSLIDLDAMCQHATQLSFAPAYARDRARLLRNWPSGSALHQRLDRLLPKLAE

SEQ ID NO: 9261 - protein, 234 aa, Zea mays
  Coding DNA Sequence Number=SeqID_2987
  Gene Ontology: Mol. function=nucleoside-triphosphatase activity; Cellular component=integral to membrane; Biological process=transport
  Homolog annotation: Hit_ID=Q8GU82; Match level="QueryCoverage=97%, HitCoverage=17%, E-value=5e-83, Identity=67%"; Hit description=PDR -like ABC transporter
  Pfam annotation: Domain name=PDR_assoc; Domain location=34-98; Score =95.8; E_value=1.4e-25; Accession=PF08370.2; Description=Plant PDR ABC transporter associated
AELTTKWLRWGCWASPFTYSLNAVALNEFLDKRWATVTNENAHTTGQAILKVRGLIYEWHWYWICVGVLFGFSLLFNILSILALEFLSSPKEHHVKIKSQKECDIRYIDQTVGGQVSPIDQVHLPFYPLSIVFSQINYFVDMPHELRKNGVTEKKLQLLRDVNGAFRPGVLTALMGITGAGKTTLLDVLAGRKTGGYIEGIINIGGYQKKQDTFSKISGYCEQTDIHSPYLTVY

SEQ ID NO: 9262 - protein, 93 aa, Zea mays
  Coding DNA Sequence Number=SeqID_2988
MRSVVGCFRLAVRLVAQPGVVLAVRWALVPEDVSAAGRPPLAAGSGPLMFLGALTGRPRCAVVSDVDWGCGAFPYLLGGCPLWPGAMWGPFLS

SEQ ID NO: 9263 - protein, 86 aa, Zea mays
  Coding DNA Sequence Number=SeqID_2990
LGRRRRRYPFWQQSYFLCFLLSSAVLHRRRCFNSDRCRRARGAEAKQDTAGRPECNAWLLSRVIFIISRPSLRGVIFCSWSSCHPV

SEQ ID NO: 9264 - protein, 164 aa, Zea mays
  Coding DNA Sequence Number=SeqID_2992
  Gene Ontology: Cellular component=outer membrane-bounded periplasmic space
  Homolog annotation: Hit_ID=A7MHT5; Match level="QueryCoverage=100%, HitCoverage=49%, E-value=4e-76, Identity=80%"; Hit description =Putative uncharacterized protein
QETGQITTPMRVTYMPGGVGAVAYNAIIAQRPAEAGTLVAFSGGSLLNLSQGKFGRYSVDDVKWLAAIGTDYGMVAVRADAPWKTLGELLEAMKQDPTKVVVGAGASIGSQDWMKTALLAREAGIDPRKMRYVAFEGGGEPVTALLGNHIQVVSGDMSEMVPHL

SEQ ID NO: 9265 - protein, 66 aa, Zea mays
  Coding DNA Sequence Number=SeqID_2993
  Homolog annotation: Hit_ID=A7PG34; Match level="QueryCoverage=90%, HitCoverage=10%, E-value=7e-17, Identity=66%"; Hit description =Chromosome chr6 scaffold_15, whole genome shotgun sequence
  Pfam annotation: Domain name=WD40; Domain location=12-48; Score=18.3; E_value=0.029; Accession=PF00400.22; Description=WD domain, G-beta repeat
LRTKTFDASAIEPPQRMLHGVGCDLFSIAIGADRIVSAGEDGSVRIWNFSEALHIERRAQALTSLR

SEQ ID NO: 9266 - protein, 33 aa, Zea mays
  Coding DNA Sequence Number=SeqID_2994
  Gene Ontology: Mol. function=ribulose-bisphosphate carboxylase activity; Cellular component=chloroplast ribulose bisphosphate carboxylase complex; Biological process=carbon utilization by fixation of carbon dioxide
  Homolog annotation: Hit_ID=Q85Y49; Match level="QueryCoverage=96%, HitCoverage=57%, E-value=9e-11, Identity=96%"; Hit description =Ribulose-1,5-bisphosphate carboxylase/oxygenase large subunit
MSCREGLMSPQTETKASVGFKAGVKDYKLTYYP

SEQ ID NO: 9267 - protein, 191 aa, Zea mays
  misc_feature (46)..(46): Xaa can be any naturally occurring amino acid
  misc_feature (66)..(66): Xaa can be any naturally occurring amino acid
  Coding DNA Sequence Number=SeqID_2995
  Gene Ontology: Mol. function=NADH dehydrogenase (quinone) activity; Cellular component=integral to membrane; Biological process=electron transport
  Homolog annotation: Hit_ID=Q48H48; Match level="QueryCoverage=100%, HitCoverage=57%, E-value=3e-24, Identity=36%"; Hit description=NADH -quinone oxidoreductase subunit H
  Pfam annotation: Domain name=NADHdh; Domain location=13-191; Score= -146.9; E_value=0.00013; Accession=PF00146.11; Description=NADH dehydrogenase
MSWFTPDVIDVILSALRAIVVLLAVVVCGALLIFLHPRLVRCGHDXHGPNRLGPVCMTNIVSDMLXMTLYEYCCSSIGHCLSSLLDPDDDMSSLHIVLEMIPMHPTYAVRYPTMVLLVLYTMVALVGYAQLLVHWSSNNRYSLVGTMRASAQTATYELLLGLALMGAWAHAGSVNMRDIVEYQPHNLWIII

SEQ ID NO: 9268 - protein, 163 aa, Zea mays
  Coding DNA Sequence Number=SeqID_2996
  Gene Ontology: Mol. function=DNA binding; Cellular component=nucleus; Biological process=regulation of transcription, DNA-dependent
  Homolog annotation: Hit_ID=Q7F2L3; Match level="QueryCoverage=99%, HitCoverage=54%, E-value=2e-34, Identity=48%"; Hit description=NAC domain-containing protein 48
  Pfam annotation: Domain name=NAM; Domain location=1-126; Score=117.4; E_value=4.3e-32; Accession=PF02365.6; Description=No apical meristem (NAM) protein
LPAGVRVHPTGEELGGHFLWRGWAGLAIFGPIIGEGELFKHQPWQVPRMGLDREKEWDFFFPGERKDPNGLGANRAGGAGYWKGNGANQPGGTPKPGGIKKGLVFYAGKGPKGDQNNWIMHEYRLADVDRTARTARPISLRCEPWRCCAVRHLLQPPIISCAF

SEQ ID NO: 9269 - protein, 208 aa, Zea mays
  Coding DNA Sequence Number=SeqID_2997
YVFVMIYVFTLLPLGYAIFQRRCCRNFIFKKKKKKKKKKKKKKKKKKKKKKKKKKKKKKKKKKKKKKKKKKKPLGPLFFFAPPLFWPPLLKRGGGGGRGKKIPGGGGPPPPKHRKCGEKRGGRNVLIIYPKGSVRGARVRLSHLILSVCVSASIQGLDPPFPFKCGLASEAGLRHLSWNNSGSSATSGIGACTTTEESIKYKYHPFPK

SEQ ID NO: 9270 - protein, 100 aa, Zea mays
  Coding DNA Sequence Number=SeqID_2999
  Gene Ontology: Mol. function=N-acetyltransferase activity; Biological process=metabolic process
  Homolog annotation: Hit_ID=A8GEA5; Match level="QueryCoverage=97%, HitCoverage=33%, E-value=6e-16, Identity=51%"; Hit description=GCN5 -related N-acetyltransferase
QDAQGRLQGFASRRRFGHGWTIGPVIADDVAASQALVSQLMQDLTQQFVRLDTPDARLGAWLLNLGLAQVDAPYAMVHGTPWRAAPNGPQTFALVSPALG

SEQ ID NO: 9271 - protein, 105 aa, Zea mays
  Coding DNA Sequence Number=SeqID_3000
MARASRCHTPSPGDYHARITISMQLDEARGRTEGFLTRERTETSGSRWVDNKRSRCGADERFHSAQVSPVRAIAPTRFLARPGGYPDRGRELGDGCQGTQHGGRP

SEQ ID NO: 9272 - protein, 193 aa, Zea mays
  Coding DNA Sequence Number=SeqID_3002
  Gene Ontology: Mol. function=transferase activity, transferring hexosyl groups; Biological process=carbohydrate biosynthetic process
  Homolog annotation: Hit_ID=Q6Z5N7; Match level="QueryCoverage=54%, HitCoverage=28%, E-value=3e-36, Identity=75%"; Hit description =Putative Avr9/Cf-9 rapidly elicited protein 231
RGRGVCDRDLVHIAMTLDAHYLRGSMAAIYSLLKHASCPESIFFHFLAAAEGSGAPAVAGLRAVVAASFLSLRFEIYPFRADAVAGLISASMHATLEAPLNYARNHLVGHQAYLLMMHFSDFGESGTSVEWTEESSDEDLDYFAALDVAAAEASPRAVDAEVVHGPSAGRRRRRAVAKCRVSEADGGRLRVGR

SEQ ID NO: 9273 - protein, 139 aa, Zea mays
  Coding DNA Sequence Number=SeqID_3003
  Gene Ontology: Mol. function=hydrolase activity, hydrolyzing O -glycosyl compounds; Cellular component=outer membrane; Biological process=peptidoglycan turnover
  Homolog annotation: Hit_ID=A8GIG6; Match level="QueryCoverage=97%, HitCoverage=35%, E-value=9e-52, Identity=74%"; Hit description=MltA domain protein
  Pfam annotation: Domain name=3D; Domain location=35-113; Score=113.8; E_value=5e-31; Accession=PF06725.2; Description=3D domain
EVRNVLETNQSFVFFKPEEYVPVRGASAVPLIAKASVASDRSLIPAGTALLAEVPQLNEKGKFNGKYEMRLMVALDVGGAIKGQHFDIYQGVGPNAAHLAGFYNHYGRVWVLKAAPGTGQPLFSNPQNGNNGSLIIGAN

SEQ ID NO: 9274 - protein, 150 aa, Zea mays
  Coding DNA Sequence Number=SeqID_3004
GESIHRREENVGRSGSADDSRFSHNSADVSRLKRSSADGGARLERHRGGGGRMSWAAVWRLAGRKKSASTTRGACVRVEDNEGSRRLGLARRWREASGRAASLGGRPTWRKKSATRGHASASVAVKEADDWGWACVPSWGRAAPLGGRPA

SEQ ID NO: 9275 - protein, 98 aa, Zea mays
  Coding DNA Sequence Number=SeqID_3006
  Homolog annotation: Hit_ID=Q6EPQ3; Match level="QueryCoverage=97%, HitCoverage=13%, E-value=3e-35, Identity=73%"; Hit description=SPX (SYG1/Pho81/XPR1) domain-containing protein-like
  Pfam annotation: Domain name=SPX; Domain location=2-98; Score=-21.2; E_value=0.00013; Accession=PF03105.10; Description=SPX domain
MVNFGKKLMADQVDEWKGYYINYKLMKKMLKRYVQQTQHDEKDREQVLKDFSRFLDDQIERIVLFLLQQQGHLASRIEKLAEKRTALLEEYDISQVYQ

SEQ ID NO: 9276 - protein, 206 aa, Zea mays
  Coding DNA Sequence Number=SeqID_3007
  Gene Ontology: Mol. function=beta-N-acetylhexosaminidase activity; Biological process=carbohydrate metabolic process
  Homolog annotation: Hit_ID=A4W600; Match level="QueryCoverage=96%, HitCoverage=25%, E-value=2e-75, Identity=64%"; Hit description=Beta -N-acetylhexosaminidase precursor
MPAGVVHQRVEKILAAHQRRMLGWDEVYHPDLPKSIVIQSWQGQDALSEVVKQGYRGILSTGFYLDQPQSAAYHYRNDPWPQGLNGIDQLRADDQAQSWQFTMPRLKGSAVQGSFTLIESKNGWRGFIDFSGKARRQVSDIRWLSPTQLTFSVDSWMGPFQPVVTLTRDSLTGYVLVGNVRYPTTGSRLAQIPAGIAPVLPTPAQL

SEQ ID NO: 9277 - protein, 105 aa, Zea mays
  misc_feature (69)..(69): Xaa can be any naturally occurring amino acid
  Coding DNA Sequence Number=SeqID_3008
  Homolog annotation: Hit_ID=A7NUH9; Match level="QueryCoverage=78%, HitCoverage=17%, E-value=3e-09, Identity=40%"; Hit description =Chromosome chr18 scaffold_1, whole genome shotgun sequence
MEHFGGRIHPRSHNMQVEYVHGQTKILILDRPLLLHATIICRRNTLGVNAGDRCDMYQLSEKDLDAPIXQANQEDVEHLVMDDDRTRNNGPGVRYCCWPGDPLPS

SEQ ID NO: 9278 - protein, 117 aa, Zea mays
  Coding DNA Sequence Number=SeqID_3009
GFLQAFLFHHQTLLHSSTIAVISPPEWSFWSWYWIPRRRRFTFPNSKWWWRDRREGGRARGRRRGRVHPRRCRRGGGRAAPSRRRLLRPQVCGAADASGLRRFLVAVARGHERPHAS

SEQ ID NO: 9279 - protein, 44 aa, Zea mays
  Coding DNA Sequence Number=SeqID_3011
MAKGSRWLVFPPLLPLKDQSFSIDLPETNQPPGVESFPPPRLGF

SEQ ID NO: 9280 - protein, 89 aa, Zea mays
  Coding DNA Sequence Number=SeqID_3013
  Gene Ontology: Mol. function=ATPase activity; Cellular component =chromosome; Biological process=chromosome organization and biogenesis
  Homolog annotation: Hit_ID=Q8GU54; Match level="QueryCoverage=75%, HitCoverage=5%, E-value=2e-13, Identity=64%"; Hit description=SMC3 protein
GTPADSSNFSDAHKLLEALPARIASLTLMKDSERLDLLEEIGGSTYVYEDRWDETLKIITETGTKRKQIDQVVYYLEERLRELGGEKKN

SEQ ID NO: 9281 - protein, 154 aa, Zea mays
  misc_feature (26)..(26): Xaa can be any naturally occurring amino acid
  misc_feature (42)..(42): Xaa can be any naturally occurring amino acid
  misc_feature (130)..(130): Xaa can be any naturally occurring amino acid
  Coding DNA Sequence Number=SeqID_3014
  Gene Ontology: Mol. function=structural constituent of ribosome; Cellular component=ribonucleoprotein complex; Biological process =translation
  Homolog annotation: Hit_ID=A8AQL8; Match level="QueryCoverage=99%, HitCoverage=74%, E-value=2e-41, Identity=62%"; Hit description=50S ribosomal protein L4
  Pfam annotation: Domain name=Ribosomal_L4; Domain location=2-152; Score=-73.9; E_value=0.049; Accession=PF00573.12; Description =Ribosomal protein L4L1 family
  Subcellular localization annotation: CTP_CleavageSite=65; ConfidenceScore=5.45e-01
PAGARQGTGAQNPRDQASGTDTKCPXASVIMSTGRARSGSTXRPIWRSGGVTYSAGPQDHRQKVNNSMYRGALNSILSKLVRQARLIAVESLSVEAPNIQLLVQKRKAMAMENELIMYGERDEYLLLHAXNLYKVHVSDAAGSDPVSRLAIDKV

SEQ ID NO: 9282 - protein, 112 aa, Zea mays
  Coding DNA Sequence Number=SeqID_3015
  Subcellular localization annotation: CTP_CleavageSite=53; ConfidenceScore=5.03e-01
MPTDRADDRNWASGQRKTAGARRARTRRADGARQRGCRSCHTRSAPLEHAGPSGAQKREIKAGTTRRGTHRGTATRDRPKTQVKTKTVGRAHNKGQQRAPGAGRNWQPQGEH

SEQ ID NO: 9283 - protein, 206 aa, Zea mays
  Coding DNA Sequence Number=SeqID_3017
  Gene Ontology: Mol. function=carbon-nitrogen ligase activity, with glutamine as amido-N-donor; Cellular component=integral to membrane; Biological process=nylon catabolic process
  Homolog annotation: Hit_ID=A4XEV1; Match level="QueryCoverage=98%, HitCoverage=42%, E-value=1e-28, Identity=40%"; Hit description =Amidase precursor
  Pfam annotation: Domain name=Amidase; Domain location=13-206; Score= -138.6; E_value=0.00014; Accession=PF01425.11; Description=Amidase
MELVGRGETSPAELQQCAMQAIAQMDPTLNFMSGPVSVGGHGNGPFAGLPFLFKESHGCIGQPMMQGSRLTAGLKASADSEFVARLKRAGVIPLGATTAPEFGLYCTTESTLHGATRNPWNLGHSAGGSSGGSSVAVAAGVVPAASSSDSGGSIRGPAHCTGTFGLKPSRARTPIDGKTDGGLFPFISYHVTTRSVRDSAAFLDVL

SEQ ID NO: 9284 - protein, 152 aa, Zea mays
  Coding DNA Sequence Number=SeqID_3018
  Gene Ontology: Biological process=transcription
  Homolog annotation: Hit_ID=Q6H8E1; Match level="QueryCoverage=95%, HitCoverage=13%, E-value=1e-28, Identity=52%"; Hit description=PHD finger protein-like
RNSQSKGRHPCQTTSDYNRFPLQMCNLIKQSIHLLLYPSSLPGDWSSHMGTSVPASSYYIVPMNQQSVQLGASRPEVSRTAQPLLSRVSLRPPQQVLNIHTSLPAMAGSQPSPSMAGRISQHKVASPKVQMLKSPSFQSSNKRLPEGATVKI

SEQ ID NO: 9285 - protein, 133 aa, Zea mays
  Coding DNA Sequence Number=SeqID_3019
MARLARSEAACSPRPSLAHSEDAGDTGGAAARVVCVTGDIFSEAHSEALASRPSSPCPPTLTYPAASLAHSEALAPLDPAWDNRPGTRVRQCWTRGRRSCIQRRCLPRCLAPGYQYFRVQHHAPSWLMHAQRR

SEQ ID NO: 9286 - protein, 72 aa, Zea mays
  Coding DNA Sequence Number=SeqID_3021
MPAACSAARGRGLAGRSLSRSAADAQADWGSAPQGTAVQFTGLVSSCSQQQTAVQFIGHRGSAPQFTERRDC

SEQ ID NO: 9287 - protein, 139 aa, Zea mays
  misc_feature (74)..(74): Xaa can be any naturally occurring amino acid
  Coding DNA Sequence Number=SeqID_3023
  Gene Ontology: Mol. function=nucleic acid binding
  Homolog annotation: Hit_ID=A2WVQ1; Match level="QueryCoverage=95%, HitCoverage=12%, E-value=1e-35, Identity=55%"; Hit description =Putative uncharacterized protein
LPKHRRLQPTISRRFGSLTSQNLGTFDIFGDWQDISQPNSEANPPDGVLAVPLLRHQKIALSWMVKKETSISLXYGGILADDQGLGKTVSAISLILTERPPVPQSSTKNEPCEATCSSQVTSNTVKQENPIVAVKARPG

SEQ ID NO: 9288 - protein, 178 aa, Zea mays
  Coding DNA Sequence Number=SeqID_3024
  Gene Ontology: Mol. function=fructose-bisphosphate aldolase activity; Cellular component=integral to membrane; Biological process=metabolic process
  Homolog annotation: Hit_ID=Q6DAB7; Match level="QueryCoverage=100%, HitCoverage=62%, E-value=5e-85, Identity=89%"; Hit description =Fructose-bisphosphate aldolase
  Pfam annotation: Domain name=F_bP_aldolase; Domain location=1-178; Score=-8.1; E_value=7e-12; Accession=PF01116.10; Description =Fructose-bisphosphate aldolase class-II
MLISMKEMLAPTREHRFAIGAFNVADSCFIRAVVEEAEATNTPAIISIHPSELEFVTDEFFGYVRERTLKSRVPFTIHLDHGASIAQVLRAIQCGFTSVMIDGSLQPYEENVALTKEVVKLAHPVGVSVEGELGTIGDTGTTVEGGVSKVIYTDPAQAEDFVQRSGVDTLTVAIGAAH

SEQ ID NO: 9289 - protein, 149 aa, Zea mays
  Coding DNA Sequence Number=SeqID_3025
  Gene Ontology: Mol. function=dipeptidyl-peptidase IV activity; Cellular component=membrane; Biological process=proteolysis
  Homolog annotation: Hit_ID=Q4UW00; Match level="QueryCoverage=99%, HitCoverage=19%, E-value=3e-82, Identity=95%"; Hit description =Peptidase
  Pfam annotation: Domain name=Peptidase_S9; Domain location=24-149; Score=-71.7; E_value=0.025; Accession=PF00326.11; Description=Prolyl oligopeptidase family
MVVRPRDYDPHKKYPVIENIYAGPHDSFVPKTFWPFGYHSGGDKQIGMQAQADLGFIVVMIDGMGTANRSKAFHDVAWKNLGDSGFADRIAWHRALAARDPSYDIGRVGIYGASAGGQSTLGALERHPDFYKVGVAFAGCYDNRMDKIR

SEQ ID NO: 9290 - protein, 70 aa, Zea mays
  Coding DNA Sequence Number=SeqID_3026
  Gene Ontology: Mol. function=binding; Biological process=protein folding
  Homolog annotation: Hit_ID=Q7XD86; Match level="QueryCoverage=94%, HitCoverage=28%, E-value=8e-24, Identity=82%"; Hit description=TPR Domain containing protein, expressed
  Pfam annotation: Domain name=TPR_1; Domain location=29-62; Score =32.7; E_value=1.3e-06; Accession=PF00515.18; Description =Tetratricopeptide repeat
  Pfam annotation: Domain name=TPR_2; Domain location=29-62; Score =32.5; E_value=1.6e-06; Accession=PF07719.7; Description =Tetratricopeptide repeat
  Pfam module annotation: Pfam domain module=TPR_1::TPR_2; Domain location=29-62::29-62
ERTCPCTLGKHDETVKECTKALELNPSYLKALLRRAEAHEKLEHYDEAIADMKKVIEMDPSNHNPRSLFG

SEQ ID NO: 9291 - protein, 95 aa, Zea mays
  Coding DNA Sequence Number=SeqID_3027
LRRKDTNEQPPERDREAAEEARGGEGGQGQKGTQQANAQVKNRKPGPRETTTRAPTSRGRRKRPHGGKGDSWENAQGTQKEAEPKLDPSKSPNTN

SEQ ID NO: 9292 - protein, 79 aa, Zea mays
  misc_feature (23)..(23): Xaa can be any naturally occurring amino acid
  Coding DNA Sequence Number=SeqID_3029
  Gene Ontology: Mol. function=calcium ion binding; Cellular component =late endosome membrane; Biological process=protein transport
  Homolog annotation: Hit_ID=P93645; Match level="QueryCoverage=79%, HitCoverage=41%, E-value=4e-23, Identity=71%"; Hit description =Vacuolar sorting receptor homolog
QSKKKLRPILIYLLFADIDDCHXKLYCQCKGCSCKNTWGSYECSCGDDNMLYMREHDTCISDLGLSKAISSSLTYLISY

SEQ ID NO: 9293 - protein, 161 aa, Zea mays
  Coding DNA Sequence Number=SeqID_3030
  Gene Ontology: Mol. function=sequence-specific DNA binding; Cellular component=nucleus; Biological process=regulation of transcription, DNA-dependent
  Homolog annotation: Hit_ID=Q94DC5; Match level="QueryCoverage=75%, HitCoverage=30%, E-value=1e-13, Identity=43%"; Hit description =Transcription factor WRKY08-like
  Pfam annotation: Domain name=WRKY; Domain location=1-41; Score=20.4; E_value=2.3e-06; Accession=PF03106.6; Description=WRKY DNA -binding domain
AYFRCTHRHTQSCQASKQVQRTDGDPLLFDVVYHGTHTCAQAATAAHHGNNQPATDQATSPGCVVAGPAALPFSLRPAASNKPTGAAADDGATSSRFIATGCTVVTASPFVYPATPEPDCQVGDLKIKVIILSCGRGYAYKCKHKGLRQAGGTKWHGTGTL

SEQ ID NO: 9294 - protein, 228 aa, Zea mays
  misc_feature (12)..(12): Xaa can be any naturally occurring amino acid
  Coding DNA Sequence Number=SeqID_3031
  Gene Ontology: Mol. function=pyridoxal phosphate binding; Cellular component=cytoplasm; Biological process=proteolysis
  Homolog annotation: Hit_ID=A4AH92; Match level="QueryCoverage=98%, HitCoverage=48%, E-value=1e-110, Identity=84%"; Hit description =Putative uncharacterized protein
  Pfam annotation: Domain name=Aminotran_3; Domain location=1-228; Score=59.1; E_value=3.5e-18; Accession=PF00202.11; Description =Aminotransferase class-III
VETAFRLAKYYXKLRGKPMKHKVISRAVAYHGTPQGALAITGIPAMKEMFEPLTPGGFRVPNTNYYRADEMGFAGQTEEEFGFWAAERIREMIEYEGPDTVAAVFLEPVQNSGGCFTPPPGYFQRVREICDEYDVLLVSDEVICAFGRIGTMFACDTYDFVPDMITCAKAMTSGYSPIGATIISDKLFEPFSKGDTTFYHGYTFGGHPVSAAVAMENLDIFEEEGLLQ

SEQ ID NO: 9295 - protein, 69 aa, Zea mays
  Coding DNA Sequence Number=SeqID_3032
  Homolog annotation: Hit_ID=A7M7F9; Match level="QueryCoverage=100%, HitCoverage=52%, E-value=8e-13, Identity=49%"; Hit description=Sea38
LTALSERYSVTVTHWYAEAGGDFCGYAAYTNGMQTEAFSDSLEWSEDEDGCFAVTGPDWIIGNVASYGG

SEQ ID NO: 9296 - protein, 212 aa, Zea mays
  Coding DNA Sequence Number=SeqID_3033
  Subcellular localization annotation: CTP_CleavageSite=65; ConfidenceScore=5.15e-01
MTASARVLLLLPRQLITPLRLSHALAPQSRAAVRGYFSPVLQQATHRCWSTSSSSCEQYPQAPITAAAPGAPCPRDGKGEGYGEAATATACGGEKAVSGAHQDGSDGAGAPAPPAHPQDKEAAVPLRAAPAGRKGRSGVQTPRQRGRPAKPQGNKNKKPARPGAPKQGRGGGGGIIHVVAPRRSSSSSPAASSTPPSTTRLRAATKKRESED

SEQ ID NO: 9297 - protein, 74 aa, Zea mays
  Coding DNA Sequence Number=SeqID_3034
MGVRGGGAPGFGLHRVWRRCGAIVGGGRGVAAPRGWGARWSSAPGAWRGRRGMRRRSEARRHNGAVGDAGTGPG

SEQ ID NO: 9298 - protein, 211 aa, Zea mays
  misc_feature (166)..(166): Xaa can be any naturally occurring amino acid
  Coding DNA Sequence Number=SeqID_3036
  Subcellular localization annotation: CTP_CleavageSite=88; ConfidenceScore=5.72e-01
GPGPSAPRVPLRAVGLPVPSFPAGLLSRGGGSWAALASLSPCSRPSGAGACARRSSPRLCCRPGGSFRLSACVCLQGLPGPLGCRAPCCAPLVPCRGCPWVAPFLAAAAAAGCCALVARAWSPGRPRAGRAPRALLGGPPGAPPAPPQAAGGARACPRPPPRPPAXPGARPGRPPGRAGRPLRGRPAPRAGAARGPAPTRNAGPRAPPRPP

SEQ ID NO: 9299 - protein, 186 aa, Zea mays
  Coding DNA Sequence Number=SeqID_3038
  Gene Ontology: Mol. function=protein transporter activity; Cellular component=COPI vesicle coat; Biological process=intracellular protein transport
  Homolog annotation: Hit_ID=Q53PC7; Match level="QueryCoverage=98%, HitCoverage=19%, E-value=3e-79, Identity=83%"; Hit description =Coatomer subunit beta-1
SSRRPAALARGFYVIQSAATEIAGTAPASALGSLASTQNLRSLILSGDFFLAADVACSLTKLALRLEEIQPAQVEVNKVSTEALLIMESILQLGQSSYLPHPIDNDSYDRIVLCVRLLCNTGDDVRKIWLQSCRQSFAKMLAEKQFRETEEMKAKAQISHAQPDDLIDFYHLKSRKYLSSLALSCH

SEQ ID NO: 9300 - protein, 150 aa, Zea mays
  Coding DNA Sequence Number=SeqID_3039
  Gene Ontology: Mol. function=phosphohistidine phosphatase activity
  Homolog annotation: Hit_ID=A1JK35; Match level="QueryCoverage=100%, HitCoverage=92%, E-value=3e-57, Identity=73%"; Hit description =Putative phosphohistidine phosphatase
  Pfam annotation: Domain name=PGAM; Domain location=2-115; Score=36.1; E_value=1.2e-07; Accession=PF00300.12; Description=Phosphoglycerate mutase family
MQVFIMRHGDAALEAASDAVRPLTLCGCDESRQMASWLNGQTPGIDKVLVSPYLRAGQTLATVREALKLPEGQEVLPELTPGGDPGMVACHLQALAVQGAHAVLVISHLPLVGYLVSELCPQEAPPMFATSAIACVEFDADACEGKLAWQ

SEQ ID NO: 9301 - protein, 67 aa, Zea mays
  Coding DNA Sequence Number=SeqID_3040
  Homolog annotation: Hit_ID=A8AH29; Match level="QueryCoverage=68%, HitCoverage=58%, E-value=1e-17, Identity=82%"; Hit description =Putative uncharacterized protein
  Pfam annotation: Domain name=DUF1289; Domain location=17-67; Score =68.0; E_value=3.3e-17; Accession=PF06945.3; Description=Protein of unknown function (DUF1289)
VHCGGDVAEQLEFFPVPSPCRGICQSDARGYCRGCLRSREERFNWMQFSDAQLREVLRLCRQRLLRL

SEQ ID NO: 9302 - protein, 85 aa, Zea mays
  misc_feature (31)..(31): Xaa can be any naturally occurring amino acid
  misc_feature (71)..(71): Xaa can be any naturally occurring amino acid
  Coding DNA Sequence Number=SeqID_3041
  Gene Ontology: Mol. function=2 iron, 2 sulfur cluster binding; Cellular component=chloroplast; Biological process=electron transport
  Homolog annotation: Hit_ID=P27787; Match level="QueryCoverage=98%, HitCoverage=56%, E-value=5e-15, Identity=54%"; Hit description =Ferredoxin-1, chloroplast precursor
SDLEGPDDVDILDQAEEGGIDLALFWRAGAXSSGPGRAVSGSGTNPNKSYLNNGKMAAGGWLTGKAYPTFXVWIETHQGGEVNGA

SEQ ID NO: 9303 - protein, 167 aa, Zea mays
  misc_feature (103)..(103): Xaa can be any naturally occurring amino acid
  misc_feature (119)..(119): Xaa can be any naturally occurring amino acid
  Coding DNA Sequence Number=SeqID_3042
  Gene Ontology: Mol. function=fructose-bisphosphate aldolase activity; Cellular component=cytoplasm; Biological process=response to stress
  Homolog annotation: Hit_ID=P17784; Match level="QueryCoverage=89%, HitCoverage=40%, E-value=2e-54, Identity=73%"; Hit description =Fructose-bisphosphate aldolase cytoplasmic isozyme
  Pfam annotation: Domain name=Glycolytic; Domain location=1-166; Score= -21.2; E_value=3.8e-12; Accession=PF00274.9; Description=Fructose -bisphosphate aldolase class-I
ICQENGLVPIVELEILVDGHHDIDRCAYVSETVFAACYKVINEHHVILEGTILKPNMVTPGSEYKKVTHEVIAQYTVCTIQRTVHAAVPAVIIIYGGQSEEEXPTLNLNAMNKVSTKKXQWALSISFGPWPSRRGTFRAWAGKMENVEKHRAAIIARGALRIDFRHA

SEQ ID NO: 9304 - protein, 145 aa, Zea mays
  misc_feature (36)..(38): Xaa can be any naturally occurring amino acid
  Coding DNA Sequence Number=SeqID_3043
  Subcellular localization annotation: CTP_CleavageSite=60; ConfidenceScore=5.50e-01
PPPSPHPLPPPPPPPPPPPPPSPPPRYPPPTPPPPXXXPAPGEGEGPLSKVTRPGGPRPPAADAFPGPTGTRAPLAPAQLSPPPPPSLPTYLLPHGYCAILVPHSASALPFADPLEAPCLASSAAHRIVSPSPHPRGRPPLALTT

SEQ ID NO: 9305 - protein, 103 aa, Zea mays
  Coding DNA Sequence Number=SeqID_3045
  Subcellular localization annotation: CTP_CleavageSite=65; ConfidenceScore=5.15e-01
PPAVRWSTGEDTRGAGVGLAPPNGPTKRALSDAALSSSLRLSFSGSTCAERLCRLRLGWQHAALYGSARSGRAASGQQGQGVQSSRDSVSRPPPSTSHQASRQ

SEQ ID NO: 9306 - protein, 161 aa, Zea mays
  Coding DNA Sequence Number=SeqID_3047
  Subcellular localization annotation: CTP_CleavageSite=49; ConfidenceScore=5.25e-01
EDPPAAAASHFYYARALKVRLPRQSPRLRPFFHSLPSGPRVTYSLPCAACSRVGTEYGPKAVADLWGQLHRCSSYLTRAQQTEKSVGIGSPAVRRGVGHPGSRRIKGKHPWPWTTIEAAESPKEMEAPSPDFYGEASRRGFNSQCARDRSGKKHLGTRGHS

SEQ ID NO: 9307 - protein, 329 aa, Zea mays
  Coding DNA Sequence Number=SeqID_3049
  Gene Ontology: Mol. function=extracellular-glutamate-gated ion channel activity; Cellular component=integral to membrane; Biological process=G-protein coupled receptor protein signaling pathway
  Homolog annotation: Hit_ID=Q9SW97; Match level="QueryCoverage=91%, HitCoverage=31%, E-value=3e-72, Identity=46%"; Hit description =Glutamate receptor 3.5 precursor
  Pfam annotation: Domain name=ANF_receptor; Domain location=51-329; Score=177.5; E_value=3.5e-50; Accession=PF01094.18; Description =Receptor family ligand binding region
  Subcellular localization annotation: CTP_CleavageSite=24; ConfidenceScore=5.24e-01
MASSAATTTTTLLRLLCLCTVLLVAMQAAAARPPNVTIGSLFAFDSVIGRSARSAIQLAVDDVNRDPTVLNGTTLTVVFQDTKCSGFAGTIQAGLELMEKEVVAVVGPQSSVIAHVVSHVANQLRVPLLSFAATDPALASTQYPYFVRTVHDDRFQMAAIADVVSHFGWREVTAVYVDDDYGRGGVIALADALEATRARVSYRAAFPLGADRATLADILQRANFMESRVFIVHASPDSGLNVFAAARGLGMMVSGYTWIATDWLATAAIDAAGAASNSSNIQGVLTLRQYTPDSDAKASLLSRLAAADPTSNNATASVNTYGLFAYDSV

SEQ ID NO: 9308 - protein, 199 aa, Zea mays
  Coding DNA Sequence Number=SeqID_3050
  Homolog annotation: Hit_ID=Q88R28; Match level="QueryCoverage=92%, HitCoverage=76%, E-value=7e-50, Identity=51%"; Hit description =Putative uncharacterized protein
MMNQIGNQDMTSTISKTDMNSAIAALKKEGEERAVMVANTVCIFAPDVPASVAEDVLDGMRLMNLSANKKFDKETQQREWYNFYNDGLGKFGWTLTGAAHVEEAIDKDTHTLATLVPQIVTVQIGASHRLSRCVQRSFEAIVQTPKAQQLLEESSVSVSGKSSTIQISACEMTPQGLPIMHMTSVQLSYDKGRKPARVG

SEQ ID NO: 9309 - protein, 160 aa, Zea mays
  Coding DNA Sequence Number=SeqID_3051
  Gene Ontology: Mol. function=cobyrinic acid a,c-diamide synthase activity; Cellular component=integral to membrane; Biological process=cobalamin biosynthetic process
  Homolog annotation: Hit_ID=A6T6L8; Match level="QueryCoverage=98%, HitCoverage=65%, E-value=7e-65, Identity=74%"; Hit description =Dithiobiotin synthetase
  Pfam annotation: Domain name=CbiA; Domain location=1-160; Score=1.6; E_value=2.8e-05; Accession=PF01656.13; Description=Cobyrinic acid a ,c-diamide synthase
LALSYEQVNPLAFIEPTSPHIVSAEEGRPIEFAQLSAGLRALEQQAEWVLVEGAGGWFTPLSATQTYADWVAAEQLPVILVVGVKLGCINHAMLTAEAVKARGLRLAGWIANDIQPPGKRHAEYLATLQQRIASPFLGEIPWLSSAAQQADCGHYLTLPQ

SEQ ID NO: 9310 - protein, 125 aa, Zea mays
  misc_feature (21)..(21): Xaa can be any naturally occurring amino acid
  misc_feature (30)..(30): Xaa can be any naturally occurring amino acid
  misc_feature (43)..(43): Xaa can be any naturally occurring amino acid
  misc_feature (52)..(52): Xaa can be any naturally occurring amino acid
  misc_feature (66)..(66): Xaa can be any naturally occurring amino acid
  misc_feature (73)..(73): Xaa can be any naturally occurring amino acid
  misc_feature (92)..(92): Xaa can be any naturally occurring amino acid
  Coding DNA Sequence Number=SeqID_3052
  Gene Ontology: Mol. function=ribulose-bisphosphate carboxylase activity; Cellular component=chloroplast ribulose bisphosphate carboxylase complex; Biological process=carbon utilization by fixation of carbon dioxide
  Homolog annotation: Hit_ID=Q7GUD0; Match level="QueryCoverage=96%, HitCoverage=25%, E-value=7e-27, Identity=54%"; Hit description =Ribulose bisphosphate carboxylase large chain precursor
GIGFQTLRALRLEDFRNSPGXSKPFQGPPXGIQVKRIKLTRTXWPLIGRTNXPKIGITPKKFGKRXVIRVNRXGLVFPKNNEKVTSHPLRRXKAGLVFGPKPINKAQPEPGETKGHYLNGTAGMQ

SEQ ID NO: 9311 - protein, 181 aa, Zea mays
  Coding DNA Sequence Number=SeqID_3053
MESDVQVEGVCLMVAEEFLLNGNLGPASSATALVEDVLQLDGDGVEDPGEDDTPPGAKMRLVERTISLASKGISSGTLLLPGESSNPLMRPNNDILSIGNGNYKGKVSGNNVAGWQRGVAPSDQRKAAGWLQREGGERNHTQAHARVGTRTSTRTGAVCQHEWEGEGEGEVEEGGPRSMVV

SEQ ID NO: 9312 - protein, 125 aa, Zea mays
  misc_feature (80)..(80): Xaa can be any naturally occurring amino acid
  Coding DNA Sequence Number=SeqID_3055
  Gene Ontology: Mol. function=lactoylglutathione lyase activity; Cellular component=cytoplasm; Biological process=carbohydrate metabolic process
  Homolog annotation: Hit_ID=Q6XC06; Match level="QueryCoverage=96%, HitCoverage=84%, E-value=3e-62, Identity=69%"; Hit description =Glyoxalase I
  Pfam annotation: Domain name=Glyoxalase; Domain location=5-111; Score= 70.3; E_value=6.6e-18; Accession=PF00903.15; Description =GlyoxalaseBleomycin resistance proteinDioxygenase superfamily
PFDSGRHYTECFGMKLLRKRDIPEEKYTNAFLGFGPEDTNFAVELTYNYGVDKYDIGTGFGHFAIANEDVYKLSENIKSXGGKITRDPGPVKGGSTVIAFAQDPDGYMFELIQRAETPEPLCQVM

SEQ ID NO: 9313 - protein, 101 aa, Zea mays
  Coding DNA Sequence Number=SeqID_3056
  Gene Ontology: Mol. function=protein binding
  Homolog annotation: Hit_ID=A3BQT2; Match level="QueryCoverage=93%, HitCoverage=20%, E-value=2e-44, Identity=85%"; Hit description =Putative uncharacterized protein
  Pfam annotation: Domain name=DUF266; Domain location=1-101; Score= -48.1; E_value=4.1e-11; Accession=PF03267.4; Description=Arabidopsis protein of unknown function, DUF266
DIDNQHFVLLSDSCVPLHNFDYVYDFLMGSRHSFLDCFHDPGPHGVYRYSKNMLPEVRESEFRKGSQWFSMKRQHAMVVIADSLYYSKFRLYCRSTKEDQG

SEQ ID NO: 9314 - protein, 121 aa, Zea mays
  Coding DNA Sequence Number=SeqID_3057
  Subcellular localization annotation: CTP_CleavageSite=44; ConfidenceScore=5.12e-01
MGSVRGAVALGRGGAGSLAVPGPRRRPSRTEQAAPAARRDQAAPAAALGTRDWGREPGEEGGVEQGQGMNRGRRRGRFDGVFATWASRTGGRGWGRQTVGGVATDRWARRLGERASRLGET

SEQ ID NO: 9315 - protein, 85 aa, Zea mays
  misc_feature (10)..(10): Xaa can be any naturally occurring amino acid
  Coding DNA Sequence Number=SeqID_3059
  Gene Ontology: Mol. function=succinate dehydrogenase (ubiquinone) activity; Cellular component=mitochondrial inner membrane; Biological process=tricarboxylic acid cycle
  Homolog annotation: Hit_ID=A2Z0I8; Match level="QueryCoverage=97%, HitCoverage=26%, E-value=2e-35, Identity=80%"; Hit description =Putative uncharacterized protein
TSTACPSYWXNSEAFMGPAALLHAYRWVSDSWDHYGEQRVQSLSEGWDKMYRCRMIKSCTATCPKSIDPPAAISAMKALHQLRKA

SEQ ID NO: 9316 - protein, 125 aa, Zea mays
  misc_feature (43)..(43): Xaa can be any naturally occurring amino acid
  misc_feature (58)..(58): Xaa can be any naturally occurring amino acid
  misc_feature (76)..(76): Xaa can be any naturally occurring amino acid
  Coding DNA Sequence Number=SeqID_3060
  Homolog annotation: Hit_ID=Q5QJQ3; Match level="QueryCoverage=86%, HitCoverage=85%, E-value=1e-23, Identity=53%"; Hit description =Putative uncharacterized protein
  Subcellular localization annotation: CTP_CleavageSite=51; ConfidenceScore=5.58e-01
ASPSVTSITTFFAHAMGGASRQDCRNTMRLPLKAPSRALLLRXCRLPYTCRAFSLREXWGFLISHAVSMDVLSKTXPPSCAEGSNPLLQPTCEPYPDNYGLEPTRDDTTYPHWLHPLVSGLPKLC

SEQ ID NO: 9317 - protein, 139 aa, Zea mays
  Coding DNA Sequence Number=SeqID_3061
  Gene Ontology: Mol. function=transporter activity; Cellular component= membrane; Biological process=transport
  Homolog annotation: Hit_ID=A6T924; Match level="QueryCoverage=96%, HitCoverage=29%, E-value=4e-35, Identity=55%"; Hit description =Probable guanine/xanthin permease
IIWVIQMTGVASRYVGMVIGLMLVLLGIFPLVGNLLQQIPPPVLGGATLVMFGSVVAAGIRVMTQAPLGRREMLIVAVSFGIGLGVEAVPDVLKQFPPLVSNLFGHAVTTGGILAMLLNVVLPNEAKTVAAVGAVEESH

SEQ ID NO: 9318 - protein, 136 aa, Zea mays
  Coding DNA Sequence Number=SeqID_3062
MGGCLIGGANPLQSKGKSAGGGPIGGANGGGASDGRADCSCYCCPLLSSLPLFPLFPSHSLDLVRCSKGCAREIGVHAPKARVSRPPISRTHATSFRRCGVHIDKSDAKATLGALGDAISSQGVASETPKSKTRLD

SEQ ID NO: 9319 - protein, 113 aa, Zea mays
  Coding DNA Sequence Number=SeqID_3064
  Homolog annotation: Hit_ID=A2XLU3; Match level="QueryCoverage=42%, HitCoverage=29%, E-value=4e-12, Identity=74%"; Hit description =Putative uncharacterized protein
  Subcellular localization annotation: CTP_CleavageSite=53; ConfidenceScore=5.45e-01
QQRQSSLWIPSLRQRAEAKQHTLLSTRRILRSVSSTGHSSTMGACTSREATAVAAAPGSPAPEARVVLADGALRRFPGGTRASQAVKTTTSASSAWFLCSADGMELGGTTAAA

SEQ ID NO: 9320 - protein, 215 aa, Zea mays
  misc_feature (26)..(26): Xaa can be any naturally occurring amino acid
  Coding DNA Sequence Number=SeqID_3065
  Gene Ontology: Mol. function=protein binding; Cellular component =intracellular; Biological process=RNA processing
  Homolog annotation: Hit_ID=Q6ZHF3; Match level="QueryCoverage=98%, HitCoverage=18%, E-value=1e-89, Identity=77%"; Hit description =Putative uncharacterized protein OJ1611_C08.15
  Pfam annotation: Domain name=DUF1740; Domain location=61-215; Score =108.3; E_value=2.4e-29; Accession=PF08424.1; Description=Protein of unknown function (DUF1740)
SHIDLDSDLDGMDNKVRAEGRYYSAXNAVSERNKGFKHLKIFKGNTSVMPAEDFVPFGTQSLPLKSTTVEQELEESWEDEILRRTREFNKMSRERPHDEKVWLAFAQFQDKVASTQPQKAARLQTTERKISILEKAVELNPDSEELLLCLLKSYGKRDNTETLLTKWEQILTKHPDSSTLWKQYLLLCQGEFSRFKVSEIRKSYVYAVQALSAGM

SEQ ID NO: 9321 - protein, 70 aa, Zea mays
  Coding DNA Sequence Number=SeqID_3066
  Gene Ontology: Mol. function=protein tyrosine/serine/threonine phosphatase activity; Biological process=protein amino acid dephosphorylation
  Homolog annotation: Hit_ID=A2Y9G0; Match level="QueryCoverage=57%, HitCoverage=15%, E-value=2e-14, Identity=85%"; Hit description =Putative uncharacterized protein
AVATDSLALCGCLITFARHPSLACQSERWQLSFAHRNASCGKITYIHCKAGRGRSTTVVLCYLVKYKNMT

SEQ ID NO: 9322 - protein, 222 aa, Zea mays
  Coding DNA Sequence Number=SeqID_3067
  Homolog annotation: Hit_ID=Q10KF1; Match level="QueryCoverage=45%, HitCoverage=6%, E-value=3e-24, Identity=59%"; Hit description =Expressed protein
MPKVFGTGVFEFRHPRAAEYPLPADAAPATAAAPDKVPASTGGGSITLLDIQRDRLTRVATEHWGTAAAAAAFDADLVRKIYGTELRVEGRGRKTVPLQRQPVHLRLGSHQGVGRERSVAVHGNGMVAPVLALDAGAAVCAGDGLLTSPGPSSPQHGCLAEPLEKARLSSPLPATHVPCMSTLENILAGPSGSAAVGSLDSVLPVSPQRHRTVAVAGSLEQA

SEQ ID NO: 9323 - protein, 142 aa, Zea mays
  Coding DNA Sequence Number=SeqID_3068
  Gene Ontology: Mol. function=ribonuclease activity; Biological process=RNA metabolic process
  Homolog annotation: Hit_ID=A7MM96; Match level="QueryCoverage=72%, HitCoverage=12%, E-value=4e-37, Identity=73%"; Hit description =Putative uncharacterized protein
GLVHVSTLDNDYYRFDPVGQRLIGESGGRTYRLGDAVEVRVDAVHMDERKIDFALISSKRVPRGEGKTAREREKHGGKPPAKRRRDAGRKGNFEPDAAFRGEKQPPAANKSEKKSKKVFEKTRKIAAATKAKRAVKKKASEA

SEQ ID NO: 9324 - protein, 201 aa, Zea mays
  Coding DNA Sequence Number=SeqID_3069
  Gene Ontology: Mol. function=nucleoside-triphosphatase activity; Cellular component=plasma membrane; Biological process=peptide transport
  Homolog annotation: Hit_ID=A5EI00; Match level="QueryCoverage=98%, HitCoverage=84%, E-value=2e-67, Identity=54%"; Hit description =Putative ABC transporter ATP-binding protein
  Pfam annotation: Domain name=ABC_tran; Domain location=4-154; Score =92.3; E_value=1.5e-24; Accession=PF00005.17; Description=ABC transporter
  Pfam annotation: Domain name=oligo_HPY; Domain location=157-193; Score=-3.8; E_value=0.0028; Accession=PF08352.2; Description =Oligopeptidedipeptide transporter, C-
  Pfam module annotation: Pfam domain module=ABC_tran::oligo_HPY; Domain location=4-154::157-193
QLPAQQLMALRGKKLGMIFQDPSASLNPTLTLGEQVTEVLRRHRGLSAREAQQLGESLLRDVELKHPARMMQRYPHQVSGGEKQRILIATAFACQPDCLIFDEPTTALDVISSAQILDLYERLRAETGVASLYISHDLALVAKVADRVCVLEQGRIVELAATRTLFSAPAHAYTRKLIAAVPDPQHRLVADAAGSQPLLSL

SEQ ID NO: 9325 - protein, 140 aa, Zea mays
  Coding DNA Sequence Number=SeqID_3070
  Gene Ontology: Mol. function=transcription factor activity; Cellular component=cytoplasm; Biological process=regulation of transcription, DNA-dependent
  Homolog annotation: Hit_ID=Q6D7J6; Match level="QueryCoverage=99%, HitCoverage=91%, E-value=3e-48, Identity=71%"; Hit description =Ferric uptake regulation protein
  Pfam annotation: Domain name=FUR; Domain location=1-123; Score=131.5; E_value=2.4e-36; Accession=PF01475.10; Description=Ferric uptake regulator family
KAGLKVTLPSLQTLLVLQGPEPESHHVSAEDMYIRLMYMDQEIGLQSVSRVLNQFLYAGMVTRHNFEGGISVFDLTQQHRHDRVICLDCGIVIELSDESINTRQREIATRRGIKLSNHSLYLYGPCALVHCREHESLHDQ

SEQ ID NO: 9326 - protein, 127 aa, Zea mays
  misc_feature (56)..(56): Xaa can be any naturally occurring amino acid
  misc_feature (64)..(64): Xaa can be any naturally occurring amino acid
  Coding DNA Sequence Number=SeqID_3071
  Gene Ontology: Mol. function=inorganic phosphate transmembrane transporter activity; Cellular component=1-2nm peptidoglycan-based cell wall; Biological process=phosphate transport
  Homolog annotation: Hit_ID=A1FLS1; Match level="QueryCoverage=88%, HitCoverage=20%, E-value=2e-44, Identity=74%"; Hit description =Phosphate transport system permease protein 2 precursor
MIFVPVVPPAAASGGVLGCLPVRGLAHFWPPDLVQATYKVPGQAVHVVIGQVVLMXAVPRARLXGAGLPVPDQGPEFMTRELIKVGHLDLIGSDFTWVVGHWLVDEKHPTVLIALERREWGHFFGYR

SEQ ID NO: 9327 - protein, 212 aa, Zea mays
  Coding DNA Sequence Number=SeqID_3072
  Gene Ontology: Mol. function=catalytic activity; Biological process =metabolic process
  Homolog annotation: Hit_ID=A5NZF4; Match level="QueryCoverage=70%, HitCoverage=47%, E-value=3e-62, Identity=79%"; Hit description =Dihydrodipicolinate synthetase
MTPGVIRRIVSENPSCVMLKHVDWPGLEKISTLRGFEADGSMRHIAILVGNGGLFLDFETERGADGANTGYAFPEMLVDVVRLGRAGERDAAHDLFDAHLPYLRYEQQQGPLGLAVRKYVFQRRGIFSSDAQRKPSQALTPQARAEIEYLLARLARTDARAKLMDPKGLSPLGSPSGRSVEPVGDDRVARRGPERAVAAGGDHHVLLPVLAP

SEQ ID NO: 9328 - protein, 181 aa, Zea mays
  Coding DNA Sequence Number=SeqID_3073
  Subcellular localization annotation: CTP_CleavageSite=79; ConfidenceScore=5.52e-01
SRLGPGGSLEANWRLGQRPKVNFGFFPGGPRAASASFGTAGPSTSGSFSGGPLRPGQGFRGRSPGPRPRPNPVGFPAFGVAMGGNRWVGRNARALNWFGLAGGGVPLRPFRAGTYKALFGAAAGLGKPGPAEGGACNVRSSGFNLDWTSQNHGWRWSLKGGRLARGPQGFKGWPDRNGVTW

SEQ ID NO: 9329 - protein, 183 aa, Zea mays
  Coding DNA Sequence Number=SeqID_3075
GTRFRCHLPPAAAGRGLSTDEIVGAARGLTSNSTAFCSSLPLEWGRGRGPYGSSIRPEVIAVVVRPLGSEVVVATAGAGGGEPSVGLLLLRRPSNRGGLFVPAENLRLLCDELEPEVAASAWTEAESAREEASSVQEQVASRAKEVQQRWLGLGQVIRERDQPRSHVAEAVSQVEVLGGQGVL

SEQ ID NO: 9330 - protein, 123 aa, Zea mays
  Coding DNA Sequence Number=SeqID_3077
  Homolog annotation: Hit_ID=Q6D523; Match level="QueryCoverage=67%, HitCoverage=18%, E-value=4e-19, Identity=53%"; Hit description =Putative virulence effector protein
MLAKAQTLPATLPHSSETVTPAPAPAAPPSPPEVVAEHTEPAKADDLVMTADDARLGSVKFINGTWRVTLRQTNLPTGKPPSLRYQIRNGKGSAVITQEDNIRCKADVTAAMTSAGTMVVRSR

SEQ ID NO: 9331 - protein, 105 aa, Zea mays
  misc_feature (22)..(22): Xaa can be any naturally occurring amino acid
  misc_feature (41)..(41): Xaa can be any naturally occurring amino acid
  Coding DNA Sequence Number=SeqID_3078
  Gene Ontology: Mol. function=protein binding
  Homolog annotation: Hit_ID=A2X8N1; Match level="QueryCoverage=49%, HitCoverage=12%, E-value=9e-19, Identity=83%"; Hit description =Putative uncharacterized protein
  Pfam annotation: Domain name=WRC; Domain location=17-60; Score=65.1; E_value=2.4e-16; Accession=PF08879.1; Description=WRC
LLGWSPFHGTYFGKRLDPEPGXRRTDGKKWRCSSEAAPDSXCERHMHRGRKRSRKPVETQPAPQSQPPAAGAAAAANGSSFRVGCLHGRNGGHHRRIHGVAPTRL

SEQ ID NO: 9332 - protein, 251 aa, Zea mays
  Coding DNA Sequence Number=SeqID_3079
  Gene Ontology: Mol. function=drug transporter activity; Cellular component=integral to membrane; Biological process=pathogenesis
  Homolog annotation: Hit_ID=P37169; Match level="QueryCoverage=92%, HitCoverage=44%, E-value=1e-116, Identity=91%"; Hit description =Virulence factor mviN
  Pfam annotation: Domain name=MVIN; Domain location=1-251; Score=49.5; E_value=2.6e-12; Accession=PF03023.5; Description=MviN-like protein
  Pfam annotation: Domain name=MatE; Domain location=23-189; Score= -31.2; E_value=0.09; Accession=PF01554.9; Description=MatE
  Pfam module annotation: Pfam domain module=MVIN::MatE; Domain location=1-251::23-189
MLVLPRVNLRDAGVWRVMRQMGPAILGVSVSQISLIINTIFASFLVSGSVSWMYYADRLMEFPSGVLGVALGTILLPSLAKSFASGNHDEYSRLMDWGLRLCFLLALPSAVALGILSGPLTVALFQYGKFTAFDAAMTQRALIAYSVGLMGLIVVKVLAPGFYSRQDIKTPVKIAIATLIMTQLMNLAFIGPLKHAGLSLSIGLAACLNAALLYWQLRKQQIFQPQPGWHGFLLRLLVAVAVMAAALLGIL

SEQ ID NO: 9333 - protein, 151 aa, Zea mays
  misc_feature (7)..(7): Xaa can be any naturally occurring amino acid
  misc_feature (21)..(21): Xaa can be any naturally occurring amino acid
  Coding DNA Sequence Number=SeqID_3080
  Gene Ontology: Mol. function=sodium:hydrogen antiporter activity; Cellular component=integral to membrane; Biological process=sodium ion transport
  Homolog annotation: Hit_ID=Q4VT46; Match level="QueryCoverage=87%, HitCoverage=24%, E-value=3e-59, Identity=86%"; Hit description =Sodium/hydrogen exchanger
LSAILTXFFCGIVMSHYTWHXVTESSRVTTQHVFATLSFIAEIFIFLYVGMDALDIEKWRIVSQSPRKSIGVSSLLLALILVGRAAFVFPLSFLSNLLKKSQSEKIELKQQVTIWWAGLMRGAVSIALAYNQVKESNFIAFNSSSLATFKF

SEQ ID NO: 9334 - protein, 208 aa, Zea mays
  misc_feature (191)..(191): Xaa can be any naturally occurring amino acid
  Coding DNA Sequence Number=SeqID_3081
  Gene Ontology: Mol. function=magnesium chelatase activity; Cellular component=intracellular; Biological process=regulation of transcription, DNA-dependent
  Homolog annotation: Hit_ID=A1SF90; Match level="QueryCoverage=99%, HitCoverage=44%, E-value=1e-100, Identity=86%"; Hit description =Putative magnesium chelatase subunit ChlI
  Pfam annotation: Domain name=AAA_3; Domain location=27-164; Score= -16.0; E_value=0.019; Accession=PF07726.2; Description=ATPase family associated with various
  Pfam annotation: Domain name=AAA_5; Domain location=38-170; Score= -7.4; E_value=0.01; Accession=PF07728.4; Description=ATPase family associated with various
  Pfam module annotation: Pfam domain module=AAA_3::AAA_5; Domain location=27-164::38-170
LQGLLDEWTPVIAGSELGEHPYEPITTASIRRAEDLGDAMPIDWRHRDDRYVEKLATPDTSVADLIGDVDPMKVAEGRSLGDPETIHFGLVPRGHRGIVAINELPDLAERIQVAMLNVMEERDVQIRGYVLRLPLDVLVVASANPEDYTNRGRIITPLKDRFGAEILTHYPIELEDEIAVIRQEAQLTADXPDALIEILARITRALRG

SEQ ID NO: 9335 - protein, 177 aa, Zea mays
  Coding DNA Sequence Number=SeqID_3082
  Gene Ontology: Mol. function=transcription factor activity; Cellular component=membrane; Biological process=regulation of transcription, DNA-dependent
  Homolog annotation: Hit_ID=Q6D1Z7; Match level="QueryCoverage=100%, HitCoverage=45%, E-value=3e-83, Identity=85%"; Hit description =Carbohydrate diacid regulator
  Pfam annotation: Domain name=Diacid_rec; Domain location=6-175; Score= 182.8; E_value=8.5e-52; Accession=PF05651.3; Description=Putative sugar diacid recognition
MATYHLDARLAQDIVARTMKIIDSNVNVMDARGRIIGSGDRERIGELHEGALLVLSQGRVVDIDEAVAKHLHGVRPGINLPLRIDGDIVGVIGLTGQPSTLRHYGELVCMTAEMMLEQARLLHMLAQDSRLREELVLNLIRSDTLSPALNEWAQRLGIDLNQPRVVAVVEVDSGQLG

SEQ ID NO: 9336 - protein, 63 aa, Zea mays
  Coding DNA Sequence Number=SeqID_3083
  Gene Ontology: Mol. function=protein transporter activity; Cellular component=clathrin adaptor complex; Biological process=intracellular protein transport
  Homolog annotation: Hit_ID=Q10SS6; Match level="QueryCoverage=98%, HitCoverage=6%, E-value=8e-21, Identity=79%"; Hit description =Adaptin N terminal region family protein, expressed
RRLSKPLNFCPTLTKRYRSLSPYEKKKYVWKMLYIYMLGYDVDFGHMETVSLISAPKYPEKQV

SEQ ID NO: 9337 - protein, 143 aa, Zea mays
  misc_feature (86)..(86): Xaa can be any naturally occurring amino acid
  misc_feature (88)..(89): Xaa can be any naturally occurring amino acid
  misc_feature (91)..(92): Xaa can be any naturally occurring amino acid
  misc_feature (95)..(95): Xaa can be any naturally occurring amino acid
  misc_feature (115)..(115): Xaa can be any naturally occurring amino acid
  Coding DNA Sequence Number=SeqID_3084
PTRPDEAPFSYGQRGNLDRSSGRSALAAAIFFSFVSCCSRGELATPVLCNIKQKLLYCLGRLSAKLKCDGHLLVKIWGGGKNFFFXKXXKXXKKXRGGGGKKEKKKKKKKNWGGXPGVRGEYQHTGGRFLGSRAVPQVWRIHG

SEQ ID NO: 9338 - protein, 85 aa, Zea mays
  misc_feature (51)..(51): Xaa can be any naturally occurring amino acid
  Coding DNA Sequence Number=SeqID_3086
  Gene Ontology: Mol. function=protein serine/threonine kinase activity; Cellular component=integral to membrane; Biological process=protein amino acid phosphorylation
  Homolog annotation: Hit_ID=A2Y868; Match level="QueryCoverage=75%, HitCoverage=6%, E-value=2e-18, Identity=70%"; Hit description =Putative uncharacterized protein
VILLVIFLFGPVPEGLGACPTLTRVRLGQNFLSGPLPRGFLYVPALATVEXLQGSFLTGRVEEDGSGGGGSSSSRLSLLNLSGVR

SEQ ID NO: 9339 - protein, 134 aa, Zea mays
  Coding DNA Sequence Number=SeqID_3087
  Gene Ontology: Mol. function=hydrolase activity, hydrolyzing O -glycosyl compounds; Biological process=carbohydrate metabolic process
  Homolog annotation: Hit_ID=Q1IUL9; Match level="QueryCoverage=57%, HitCoverage=12%, E-value=3e-14, Identity=46%"; Hit description =Glycoside hydrolase, family 9 precursor
MLTGSGYRHISYLFFNSWKYTTLPGGIVNGITGASNQVADGIAFDEGYAVTRKDDDWRWAEGWLPHSAWRKTGAAVGGPVNEKGQNQMRIPLSNDDGIQTPGIGVFPGVKTLRQVESCAGVARKKAGHGLDQAE

SEQ ID NO: 9340 - protein, 185 aa, Zea mays
  Coding DNA Sequence Number=SeqID_3088
  Gene Ontology: Mol. function=transporter activity; Cellular component= integral to membrane; Biological process=transport
  Homolog annotation: Hit_ID=B0J449; Match level="QueryCoverage=89%, HitCoverage=76%, E-value=1e-47, Identity=61%"; Hit description =Binding-protein-dependent transport systems inner membrane component precursor
  Pfam annotation: Domain name=BPD_transp_1; Domain location=1-185; Score=19.9; E_value=0.00077; Accession=PF00528.12; Description =Binding-protein-dependent transport s
MTTVAGLFSLLAGLPLGLILVTTSPGGIAENRSINRLLGVVINGFRSLPFIILLVALIPFTRLLVGTSLGTWAAIVPLSITATPYFARVAEVSLRDVDRGLIDAVRAMGASKLRIVWEVLIPEALPGILSGFVVTLVALIGASAMAGAIGAGGLGDLAIRYGYQRFDTAVMVAVIAVLIVLVCGI

SEQ ID NO: 9341 - protein, 116 aa, Zea mays
  misc_feature (45)..(45): Xaa can be any naturally occurring amino acid
  misc_feature (58)..(58): Xaa can be any naturally occurring amino acid
  Coding DNA Sequence Number=SeqID_3089
FRFICFLYYPLDLFEDGYVINIFFFIVVNVFGLISLRDLGLDDLXFIFFILDFLGWAXGFLVERDILIDYGRLLLVCIFKPILLFSVKVYVLVCYECLRGCLILLICVFFVGNILV

SEQ ID NO: 9342 - protein, 181 aa, Zea mays
  Coding DNA Sequence Number=SeqID_3090
  Gene Ontology: Mol. function=3'-5'-exoribonuclease activity; Cellular component=cytoplasm; Biological process=regulation of transcription, DNA-dependent
  Homolog annotation: Hit_ID=Q108Z7; Match level="QueryCoverage=94%, HitCoverage=7%, E-value=1e-65, Identity=70%"; Hit description =Transcriptional regulator, putative, expressed
MEGTEVTLSHKTPPPEVQDKILFMINNISISNMEAKAKEFNEVIQEKYYPWFAQYMVMKRQITAHLNRASIEPNFHDLYLKFFDKVNSKSLNKEILKATYENCKVLLRSDLIKSSSEERSLLKNLGSWLGKFTIGRNQALRAKEIDPKSLIVLFKNLTVRIRACGPCSVLRERLLHSMGPP

SEQ ID NO: 9343 - protein, 218 aa, Zea mays
  Coding DNA Sequence Number=SeqID_3091
  Gene Ontology: Mol. function=pyridoxal phosphate binding; Cellular component=cytoplasm; Biological process=amino acid metabolic process
  Homolog annotation: Hit_ID=A1FDF0; Match level="QueryCoverage=99%, HitCoverage=44%, E-value=1e-112, Identity=89%"; Hit description =Aminotransferase class-III
  Pfam annotation: Domain name=Aminotran_3; Domain location=1-219; Score=50.5; E_value=1.2e-17; Accession=PF00202.11; Description =Aminotransferase class-III
QSIMGRIKGYHGSTVAGASLGGMIGMHEQGGLPFPGIVHIPQPYWYAEGDDMTPDEFGVWLAEQLEQKILEVDEDNVAAFIAEPIQGAGGVIIPPETYWPKVKEILAKYDILFVADEVICGFGRTGEWFGSDYYDLKPDLMTIAKGLTSGYIPMGGVIVRDTVAQVLSQGGDFNHGFTYSGHPVAAAVGLENLSILRDEKIVEKARTEAAPYLTKAIA

SEQ ID NO: 9344 - protein, 255 aa, Zea mays
  Coding DNA Sequence Number=SeqID_3092
  Gene Ontology: Mol. function=two-component sensor activity; Cellular component=membrane; Biological process=two-component signal transduction system (phosphorelay)
  Homolog annotation: Hit_ID=A6SW06; Match level="QueryCoverage=94%, HitCoverage=52%, E-value=1e-17, Identity=27%"; Hit description =Sensory box protein
  Pfam annotation: Domain name=EAL; Domain location=180-255; Score= -112.6; E_value=0.0036; Accession=PF00563.11; Description=EAL domain
CLQGDSPEKKLRLTLLIAGVASIVAGIFMATLNFSRGHHDIGCLYIASIALGGYIIIGAFSDRLERHLAIITHALLFTIIVLLLVDNHHAAGKRSEYNYLVALIIGSALVLRQQSFYLSKIFPLLCLLCYLFFVTTGLIWENNRLHLNIPQEAVFTVFNCAVPVTALLSTVFTYGGNYSATDLIKRELASAIERQQLELYYQPQVDGDKNLIGFEALLRWKHPEKGFISPEVFIPVAEKSGLIIDIGKWVLERML

SEQ ID NO: 9345 - protein, 274 aa, Zea mays
  Coding DNA Sequence Number=SeqID_3093
  Homolog annotation: Hit_ID=A2ZA48; Match level="QueryCoverage=100%, HitCoverage=98%, E-value=2e-54, Identity=50%"; Hit description =Putative uncharacterized protein
MNQCVPSWDLVDDPTAAVAGGGGGLNHQVSTTGGAHRGLLLQASAGGAGGGGAFAPVVVPMSNQYYEVAELTWEKGNISYHGLLNRPAHNKYPPAAAPSSAQLHAIAGGGGGRGGGSPSGDRETLEAVVGEAAARSHFLSQPAPPWLIGADAVARAAADALVPCAARAGESAADGGEAGASRRKRPRVVGDDSLVVCASQGSTAPRRRGESALLTQLDACGTEADDVCGFRTTTTNNSTSMERDDKGSPDTENTSIGGGASDSRCFSRRSQASS

SEQ ID NO: 9346 - protein, 101 aa, Zea mays
  Coding DNA Sequence Number=SeqID_3094
MATADGALALVLFPEQELAASAGPSSVSMHWIRSAQLIWFVRSFWALGFWLWLSAGAGPATGARQRNCPAAANRPTNDEASKSLRLQDALGTGTTGAPDPR

SEQ ID NO: 9347 - protein, 69 aa, Zea mays
  Coding DNA Sequence Number=SeqID_3096
  Gene Ontology: Mol. function=transcription factor activity; Cellular component=intracellular; Biological process=regulation of transcription, DNA-dependent
  Homolog annotation: Hit_ID=P03023; Match level="QueryCoverage=100%, HitCoverage=19%, E-value=9e-14, Identity=60%"; Hit description =Lactose operon repressor
RVGEDISVVGYPISYTVSCYIPLLAPVIQDFLLLGLNSVDIVLPLSQGQTLEGTQVLPVSLVERGAALA

SEQ ID NO: 9348 - protein, 154 aa, Zea mays
  Coding DNA Sequence Number=SeqID_3097
  Gene Ontology: Mol. function=oxidoreductase activity; Cellular component=cytoplasm; Biological process=hydrogen peroxide catabolic process
  Homolog annotation: Hit_ID=A9ACJ7; Match level="QueryCoverage=98%, HitCoverage=20%, E-value=3e-51, Identity=67%"; Hit description =Catalase
  Pfam annotation: Domain name=Catalase-rel; Domain location=91-144; Score=89.2; E_value=1.3e-23; Accession=PF06628.3; Description =Catalase-related
LSRLGSPNFHQLPINAPKCPYANHQRDGHMQMETPRGRVNYEPSSLDPASPRATPAGFHSFAQAADDGRKTRVRAESFADHYSQPRQFYLSQSTPEQAHIASAFTFELSKVQAVHVREAVVANLRHVDEDLARRVADALALPKLPDPGPAAVAT

SEQ ID NO: 9349 - protein, 237 aa, Zea mays
  Coding DNA Sequence Number=SeqID_3098
  Homolog annotation: Hit_ID=A8GC23; Match level="QueryCoverage=99%, HitCoverage=61%, E-value=1e-56, Identity=52%"; Hit description =Putative uncharacterized protein precursor
  Pfam annotation: Domain name=TatC; Domain location=26-224; Score= -74.6; E_value=0.07; Accession=PF00902.8; Description=Sec-independent protein translocase protein (TatC)
QLGVWGAVALTLLSACISGPWLHAVVRFLIGVASGWAMVLVAAWSNEQLLHHSRPGLSAAVFAGPGTGIFISGMLAVMLHASGVSAAFAWAAYGVLALLLIAAIARFLPRSGQLHRPQQAAEPLLLTRDLKRLILSYSLAGFGYILPATFLSQMAAARFPDSAFAQFVWPVFGGAAVIGIVLGIVTRHWGSSHRRLALVLWAQALGVIAAIVLPGINGLLLAALLIGGGFLCVVQLS

SEQ ID NO: 9350 - protein, 292 aa, Zea mays
  Coding DNA Sequence Number=SeqID_3099
  Gene Ontology: Mol. function=oxidoreductase activity, acting on CH-OH group of donors; Cellular component=plasma membrane; Biological process=electron transport
  Homolog annotation: Hit_ID=O34214; Match level="QueryCoverage=100%, HitCoverage=47%, E-value=1e-156, Identity=90%"; Hit description =Gluconate 2-dehydrogenase flavoprotein precursor
CSGYACYMYSKASPNVNILPALRQEPKFELRNNAYVLRVNLTDDKKRATGVTYLDGQGREVEQPADLVILSAFQFHNVHLMLLSGIGKPYNPISNEGVVGRNFAYQNISTLKALFDKNTTTNPFIGAGGAGVAVDDYNADNFDHGPYGFVGGSPFWVNQAGNKPISGLPTPTGTPNWGSQWKAAVADTYNHHVSMDAHGAHQSYRANYLDLDPNYKDAYGQPLLRMTFDWQDNDIKMAQFMIGKMRKITEAMNPKMIIGGAKGPGAHFDTTVYQTTHMSGGAIMGEDPKTSA

SEQ ID NO: 9351 - protein, 91 aa, Zea mays
  misc_feature (39)..(39): Xaa can be any naturally occurring amino acid
  Coding DNA Sequence Number=SeqID_3100
  Gene Ontology: Mol. function=UDP-3-O-[3-hydroxymyristoyl] N -acetylglucosamine deacetylase activity; Biological process=lipid A biosynthetic process
  Homolog annotation: Hit_ID=A7FM60; Match level="QueryCoverage=95%, HitCoverage=28%, E-value=3e-40, Identity=90%"; Hit description=UDP-3- O-[3-hydroxymyristoyl] N-acetylglucosamine deacetylase
  Pfam annotation: Domain name=LpxC; Domain location=1-66; Score= -166.0; E_value=0.055; Accession=PF03331.4; Description=UDP-3-O-acyl N-acetylglycosamine deacetylase
AFGEDDYRVLNEDGLRFEDEFVRHKMLDAIGDLFMCGYXIIGAFTAFKSGHALNNKLLQAVLAQESAWEFVTFEDEAEMPLAFRAPSTVLA

SEQ ID NO: 9352 - protein, 128 aa, Zea mays
  Coding DNA Sequence Number=SeqID_3101
DPQEAARENQETTGTKDSRQILEKRRPPGRRGGQLQSKKKPQEQPRTTNTRRDDKNTPMRRKQEERQRARGPDGGSAGGPGPGARKGTRRPDGESSANQKRQTTRREGGERDKHQAQRISSELKLQEN

SEQ ID NO: 9353 - protein, 64 aa, Zea mays
  Coding DNA Sequence Number=SeqID_3103
  Homolog annotation: Hit_ID=Q96L81; Match level="QueryCoverage=98%, HitCoverage=98%, E-value=1e-26, Identity=84%"; Hit description =Neural cell expressed developmentally down-regulated protein 8
MDPPFYLPALSLIMRHHISSHSVGHQSHYPLPWMPSLVCLLVGDCEDPRRQCSWPKGPLLAIGF

SEQ ID NO: 9354 - protein, 163 aa, Zea mays
  Coding DNA Sequence Number=SeqID_3104
  Gene Ontology: Biological process=intein-mediated protein splicing
  Homolog annotation: Hit_ID=A8GCR3; Match level="QueryCoverage=100%, HitCoverage=27%, E-value=3e-89, Identity=98%"; Hit description =Putative uncharacterized protein
QSTVLDTVMKTTSASIAVRNLCAPTLPCYPPAQDRFHWRVLSHLGSGFLSMMDNADVLRGTLALYEWTDSEMNRRRLEAIIDVKHREIERFEQGYLVRGVQIEVTLDSHGFAGRGDICLFGEMLSRFFALYTDIYLFNRLIIILQPTGERLEWEEKHNRRIPG

SEQ ID NO: 9355 - protein, 130 aa, Zea mays
  Coding DNA Sequence Number=SeqID_3105
  Gene Ontology: Mol. function=enoyl-CoA hydratase activity; Cellular component=mitochondrial matrix; Biological process=metabolic process
  Homolog annotation: Hit_ID=A8H4G9; Match level="QueryCoverage=93%, HitCoverage=46%, E-value=5e-33, Identity=60%"; Hit description=Enoyl- CoA hydratase/isomerase
  Pfam annotation: Domain name=ECH; Domain location=19-130; Score=65.8; E_value=1.4e-16; Accession=PF00378.10; Description=Enoyl-CoA hydrataseisomerase family
MPDSAAPPVLLERPLAGVALLRLNRPHATNALSLELQALLSQHFAELGADPQVRCILLTGGDNVFAAGGDIGSMAGVGPIDIYQRHTERVWAPIQHCPKPVIAAVCGYAYGGGCELAMLADLIVAGRNAR

SEQ ID NO: 9356 - protein, 157 aa, Zea mays
  Coding DNA Sequence Number=SeqID_3106
  Gene Ontology: Mol. function=RNA methyltransferase activity; Biological process=RNA modification
  Homolog annotation: Hit_ID=A8GLB5; Match level="QueryCoverage=99%, HitCoverage=99%, E-value=8e-71, Identity=81%"; Hit description=RNA methyltransferase, TrmH family, group 2
  Pfam annotation: Domain name=SpoU_methylase; Domain location=1-142; Score=155.8; E_value=1.1e-43; Accession=PF00588.9; Description=SpoU rRNA Methylase family
MFHVILFQPEIPPNTGNIIRLCANSGCDLHLIEPISFELDDKRLRRAGLDYHEYATLKKHASYAAFLAAEAPQRLFALTTKGTPAHSAVSYQPGDYLLFGPESRGLPPEILNALPAEQKIRIPMRAESRSMNLSNAVSVVVYEAWRQLDYAGALIKG

SEQ ID NO: 9357 - protein, 116 aa, Zea mays
  Coding DNA Sequence Number=SeqID_3107
  Gene Ontology: Mol. function=oxidoreductase activity; Biological process=electron transport
  Homolog annotation: Hit_ID=Q7N0A3; Match level="QueryCoverage=71%, HitCoverage=12%, E-value=5e-22, Identity=66%"; Hit description=2,4 -dienoyl-CoA reductase [NADPH]
QAHGVQMWGDVEYLKIDNDGLHLRHQGEALTLAVDNIVICAGQEPLRTLAQALTARGKAVRLIGGADVAQELDARRAIAQATELALSQLAVAKQLLHFLMIAKVAVADDAQLAAIL

SEQ ID NO: 9358 - protein, 71 aa, Zea mays
  Coding DNA Sequence Number=SeqID_3108
  Gene Ontology: Mol. function=lyase activity
  Homolog annotation: Hit_ID=A1SKZ3; Match level="QueryCoverage=90%, HitCoverage=21%, E-value=4e-22, Identity=75%"; Hit description=Urea amidolyase related protein
QGELFPRRDGELPSEGTVLGAIQVPPDGQPVVLLADHGPTGGYPVVGVAHPDDLWQLAQLRPGEPVTLRAA

SEQ ID NO: 9359 - protein, 104 aa, Zea mays
  misc_feature (73)..(73): Xaa can be any naturally occurring amino acid
  Coding DNA Sequence Number=SeqID_3109
  Gene Ontology: Mol. function=protein binding
  Homolog annotation: Hit_ID=Q41805; Match level="QueryCoverage=99%, HitCoverage=8%, E-value=6e-16, Identity=43%"; Hit description =Extensin-like protein precursor
MLGMTEAGGGEVGDLPEDVQIDDRIGATDLPSLRLLLSFLKRQAWHRGCFYGLRVYTAYWAVQDLDENDGYIXTDVLDYRKTTVVAYIDLKGGDLVLNLSLEIT

SEQ ID NO: 9360 - protein, 128 aa, Zea mays
  Coding DNA Sequence Number=SeqID_3110
  Gene Ontology: Mol. function=cinnamoyl-CoA reductase activity; Biological process=cellular metabolic process
  Homolog annotation: Hit_ID=O82055; Match level="QueryCoverage=85%, HitCoverage=27%, E-value=6e-27, Identity=62%"; Hit description =Cinnamoyl-CoA reductase
  Subcellular localization annotation: CTP_CleavageSite=46; ConfidenceScore=5.20e-01
LITRCNILLPDSTPAGNPGCNSRGLQLQWVLRPFVVSLRLFPAWCRCSDEVNPRKRPYRFSNQKLRDLGLVFRPVSQSLYDTVKNLQEKGHLAVLGEQKKKTTTTTEAGREECPAADLQQQGGIAIRA

SEQ ID NO: 9361 - protein, 160 aa, Zea mays
  Coding DNA Sequence Number=SeqID_3111
  Gene Ontology: Mol. function=nucleotide binding; Cellular component =chromosome; Biological process=DNA metabolic process
  Homolog annotation: Hit_ID=P75828; Match level="QueryCoverage=100%, HitCoverage=28%, E-value=1e-67, Identity=76%"; Hit description =Uncharacterized protein ybjD
QAHGSDALPAGARPLLLVEDPETRLHPIMLSVAWNLLALMPLQKIATTNSGELLSQVALEQICRLVREPDRVAAWRIGPEGLSAEEARRIGFHIRVNRPSALFARCWLLVEGETEVWIINELARQRGYHFAAEGVKVIEFAQSGLKPLLKYARRMGIAWH

SEQ ID NO: 9362 - protein, 206 aa, Zea mays
  Coding DNA Sequence Number=SeqID_3112
  Gene Ontology: Mol. function=oxidoreductase activity; Biological process=electron transport
  Homolog annotation: Hit_ID=Q0S6M3; Match level="QueryCoverage=88%, HitCoverage=48%, E-value=3e-42, Identity=54%"; Hit description =Possible oxidoreductase
MTLDGEQVLVVGAGISPVQMLIEIARSAPDVTTFWSSRRKPVFSDAPFSPEPGRKAVARVERRVRAGLPPTSVVSVTGLRRTPAIAAAEADGILAWMPIFDEITPDGVRWRDGSRPDLPLDSIFWNTGFRSALDHLAPLRLRGPGGGITMTGRLATVVADEPRVQLLGYGPSASTIGANRAGREAARVVENLLREPMTRAGQTIRS

SEQ ID NO: 9363 - protein, 84 aa, Zea mays
  Coding DNA Sequence Number=SeqID_3113
  Gene Ontology: Mol. function=nucleotidyltransferase activity; Biological process=Mo-molybdopterin cofactor biosynthetic process
  Homolog annotation: Hit_ID=Q8ZS15; Match level="QueryCoverage=96%, HitCoverage=41%, E-value=2e-34, Identity=87%"; Hit description =Putative molybdochetalase
PTALLSRQVGVIRKQSLILNLPGQPKSINETLEGLKADDGTVKVPGIFAAVPYCLQLLEGPYVETHPEVVAAFRPKSARRETNV

SEQ ID NO: 9364 - protein, 148 aa, Zea mays
  Coding DNA Sequence Number=SeqID_3114
  Gene Ontology: Mol. function=ATP-dependent helicase activity; Cellular component=nucleus; Biological process=mRNA processing
  Homolog annotation: Hit_ID=A7EC65; Match level="QueryCoverage=100%, HitCoverage=14%, E-value=8e-61, Identity=78%"; Hit description =Putative uncharacterized protein
GIKYVVDAGYSKMKVYNPKMGMDTLQITPISQANAGQRSGRAGRTGPGKAFRLYTEKAFKEELYIQTIPEIQRTNLANTVLMLKSLGVKDLLDFDFMDPPPQDTISTSMFDLWALGALDNLGELTELGRKMSAFPMDPSLAKLLITAE

SEQ ID NO: 9365 - protein, 180 aa, Zea mays
  Coding DNA Sequence Number=SeqID_3115
  Gene Ontology: Mol. function=transcription factor activity; Cellular component=cytoplasm; Biological process=regulation of transcription, DNA-dependent
  Homolog annotation: Hit_ID=A0K8T5; Match level="QueryCoverage=97%, HitCoverage=56%, E-value=5e-81, Identity=86%"; Hit description =Transcriptional regulator, LysR family
  Pfam annotation: Domain name=LysR_substrate; Domain location=17-180; Score=81.5; E_value=2.7e-21; Accession=PF03466.10; Description=LysR substrate binding domain
LACLQAAEAERLTVRSASGLAGRLRIGFVHSMLYRGLPDAVRRFEADYPGVEIVLSEMNTQAQVQAIQRGQIDLGYAHWGHCPPEVESAPVYAEPFVCCLPAAHRLARRRQVALAALAAEPFILFPRDAAPHYHDLIIAQCVNAGFSPLIRHEARLWQTILSMIEFGMGIALVPRVLQVD

SEQ ID NO: 9366 - protein, 254 aa, Zea mays
  Coding DNA Sequence Number=SeqID_3116
  Gene Ontology: Mol. function=catalytic activity; Cellular component =integral to membrane; Biological process=carbohydrate metabolic process
  Homolog annotation: Hit_ID=A7MK91; Match level="QueryCoverage=98%, HitCoverage=57%, E-value=1e-114, Identity=78%"; Hit description =Putative uncharacterized protein
MKFRVMSALGIAVLLSACDSGSDLDPQRQIGPDPQLPQAKNFFMPPMQVPEGTAWKEGETPKVADGLKIEKIPASLVHPRQLYVLPNGDVLVAEANGVKNPVTAPKELIMSLVQKSSGKGGPGGNRITLLRNVNGKWEQHRFIENLNAPFGMQLIGNTLYVANADSLVKFPYQTGETEIRTPPEEVTSLPGGELNHHWTKALLASPDGSKLYVGVGSNSNITENGIGAEYGRAAVWEVDAATGASRIYASGIRN

SEQ ID NO: 9367 - protein, 83 aa, Zea mays
  misc_feature (21)..(21): Xaa can be any naturally occurring amino acid
  misc_feature (60)..(60): Xaa can be any naturally occurring amino acid
  Coding DNA Sequence Number=SeqID_3117
  Gene Ontology: Biological process=cell redox homeostasis
  Homolog annotation: Hit_ID=P76046; Match level="QueryCoverage=91%, HitCoverage=16%, E-value=7e-20, Identity=63%"; Hit description =Uncharacterized protein ycjX
ELERISMDCLGLASVQATFMXLVDHRGEKLPALRGHRLTDGEPLTFYPGEGPPCLPVNSXWHQHGVQLEQMRPQQMDVYRGVS

SEQ ID NO: 9368 - protein, 164 aa, Zea mays
  Coding DNA Sequence Number=SeqID_3118
  Gene Ontology: Mol. function=ATP-dependent DNA helicase activity; Biological process=DNA repair
  Homolog annotation: Hit_ID=Q8CZY3; Match level="QueryCoverage=99%, HitCoverage=13%, E-value=2e-48, Identity=63%"; Hit description=DNA helicase, ATP-dependent dsDNA/ssDNA exonuclease V subunit, ssDNA endonuclease
QAGQQQRALLGKTPDQRPMQASDITVLVRSRNEANLIRAALNQLGIPSVYLSNRDSVYTTPEARELLWLLQAILAPEQERMLRTALATSLFAFDAAQLDALDQDARGWDALVDTFARWQQLWHQRGVLPMLRQLMLERQLAENLLASENGERRLTDLLHLGELL

SEQ ID NO: 9369 - protein, 168 aa, Zea mays
  Coding DNA Sequence Number=SeqID_3119
  Gene Ontology: Mol. function=transcription factor activity; Cellular component=intracellular; Biological process=regulation of transcription, DNA-dependent
  Homolog annotation: Hit_ID=A7MNF5; Match level="QueryCoverage=100%, HitCoverage=64%, E-value=4e-56, Identity=67%"; Hit description =Putative uncharacterized protein
  Pfam annotation: Domain name=FCD; Domain location=100-168; Score= -18.2; E_value=0.0041; Accession=PF07729.2; Description=FCD domain
  Pfam annotation: Domain name=GntR; Domain location=8-71; Score=81.8; E_value=2.3e-21; Accession=PF00392.11; Description=Bacterial regulatory proteins, gntR fa
  Pfam annotation: Domain name=Rrf2; Domain location=29-125; Score= -38.1; E_value=0.09; Accession=PF02082.10; Description=Transcriptional regulator
  Pfam module annotation: Pfam domain module=FCD::GntR::Rrf2; Domain location=100-168::8-71::29-125
MTEPTPRLADTLRARLSAWIEEHQLKPGMRLPSERALAARFGASRSSVREAIQQLISSGVLISKRGGGTWLCEPQEPWSEQRIVEPIRQLLAADPDYRWDILEARHAIEASTAWHAAQRATEADKERLRYAFDALIQMNDCDDPELAAQADLRFHLAIAEASHNLVLL

SEQ ID NO: 9370 - protein, 117 aa, Zea mays
  misc_feature (93)..(93): Xaa can be any naturally occurring amino acid
  Coding DNA Sequence Number=SeqID_3120
  Gene Ontology: Mol. function=inorganic phosphate transmembrane transporter activity; Cellular component=integral to membrane; Biological process=phosphate transport
  Homolog annotation: Hit_ID=Q7N9U6; Match level="QueryCoverage=100%, HitCoverage=36%, E-value=2e-49, Identity=83%"; Hit description =Phosphate transport system permease protein PstC
KSAPGFGCTTWKVIWHIVRPNTKNGVIDGVMLGMGRALGETMPVPFIIGNTYQVDSFSLYMPGNSITCALANEFAEAEWGLHTSALMEMGLIXFVITFIVLALSKLMIMRLARNEGR

SEQ ID NO: 9371 - protein, 250 aa, Zea mays
  Coding DNA Sequence Number=SeqID_3121
  Gene Ontology: Mol. function=nucleoside-triphosphatase activity; Cellular component=excinuclease repair complex; Biological process =response to DNA damage stimulus
  Homolog annotation: Hit_ID=A2WID3; Match level="QueryCoverage=99%, HitCoverage=52%, E-value=1e-122, Identity=87%"; Hit description =Excinuclease ATPase subunit
CRTTEGAPAGPEGWLTVHRATLHNLRDVTVGIPLARLVAVTGVSGSGKSTLARDVLMTNLLDAVGRSVLSSPATRRARKAAQQDAPAANRRSSVLARSAPRPSLNATHAWQGCESLSGWEQIDRVLEVDQTPIGKTPRSCPATYIGVWDTIRKLFADTLEARARGYTASRFSFNTGDGRCPACEGQGVRTIGMSFLPDVKVPCDVCHGQRFNPETLAVTWRGRNIGDVLTMEIDEAVEFFAPISNIAHPL

SEQ ID NO: 9372 - protein, 131 aa, Zea mays
  misc_feature (70)..(70): Xaa can be any naturally occurring amino acid
  misc_feature (110)..(110): Xaa can be any naturally occurring amino acid
  Coding DNA Sequence Number=SeqID_3122
  Gene Ontology: Mol. function=3-dehydroquinate synthase activity; Cellular component=cytoplasm; Biological process=aromatic amino acid family biosynthetic process
  Homolog annotation: Hit_ID=A2Z3J8; Match level="QueryCoverage=67%, HitCoverage=20%, E-value=5e-23, Identity=64%"; Hit description =Putative uncharacterized protein
YPILHRHRRSSTSPTRWTGDQIIHFFPQLLSWSGQARIPFYCVDRHVHELTVSGGDHPTVSPIYLAKVAXALTPNNPNVSVESVLVPIGEKIKAMDALTKLFVKAVEYRXVRRCTFVALGGGVMGDMCGSA

SEQ ID NO: 9373 - protein, 236 aa, Zea mays
  misc_feature (8)..(8): Xaa can be any naturally occurring amino acid
  Coding DNA Sequence Number=SeqID_3123
  Gene Ontology: Mol. function=siderophore-iron transmembrane transporter activity; Cellular component=cell outer membrane; Biological process=siderophore transport
  Homolog annotation: Hit_ID=O52981; Match level="QueryCoverage=98%, HitCoverage=33%, E-value=1e-100, Identity=72%"; Hit description =Ferrioxamine receptor
  Pfam annotation: Domain name=TonB_dep_Rec; Domain location=39-224; Score=32.9; E_value=1.2e-06; Accession=PF00593.14; Description=TonB dependent receptor
LACLQDEXAWQRWHLDLSGRYDRIVSENGNSRRQDDHVSGRAALLYAFDNGVSPYVSWSQAITPASLTDPDGNQLKPTTSEQYEAGVKYQPNGTRDLYSVALYDLTQNDVANRNVQDGTYTPSGKVHAQGIELEARSQLTERFSTIAGYTLNHLRFKDSVDGNDGHTPYVTPNSMASLWGHYQFDYGLSAGAGVRYIGRQWADNENTTRLPSVTLFDASLRADLGAWQSNLKGAWL

SEQ ID NO: 9374 - protein, 275 aa, Zea mays
  misc_feature (176)..(176): Xaa can be any naturally occurring amino acid
  misc_feature (256)..(256): Xaa can be any naturally occurring amino acid
  Coding DNA Sequence Number=SeqID_3124
  Gene Ontology: Mol. function=glycerol-3-phosphate O-acyltransferase activity; Cellular component=chloroplast; Biological process =metabolic process
  Homolog annotation: Hit_ID=A2ZAK6; Match level="QueryCoverage=84%, HitCoverage=48%, E-value=1e-73, Identity=65%"; Hit description =Putative uncharacterized protein
  Subcellular localization annotation: CTP_CleavageSite=49; ConfidenceScore=5.43e-01
MHAPPLVAFAGGACPASAASSLSPWLASLRPAIVAAPARLLWFRRGALRLEAKAAWRATGGGRGPRVPAKGAVLASYMGAEEVVGPLSLLDEEELILHIRKERDNGKLPADVAINLEELYYNYRNAVLQNGDPNAYEIMLSNMTALFDRVLLDVQNPFTFPPYHKAVREPFDYYMXFGQNYIRPLVDFRNSYVGNISLFHDMEEKPHQRHNVVLMSNHPTDADPAIIASLLEKTHPWTSQNTVYAAGDPAVTDPLXKPFTIANKSHLCVLDKAYE

SEQ ID NO: 9375 - protein, 83 aa, Zea mays
  Coding DNA Sequence Number=SeqID_3125
  Gene Ontology: Mol. function=3-dehydroquinate synthase activity; Cellular component=cytoplasm; Biological process=aromatic amino acid family biosynthetic process
  Homolog annotation: Hit_ID=A7MKL4; Match level="QueryCoverage=98%, HitCoverage=22%, E-value=3e-31, Identity=76%"; Hit description =Putative uncharacterized protein
MEKITVSLGDRSYPITIAAGLFNDPASFWPLKAGDNAMLVTNQTLAPIYLDKLATLLSNAGVKVDQVILPDGEQYKTLAVMDE

SEQ ID NO: 9376 - protein, 152 aa, Zea mays
  Coding DNA Sequence Number=SeqID_3126
  Gene Ontology: Mol. function=transcription repressor activity; Biological process=regulation of nitrogen utilization
  Homolog annotation: Hit_ID=Q2QUH8; Match level="QueryCoverage=35%, HitCoverage=17%, E-value=1e-14, Identity=72%"; Hit description =Isoflavone reductase, putative, expressed
IGSSLAQGHPTLVLLQPEIGLDIDKLQMLPSFEAQGAWLVEASLEDHAGLLAAVDNYRPPPQRPHDMHPSPGRPRCLRGFAPLPAHGPPTYLRLQSTTVWLSTQRLTFACGRCLATRTAAGHSPTFDRQTPPLHPASSATVLDHPAPSQQQQ

SEQ ID NO: 9377 - protein, 230 aa, Zea mays
  Coding DNA Sequence Number=SeqID_3127
  Gene Ontology: Mol. function=glycerol-3-phosphate dehydrogenase activity; Cellular component=glycerol-3-phosphate dehydrogenase complex; Biological process=glycerol-3-phosphate metabolic process
  Homolog annotation: Hit_ID=Q2K200; Match level="QueryCoverage=85%, HitCoverage=33%, E-value=3e-63, Identity=58%"; Hit description =Probable glycerol-3-phosphate dehydrogenase protein
  Pfam annotation: Domain name=DAO; Domain location=21-229; Score=-8.8; E_value=4.2e-05; Accession=PF01266.14; Description=FAD dependent oxidoreductase
MEQVLTREQRLSRLRARSSLPVLIVGGGINGISTFRELALQGIPAVLVEKGDWCQAASGALSRMIHGGLRYLETGEFGLVKESVMERDRLLKNAAHYVFPLRTTVPIDNLGGGLVNATRRFLRLSDKPTRRGALLIKTGLSLYDLYTRQYGAMPRHQLRNEAATRDRWPGFAPWVKYSASYYDAWISAPERLGFELIEDAERACPEALALNYLRVVSASDETVLLEDTLS

SEQ ID NO: 9378 - protein, 175 aa, Zea mays
  Coding DNA Sequence Number=SeqID_3128
  Gene Ontology: Mol. function=inorganic phosphate transmembrane transporter activity; Cellular component=membrane; Biological process=phosphate transport
  Homolog annotation: Hit_ID=A8GEX0; Match level="QueryCoverage=100%, HitCoverage=32%, E-value=4e-64, Identity=72%"; Hit description =Phosphate transporter
  Pfam annotation: Domain name=PHO4; Domain location=27-175; Score= -172.3; E_value=0.0087; Accession=PF01384.11; Description=Phosphate transporter family
QPPPAAMPAAREVLTEYVRTSQNRPQVLPALGMMLGDIGEQIRQYGSVENIPAQAVTNTRNDMYLASETIKHLQSANVALPEETARNLTAVKHELDAATRFIPMWVKVVVAIALGLGTMVGWRRIVVTVGERIGKTHLTYAQGASAELVAMATIGAADAFGLPVSTTHVLSSGVA

SEQ ID NO: 9379 - protein, 224 aa, Zea mays
  misc_feature (19)..(19): Xaa can be any naturally occurring amino acid
  Coding DNA Sequence Number=SeqID_3129
  Gene Ontology: Mol. function=pyridoxine 4-dehydrogenase activity; Cellular component=cytosol; Biological process=auxin mediated signaling pathway
  Homolog annotation: Hit_ID=A0T5L3; Match level="QueryCoverage=100%, HitCoverage=56%, E-value=1e-113, Identity=92%"; Hit description =Aldo/keto reductase
  Pfam annotation: Domain name=Aldo_ket_red; Domain location=63-224; Score=-101.0; E_value=0.0053; Accession=PF00248.11; Description =Aldoketo reductase family
MRIACRWSMRGGCGGGLEXASIVNQRRMNWLGVSRLSRAAMRPESGSFTHHRKDTDMDKRQLGRTGPQVSAIGLGCMGMSDLYGPADRDESIATLHAALDNGITLLDTGDFYGMGDNEMLIRDALRGRTRDQVLISVKFGALRDPAGAFAGYDARPQAIRNFVAYSLKRLGTDHIDIYRPARVDPAVPIEDTVGALADLVKAGYVRHIGLSEVGADTIRRAAAV

SEQ ID NO: 9380 - protein, 158 aa, Zea mays
  Coding DNA Sequence Number=SeqID_307
HLIWCESLGSSGLQRLQRRGRAGPRARYATHQPAERRIGSIEGFTPNHPHVHPKSVQSNAHSSDPVEDSHQITLPTTTNQTESGSRGLRSGRRLLTAGVEVSKPGKHPSNPADARRQDEPEADEMRRQRRLGKKRAKGEERTGEGNGRAVLTSVRVRV

SEQ ID NO: 9381 - protein, 226 aa, Zea mays
  Coding DNA Sequence Number=SeqID_309
  Homolog annotation: Hit_ID=Q6J9V1; Match level="QueryCoverage=100%, HitCoverage=100%, E-value=3e-65, Identity=64%"; Hit description =Putative uncharacterized protein
MEEDPAGGEDLSSTAASSRHSYSGDDGEESGWTSYIDYFMETQQRRRRRKQGDVSRAAGDGPSTDDDAGRRRSSTAECSSGAGVGASSSCLPPPVLVDPPVVVVSRRLSLREGWRRKKVLHDESLEDTATSPISSPKLIELRDPDDATHHQTKTSCCAEISRSKRKNSTGGDVNNGANTRTDHTAAVKEDSAAYGNDEEISRPLLGPAYACFSCIADDDANKFIGC

SEQ ID NO: 9382 - protein, 181 aa, Zea mays
  misc_feature (63)..(63): Xaa can be any naturally occurring amino acid
  Coding DNA Sequence Number=SeqID_310
  Homolog annotation: Hit_ID=A2WW62; Match level="QueryCoverage=94%, HitCoverage=98%, E-value=1e-22, Identity=44%"; Hit description =Putative uncharacterized protein
  Pfam annotation: Domain name=VQ; Domain location=43-74; Score=31.2; E_ value=3.7e-06; Accession=PF05678.4; Description=VQ motif
  Subcellular localization annotation: CTP_CleavageSite=49; ConfidenceScore=5.14e-01
MDHEQRRQRQQHSPRGNAPGSGRCGSSSRKHKGGGKKPIKVVYISNPVRVKTSAAGFRALVQXELTGRDADPSKYSPEDLAGAAVAAGDPDCGTAQGLSPGDTTAASSDTIVAIPSPAAVDHLHEHDTSPAAAPADGGDYYDDEEEDEGGFGSQLLEKYYTVFSPPTLLYDHHPHNKFPYG

SEQ ID NO: 9383 - protein, 117 aa, Zea mays
  Coding DNA Sequence Number=SeqID_311
  Subcellular localization annotation: CTP_CleavageSite=39; ConfidenceScore=5.65e-01
WSMKTAGDLYSPSLSSIKRRRASSRLSAHSHKLSSLAARQTTERSFCRNTILPCRRSSDPGATTIGRPSARRPERPRRWQGPLGACHSASTTLPARPSCSHLSLRNKVNTISCVKII

SEQ ID NO: 9384 - protein, 345 aa, Zea mays
  Coding DNA Sequence Number=SeqID_313
  Gene Ontology: Mol. function=structural constituent of ribosome; Cellular component=chloroplast thylakoid membrane; Biological process=translation
  Homolog annotation: Hit_ID=A3B3M6; Match level="QueryCoverage=83%, HitCoverage=82%, E-value=1e-135, Identity=83%"; Hit description =Ribosomal protein L1
  Pfam annotation: Domain name=Ribosomal_L1; Domain location=123-328; Score=428.7; E_value=8.4e-126; Accession=PF00687.11; Description =Ribosomal protein L1pL10e family
  Subcellular localization annotation: CTP_CleavageSite=52; ConfidenceScore=5.72e-01
MATAAAATASSSLLAPAASSTAPASSNALLFPSSVPSLRAYPRLLLAFRRPAAAAVADPQGAVLEEEAEVDQQGQYDDDDGYEGGRGPAFTAPTRPRTGKAALLLKRDRTRSKRFLEIQKLRESKKDYDVPTAISLMKQMSSAKFVESAEAHFRMNLDPKYNDQQLRATVNLPKGTGQSVKIAVLTQGEKIDEARAAGADIVGGEDLIEQIKGGFMEFDKLIASPDMMPKVAGLGKILGPRGLMPNPKAGTVSSNITQAIEEFKKGKVEYRVDKSGIVHIPFGKVDFPEEDLIANFMSVVRSVERNKPSGAKGIYWKTAYLCSSMGPSIKLNIKEMLDYGLESSD

SEQ ID NO: 9385 - protein, 217 aa, Zea mays
  misc_feature (186)..(188): Xaa can be any naturally occurring amino acid
  Coding DNA Sequence Number=SeqID_314
RRILDCINGATRLCTKISLLSSREERNRPMWLCLRNERKEKNENKKEGLFPCFVPKKKQILISDRTERLRRTHHITSIQGQQPRESLREQPESREHSEQRQQPRHRRRAADGARPGRQEPRVLREPRHRRRRRRPRERPRRHPRRPRRAERERRRGPRWRWRRRQECRAAVVGRDAAGRPQQQRRXXXRGQQDYSARSCGRHLPSLVQAFLSSVAWR

SEQ ID NO: 9386 - protein, 117 aa, Zea mays
  Coding DNA Sequence Number=SeqID_316
  Gene Ontology: Mol. function=aminoacyl-tRNA hydrolase activity; Cellular component=ribonucleoprotein complex; Biological process =mRNA processing
  Homolog annotation: Hit_ID=Q9M5P4; Match level="QueryCoverage=93%, HitCoverage=42%, E-value=2e-56, Identity=97%"; Hit description =Chloroplastic group IIB intron splicing facilitator CRS2, chloroplast precursor
  Subcellular localization annotation: CTP_CleavageSite=45; ConfidenceScore=5.72e-01
MSLLAAAIPSTSSHFSAPFLPSFRMPRKNLTAPLHRIRRPRPFTVVSSVPDPAAGPVEYTPWLIAGLGNPGNKYYGTRHNVGFEMVDRIAGEEGITMNTVQSKSLLGIGLKCHYAWH

SEQ ID NO: 9387 - protein, 150 aa, Zea mays
  Coding DNA Sequence Number=SeqID_317
  Gene Ontology: Mol. function=rRNA pseudouridylation guide activity; Cellular component=ribonucleoprotein complex; Biological process =ribosome biogenesis and assembly
  Homolog annotation: Hit_ID=Q6YWS6; Match level="QueryCoverage=100%, HitCoverage=100%, E-value=4e-71, Identity=88%"; Hit description =Putative high mobility group-like nuclear protein 2
  Pfam annotation: Domain name=Ribosomal_L7Ae; Domain location=30-124; Score=92.4; E_value=1.5e-24; Accession=PF01248.16; Description =Ribosomal protein L7AeL30eS12eGadd45 family
MGSDQETEKKKTPVALMPIAKPLAGKKLCKRTLKLVRRASEAKCLKRGVKEVVKSIRRGNKGLCVIAGNISPIDVITHVPILCEEFNVPYIYVPSKEDLATAGTTKRPTCCVLVLTKPNKGELSDEVKDKLKSDYDQVVTEVAEATSAMF

SEQ ID NO: 9388 - protein, 180 aa, Zea mays
  Coding DNA Sequence Number=SeqID_318
  Subcellular localization annotation: CTP_CleavageSite=65; ConfidenceScore=5.76e-01
LLPASGPSLLRVPVALSARRRSHPDALVSRRSTSTLPSGKSSSAALLGNKGTGQPGRASGRPLLAAATLRTSSELIGTAQGNAYLRKWRPRKNTTKKWFPTQPEADSNQQLVATEASTVQLPTIEEASTVQQPVNNIPSTSLQTIEEASTVQLSTSEWSPPRRLRTCVKKKLTPKKKIGF

SEQ ID NO: 9389 - protein, 177 aa, Zea mays
  misc_feature (84)..(84): Xaa can be any naturally occurring amino acid
  Coding DNA Sequence Number=SeqID_320
  Gene Ontology: Mol. function=protein dimerization activity; Cellular component=nucleus; Biological process=regulation of transcription, DNA-dependent
  Homolog annotation: Hit_ID=A2X966; Match level="QueryCoverage=100%, HitCoverage=100%, E-value=2e-46, Identity=64%"; Hit description =Putative uncharacterized protein
  Pfam annotation: Domain name=bZIP_1; Domain location=82-145; Score =35.4; E_value=2.1e-07; Accession=PF00170.11; Description=bZIP transcription factor
  Pfam annotation: Domain name=bZIP_2; Domain location=82-133; Score =21.3; E_value=0.0027; Accession=PF07716.5; Description=Basic region leucine zipper
  Pfam module annotation: Pfam domain module=bZIP_1::bZIP_2; Domain location=82-145::82-133
MYPAAEIASVRYLSPAGAASLRPHYRDDFLFLFQYSDLLAPAHPSLYQDVADHLVLGASFPAVGDNRSSSEESDGYLQRSLAEXERRKRRMVSNRESARRSRVRKQKQLSELWAQVVHLRGTNRQHLDQLNRVIRDCDRVLLENSRLRDERTRLQQQLEELPVETTETGGMSRPPDS

SEQ ID NO: 9390 - protein, 89 aa, Zea mays
  Coding DNA Sequence Number=SeqID_321
  Subcellular localization annotation: CTP_CleavageSite=25; ConfidenceScore=5.42e-01
ERLPPPLPHRMATTVTLLQGTVVVRTLAGWRRRRSCIVVGASPPTPLRNETLTSCSSFYKCPRPGAVETDATLDQGFPDYFGSPCLHIY

SEQ ID NO: 9391 - protein, 279 aa, Zea mays
  Coding DNA Sequence Number=SeqID_323
ISRCLRTRSLRAPLQQGDSLPRSSRSRIEMEAQPVGGVFLVGPTDATGKAPGSEPRTSLSILFLVLCISFGMLLHTEQLAAAAAKHLCPVVVVVFFVTVFFNLAIFSLSFLVARGRAAGAPRLLFRPTARAGAAPAVFSESKSPLTPFIGLCLAMGAALHAESLAAAAEYQIGPAVVVCVVLPAVVLFHLAVLSIHKTLASQRAEDEPKQLLRSRGLPLLPFVALALAISAADVATDIPQDASVWAVLALAISFNIAIGSLYCFIIGGPPLPTAATVEP

SEQ ID NO: 9392 - protein, 87 aa, Zea mays
  Coding DNA Sequence Number=SeqID_3130
MPSRMAVSYRDGQRLGDTTPEQEEDGPAEAGRWNLGGSVEQMHARGRGYCPKRSEHQRGRVEEPRTRGARVSSGATRRRDDDGITPR

SEQ ID NO: 9393 - protein, 140 aa, Zea mays
  Coding DNA Sequence Number=SeqID_3132
  Gene Ontology: Mol. function=protein binding
  Homolog annotation: Hit_ID=A4W5V7; Match level="QueryCoverage=97%, HitCoverage=10%, E-value=6e-56, Identity=72%"; Hit description =Putative uncharacterized protein precursor
  Subcellular localization annotation: CTP_CleavageSite=40; ConfidenceScore=5.09e-01
LNLVFNGMSSTLNGLIQTQQGNLNLGGNADWSQLDNWRARVTAQGSRIRVTVPPMVRMDVSPDLAFEATPAAFNLDGKVDIPWARITVQEVPESATGVSSDEVMLDENLKPIQPKTAAIPINSNLVIHVGHDVRLSAFGL

SEQ ID NO: 9394 - protein, 188 aa, Zea mays
  Coding DNA Sequence Number=SeqID_3133
  Gene Ontology: Mol. function=glucosamine-6-phosphate deaminase activity; Cellular component=cytoplasm; Biological process =carbohydrate metabolic process
  Homolog annotation: Hit_ID=A0TRC2; Match level="QueryCoverage=100%, HitCoverage=53%, E-value=7e-97, Identity=97%"; Hit description =Glutamine--fructose-6-phosphate transaminase
  Subcellular localization annotation: CTP_CleavageSite=28; ConfidenceScore=5.13e-01
QQAPLKVQDQLALAFSQSGKSPDLVNTMAALREAGARTVAAVNVLPSPLADACEHQLPLLAGPELSVAATKSYIAMLSLSAQIVAYWQRDAALVTALRGLPDVLAQAGRLDWSPAVDALANIERMIVIGRGLGLAIAQEAALKLKETSGIQAEAFSSAEVRHGPMELIDRDYPLLVFAPPGPEQAGLL

SEQ ID NO: 9395 - protein, 115 aa, Zea mays
  Coding DNA Sequence Number=SeqID_3134
  Gene Ontology: Mol. function=1-(5-phosphoribosyl)-5-[(5 -phosphoribosylamino)methylideneamino]imidazole-4-carboxamide isomerase activity; Cellular component=cytoplasm; Biological process= amino acid biosynthetic process
  Homolog annotation: Hit_ID=A3MPU5; Match level="QueryCoverage=100%, HitCoverage=45%, E-value=1e-57, Identity=98%"; Hit description=1-(5 -phosphoribosyl)-5-[(5- phosphoribosylamino)methylideneamino] imidazole-4-carboxamide isomerase
  Pfam annotation: Domain name=His_biosynth; Domain location=2-115; Score=45.4; E_value=6.6e-13; Accession=PF00977.11; Description =Histidine biosynthesis protein
MLLIPAIDLKDGQCVRLKQGDMDQATIFSEDPAAMARKWVDLGARRLHLVDLNGAFAGKPKNLEAIEAILDEVGDEIPVQLGGGIRSLETIEKYLDAGLSYVIIGTAAVKNPGFL

SEQ ID NO: 9396 - protein, 171 aa, Zea mays
  Coding DNA Sequence Number=SeqID_3135
  Gene Ontology: Mol. function=binding
  Homolog annotation: Hit_ID=A7MQ20; Match level="QueryCoverage=100%, HitCoverage=62%, E-value=3e-45, Identity=51%"; Hit description =Putative uncharacterized protein
  Pfam annotation: Domain name=ImpE; Domain location=1-171; Score= -44.7; E_value=2.5e-07; Accession=PF07024.3; Description=ImpE protein
PQLPGSAWAWCETLLAALTADIRGDFALGAEQRAAALAQAEANPGQLQQQEQTTDFAWLMDGDSRFGPVCEAIANGRYYWIPFAAIREMEFQAPASVTDLVWRHTRVQLVDGSEQICQIPVRYPLLPGADERYLRASVTEWQPLGHDDSQFTGHGQKLWLSDSGEYPLLTL

SEQ ID NO: 9397 - protein, 69 aa, Zea mays
  Coding DNA Sequence Number=SeqID_3136
KHCCSPHKSPWHTLSSLQLLMSEISHINSALLTVAHPEWRTAPAAALINYASLRDRTPDICALSLHSAL

SEQ ID NO: 9398 - protein, 198 aa, Zea mays
  misc_feature (67)..(67): Xaa can be any naturally occurring amino acid
  misc_feature (75)..(75): Xaa can be any naturally occurring amino acid
  misc_feature (130)..(130): Xaa can be any naturally occurring amino acid
  misc_feature (151)..(151): Xaa can be any naturally occurring amino acid
  misc_feature (169)..(169): Xaa can be any naturally occurring amino acid
  Coding DNA Sequence Number=SeqID_3138
  Gene Ontology: Mol. function=nucleic acid binding; Biological process= regulation of transcription, DNA-dependent
  Homolog annotation: Hit_ID=A4W6G3; Match level="QueryCoverage=100%, HitCoverage=20%, E-value=9e-56, Identity=59%"; Hit description=SNF2 -related protein
QPCISDTESKLVLGTVVALDTRMVTLMFPAAGESRLYARNDSPVNRVVFNTGDAVTSHQGCQMQVDXSPQSKRLXTYIGRCLDTSESKVVLPEVMLSTVLVFSKQQDCMFAGKLDRMDRCAMRFRARKCXSAQYRFPITGLSCMRTSADSXTIMHVAHDVGRSHAPRVXLLTHQVGLGQSIEVGMIIQQHLLAERVQR

SEQ ID NO: 9399 - protein, 59 aa, Zea mays
  Coding DNA Sequence Number=SeqID_3139
  Subcellular localization annotation: CTP_CleavageSite=22; ConfidenceScore=5.37e-01
ASTSLRKPLILPSRMTWTREARAPSFSAGSPCTNRTSSNYDSIRVINTKRALALFVRIT

SEQ ID NO: 9400 - protein, 75 aa, Zea mays
  Coding DNA Sequence Number=SeqID_3141
  Gene Ontology: Mol. function=transferase activity, transferring nitrogenous groups; Cellular component=intracellular; Biological process=regulation of transcription, DNA-dependent
  Homolog annotation: Hit_ID=A6AZ65; Match level="QueryCoverage=97%, HitCoverage=15%, E-value=1e-22, Identity=65%"; Hit description =Aminotransferase, classes I and II superfamily
  Pfam annotation: Domain name=GntR; Domain location=3-66; Score=60.9; E_value=4.4e-15; Accession=PF00392.11; Description=Bacterial regulatory proteins, gntR fa
MAKYQQLVDQLRTQIEARIWPPGEKLPSLRQQAEQSGLSLMTVMHAYEVLESQGWIVSKPQSGYYVAPRAAESRP

SEQ ID NO: 9401 - protein, 193 aa, Zea mays
  Coding DNA Sequence Number=SeqID_3142
  Gene Ontology: Biological process=Mo-molybdopterin cofactor biosynthetic process
  Homolog annotation: Hit_ID=A4TNJ3; Match level="QueryCoverage=97%, HitCoverage=47%, E-value=5e-63, Identity=63%"; Hit description =Putative uncharacterized protein
ACLQLNRCWDFFTPGVPSEFKVMVEQQIIPRLKARFTLPEPPLCLRLTTFGRGESDIAAELEPLPLPEGVVMGYRSSMPIIEIKLTGPASQRVAMEQVWQQVKLLLAECTIFEGFEGLPAVLARELQDRGFRLALSEQYTAGLLHWQLAAAQVPLSAAELLPAREESLEAQVTRTRQLAAQQGTVLALSVGDL

SEQ ID NO: 9402 - protein, 186 aa, Zea mays
  Coding DNA Sequence Number=SeqID_3143
  Gene Ontology: Mol. function=endoribonuclease activity, producing 5' -phosphomonoesters; Cellular component=endoplasmic reticulum membrane; Biological process=protein amino acid phosphorylation
  Homolog annotation: Hit_ID=Q7XIT1; Match level="QueryCoverage=86%, HitCoverage=16%, E-value=1e-46, Identity=63%"; Hit description =OsIre1p
  Pfam annotation: Domain name=Pkinase; Domain location=30-186; Score= -106.8; E_value=0.033; Accession=PF00069.15; Description=Protein kinase domain
  Pfam annotation: Domain name=Pkinase_Tyr; Domain location=30-172; Score=-143.9; E_value=0.0013; Accession=PF07714.7; Description =Protein tyrosine kinase
  Pfam module annotation: Pfam domain module=Pkinase::Pkinase_Tyr; Domain location=30-186::30-172
LTTANNRSLPSPIPFLSEQSSAGRHIGKLYVSNKEIGRGSNGTVVFEGSYDGRQVAVKRLLRSHNDIAEKETQNLIISDHDPNIVRLYGCDYDSDFVYISLERCHCSLADLIQKHSYLSSGESVSNNEASFSIKSKISNVKGMDVELWTHDGLPSAQLLKLMRYMNDLICFLLLVVVVHRQLTVSH

SEQ ID NO: 9403 - protein, 203 aa, Zea mays
  Coding DNA Sequence Number=SeqID_3144
  Gene Ontology: Mol. function=two-component response regulator activity; Cellular component=intracellular; Biological process=two -component signal transduction system (phosphorelay)
  Homolog annotation: Hit_ID=A4JCR7; Match level="QueryCoverage=98%, HitCoverage=42%, E-value=8e-87, Identity=84%"; Hit description=Two component, sigma54 specific, transcriptional regulator, Fis family
  Pfam annotation: Domain name=HTH_8; Domain location=162-202; Score =38.5; E_value=2.4e-08; Accession=PF02954.9; Description=Bacterial regulatory protein, Fis family
  Pfam annotation: Domain name=Sigma54_activat; Domain location=1-119; Score=-44.4; E_value=1.5e-12; Accession=PF00158.16; Description =Sigma-54 interaction domain
  Pfam module annotation: Pfam domain module=HTH_8::Sigma54_activat; Domain location=162-202::1-119
MQEALLHALDSQNFMRIGGTSSIASDFRLIAATRRPAREAVANGTLREDLWLRLDAASITMPPLRERDGDALAIADALIDELNREARATGRSTTDKRAAPGFVRECLSYEWPGNVRELQERVRFAYDASGDFIETLRAGEASFAAGAALNGSSVQIKVGTPLSDVEDLLIRATLDAVGGTRHRAATLLGISPKTLYNKLQVDS

SEQ ID NO: 9404 - protein, 119 aa, Zea mays
  Coding DNA Sequence Number=SeqID_3145
  Gene Ontology: Mol. function=copper ion binding; Cellular component=1- 2nm peptidoglycan-based cell wall; Biological process=cellular copper ion homeostasis
  Homolog annotation: Hit_ID=Q47455; Match level="QueryCoverage=95%, HitCoverage=36%, E-value=1e-11, Identity=35%"; Hit description =Copper resistance protein D
  Pfam annotation: Domain name=CopD; Domain location=1-115; Score= -122.5; E_value=0.083; Accession=PF05425.3; Description=Copper resistance protein D
QLSGALTGFARAGTVIVISIVITAVVNFVLITEKPLSTLPGSVYGLLLVIKTALFFLMLLLAAANRFRLAPKLENALLQGHYKAGIALMRKSIITEFTVAVLILAIVAWLGTLSPGTGM

SEQ ID NO: 9405 - protein, 150 aa, Zea mays
  misc_feature (112)..(112): Xaa can be any naturally occurring amino acid
  Coding DNA Sequence Number=SeqID_3146
  Gene Ontology: Mol. function=tetraacyldisaccharide 4'-kinase activity; Biological process=lipid A biosynthetic process
  Homolog annotation: Hit_ID=Q6D438; Match level="QueryCoverage=100%, HitCoverage=44%, E-value=6e-50, Identity=65%"; Hit description =Tetraacyldisaccharide 4'-kinase
  Pfam annotation: Domain name=LpxK; Domain location=11-150; Score= -51.2; E_value=3.6e-08; Accession=PF02606.5; Description =Tetraacyldisaccharide-1-P 4'-kinase
MIERIWSGRSPLWLLLWPLSLLYGAITWLIRLSYQRGWRTRWRAPCPVIVVGNLTAGGNGKTPLVIWLVQALQQQGLRPGVVSRGYAGKAERYPLLVNQDSATEQAGDEPVXLIAQRTQVPVAVAPQRRQAIEALLAAHPLDVIVTDDGL

SEQ ID NO: 9406 - protein, 115 aa, Zea mays
  Coding DNA Sequence Number=SeqID_3147
  Gene Ontology: Mol. function=transcription factor activity; Cellular component=intracellular; Biological process=regulation of transcription, DNA-dependent
  Homolog annotation: Hit_ID=A8G7T1; Match level="QueryCoverage=94%, HitCoverage=31%, E-value=2e-43, Identity=82%"; Hit description =Transcriptional regulator, LacI family
  Pfam annotation: Domain name=LacI; Domain location=8-33; Score=27.0; E_value=7e-05; Accession=PF00356.11; Description=Bacterial regulatory proteins, lacI family
MKTRPPRATISDVARTAKTGKTSVSRYLNGEVHLLSPDLKARIEQAIADLNYRPSQMARGLKRGRTRLIGLIIADITNPYSVDVLSGIEAACRARGFTLLMCNTNNEMDLEQPYL

SEQ ID NO: 9407 - protein, 150 aa, Zea mays
  Coding DNA Sequence Number=SeqID_3148
PSVSPEADGSYIISRRLRYGRRGLGRARLNTRWPLAQAFVHRVPAQPPITRRPLACRRRSRAAADRRPRLRRRRPPTPLAPPPTADPAPRPSAARACAAAAVRRPRRARAPHAPTPPLPTPPRPSRPPPRLADAAASPVPSPDAAATSKI

SEQ ID NO: 9408 - protein, 127 aa, Zea mays
  Coding DNA Sequence Number=SeqID_3150
AARSSPPGWPHHAAISNRILALQAVAIATHRVQDEVHRRVPDGVPGRGRRQPATIEGVAPAAALPTKDDVCHILCSVGTEVEWDRLDLLFELLEGKDIAELIATGQGAARLRAVWSRCCRGRRCCRC

SEQ ID NO: 9409 - protein, 139 aa, Zea mays
  misc_feature (26)..(26): Xaa can be any naturally occurring amino acid
  Coding DNA Sequence Number=SeqID_3151
  Gene Ontology: Mol. function=iron-sulfur cluster binding; Biological process=electron transport
  Homolog annotation: Hit_ID=A8GDT7; Match level="QueryCoverage=100%, HitCoverage=13%, E-value=3e-44, Identity=61%"; Hit description=FAD linked oxidase domain protein
QLYHTRYLRPVSDHLVASVKKVYAPXKMVKAPRVFNFFLKQPWMRDLSQRHIGMVDLPLLSSPSLKQQLSGHPAMRVTLEQLQAMDAAQREQHVLVVQDPFTRYYEAQLVTDFIRLIEKLGYRPVQLPFSPNGKAQHVK

SEQ ID NO: 9410 - protein, 159 aa, Zea mays
  misc_feature (41)..(41): Xaa can be any naturally occurring amino acid
  Coding DNA Sequence Number=SeqID_3152
  Gene Ontology: Mol. function=protein serine/threonine kinase activity; Cellular component=cytoplasm; Biological process=protein amino acid phosphorylation
  Homolog annotation: Hit_ID=A3BF95; Match level="QueryCoverage=100%, HitCoverage=28%, E-value=2e-70, Identity=84%"; Hit description =Putative uncharacterized protein
  Pfam annotation: Domain name=Pkinase; Domain location=2-160; Score= -32.9; E_value=1.2e-06; Accession=PF00069.15; Description=Protein kinase domain
  Pfam annotation: Domain name=Pkinase_Tyr; Domain location=6-160; Score=-142.7; E_value=0.0011; Accession=PF07714.7; Description =Protein tyrosine kinase
  Pfam module annotation: Pfam domain module=Pkinase::Pkinase_Tyr; Domain location=2-160::6-160
AAVDTRTGERVAIKKINDVVEHVSDATRILGEIQLLQVVRXHPTLLEIKTMMFLHFRRECQNFIVVLELMEFDLHQVIKAKDDLTPEHHQFFLYQLLRALKYIHAANVFHRDLKPKNILANSDCKLKICDFGLARASFNDAPSAIFWTDYVATRWYRAP

SEQ ID NO: 9411 - protein, 76 aa, Zea mays
  Coding DNA Sequence Number=SeqID_3153
  Gene Ontology: Cellular component=cell outer membrane; Biological process=amino acid transport
  Homolog annotation: Hit_ID=A6TAH5; Match level="QueryCoverage=100%, HitCoverage=28%, E-value=2e-25, Identity=73%"; Hit description =Putative outer membrane lipoprotein
ACDNLTGNKIKVAINTGPDEALWQTVKQVAHDKYQLHVDVVAFNDYVQPNKALFNKDVDANAFQSLPYLEMQSKER

SEQ ID NO: 9412 - protein, 183 aa, Zea mays
  misc_feature (24)..(24): Xaa can be any naturally occurring amino acid
  misc_feature (101)..(101): Xaa can be any naturally occurring amino acid
  misc_feature (119)..(119): Xaa can be any naturally occurring amino acid
  misc_feature (157)..(157): Xaa can be any naturally occurring amino acid
  Coding DNA Sequence Number=SeqID_3154
  Gene Ontology: Mol. function=ion channel activity; Cellular component= integral to membrane; Biological process=ion transport
  Homolog annotation: Hit_ID=Q6K6P3; Match level="QueryCoverage=93%, HitCoverage=24%, E-value=2e-72, Identity=78%"; Hit description =Putative cyclic nucleotide-gated calmodulin-binding ion channel
MQFVIWIVIPRLNESPTRKRKSRXILRFSIIFQYLPRLFQIFPLSTRIVMAMGVMTETAWAGAAYNLILYMLASHVLGALWYLLSVERQEACWREACLLEXPQTMFFDCKALSSNRTIXYEMSNITNLCTPSNEFYPFGIYEEAEQAKLTSSSFTSXRKYFYCFWWGLKSLRCAVCCMQELAS

SEQ ID NO: 9413 - protein, 145 aa, Zea mays
  Coding DNA Sequence Number=SeqID_3155
  Subcellular localization annotation: CTP_CleavageSite=23; ConfidenceScore=5.62e-01
MATASPPGKGEITSLRLGCRRVTCFSKTAWRSPSLTTRQLPPTFRPSSTPLSGLRVPASASNSSHLLGGSNSCGSPTTQTGSGCGRSAPSVLGGCPSPWSARRRPLTDSSALPSGWPWWPLLTSLRSSGPTPLSKAASRRELQLC

SEQ ID NO: 9414 - protein, 132 aa, Zea mays
  Coding DNA Sequence Number=SeqID_3156
RTAARAGRVAVTGEVCVPPCRAVPLRCAEPELDVTGRYAILVPSRAGAARGSVSAGVSHAVRGGRGREWCVPPRLRSFPTFRGDPTWVRQHAENARKLRLIRRERGLGPNAARKEDSRPWHQPGAPPSQAGL

SEQ ID NO: 9415 - protein, 98 aa, Zea mays
  Coding DNA Sequence Number=SeqID_3158
  Gene Ontology: Mol. function=RNA methyltransferase activity; Cellular component=intracellular; Biological process=RNA processing
  Homolog annotation: Hit_ID=A7MIJ9; Match level="QueryCoverage=100%, HitCoverage=42%, E-value=1e-35, Identity=76%"; Hit description =Putative uncharacterized protein
  Pfam annotation: Domain name=SpoU_methylase; Domain location=2-94; Score=-15.9; E_value=4.5e-05; Accession=PF00588.9; Description=SpoU rRNA Methylase family
MHFPLILVSPARPENIGAAARAMKTMGFSELRIVASDAWQDPAARRVAHGAGEILDHVKTYDTLSAALADVDFSVATTARSRAKFRYYATPAQVETIL

SEQ ID NO: 9416 - protein, 93 aa, Zea mays
  misc_feature (42)..(42): Xaa can be any naturally occurring amino acid
  Coding DNA Sequence Number=SeqID_3159
  Gene Ontology: Mol. function=RNA binding
  Homolog annotation: Hit_ID=A7PCZ6; Match level="QueryCoverage=100%, HitCoverage=38%, E-value=4e-33, Identity=77%"; Hit description =Chromosome chr17 scaffold_12, whole genome shotgun sequence
TGKAAEFGQLKDGYMFDTSTGMSRMLLSTPTCPVLEALGKKXLSFEIAVGINGRVWVNAPAASTVILVSNAIMRSESLSGIKQRAMVENLLER

SEQ ID NO: 9417 - protein, 85 aa, Zea mays
  Coding DNA Sequence Number=SeqID_3160
  Subcellular localization annotation: CTP_CleavageSite=76; ConfidenceScore=5.89e-01
MNLQKWKHLRQQQSRVHSVRFGSFRRKSSAVTRRVRAWNKRKTPACTPFQLIRRSRRAERSLLRTARSRRPPTKASAAAVAPTTR

SEQ ID NO: 9418 - protein, 125 aa, Zea mays
  Coding DNA Sequence Number=SeqID_3162
IPLDQTDKQSPPSGSTHGHTTDQTFIHYDQVAPVPNESTEPRSKPEPATIETAHKTTTTTRKPNEGQAPKRPTTKCKPPAKSPDTRSHTVRNGHPEGTRNGASGQHTDPDNHPQTAVRRQRETEA

SEQ ID NO: 9419 - protein, 112 aa, Zea mays
  Coding DNA Sequence Number=SeqID_3164
  Subcellular localization annotation: CTP_CleavageSite=32; ConfidenceScore=5.20e-01
GLLLWPLLDCCFTVTADGRLGSGGSACGRRVRGSGFNRFRRTTEQEQVKFGRSAWFWAGGSWPRGPVPWAFKLVLGAGRADKRWAGSVGRCCSRLPGVPVGPWPGALAAGFP

SEQ ID NO: 9420 - protein, 182 aa, Zea mays
  misc_feature (33)..(33): Xaa can be any naturally occurring amino acid
  Coding DNA Sequence Number=SeqID_3166
  Gene Ontology: Mol. function=protein binding; Cellular component =integral to membrane; Biological process=protein amino acid phosphorylation
  Homolog annotation: Hit_ID=A3AY17; Match level="QueryCoverage=92%, HitCoverage=18%, E-value=2e-42, Identity=53%"; Hit description =Putative uncharacterized protein
  Pfam annotation: Domain name=LRR_1; Domain location=107-129; Score =16.1; E_value=0.13; Accession=PF00560.23; Description=Leucine Rich Repeat
  Pfam annotation: Domain name=LRR_1; Domain location=131-152; Score =5.4; E_value=31; Accession=PF00560.23; Description=Leucine Rich Repeat
  Pfam annotation: Domain name=LRR_1; Domain location=59-81; Score=0.6; E_value=2.3e+02; Accession=PF00560.23; Description=Leucine Rich Repeat
  Pfam annotation: Domain name=LRR_1; Domain location=83-105; Score =15.3; E_value=0.24; Accession=PF00560.23; Description=Leucine Rich Repeat
  Pfam module annotation: Pfam domain module=LRR_1::LRR_1::LRR_1::LRR _1; Domain location=107-129::131-152::59-81::83-105
QGSLPPCIGDISFGRAPYDAQALFSVYDDVELXQYSIVQSFTFSTKGSVRVYSSGFLDLMFGIDLSANMLSGEIPFQMGNLSSVKSLSLSNNFFTGQIPATFAGMRAIESLDLSHNGLSGQIPCELTKLWSLEVFSVAYNNLSGCMPWSGQFSTFSTDSYVGNVNLHSTCVSDSSPIKEEAA

SEQ ID NO: 9421 - protein, 76 aa, Zea mays
  Coding DNA Sequence Number=SeqID_3167
  Gene Ontology: Mol. function=transcription factor activity; Cellular component=intracellular; Biological process=regulation of transcription, DNA-dependent
  Homolog annotation: Hit_ID=UPI00005F8B80; Match level="QueryCoverage =96%, HitCoverage=21%, E-value=2e-24, Identity=75%"; Hit description =COG1609: Transcriptional regulators
  Pfam annotation: Domain name=LacI; Domain location=4-29; Score=22.0; E_value=0.0022; Accession=PF00356.11; Description=Bacterial regulatory proteins, lacI family
  Subcellular localization annotation: CTP_CleavageSite=31; ConfidenceScore=5.01e-01
TGNVTRSDVAKAAGTSVAVVSYVINNGPRPVAEATGQRVLAAIQQTGYWPNSVAKALAFGSSQTFGLVVPDIGKPF

SEQ ID NO: 9422 - protein, 86 aa, Zea mays
  Coding DNA Sequence Number=SeqID_3168
IVEKVTQRPVESLVCLDTKAILCHCSPRRARAWTGKHNDPMTRHCASATAAAIHTNLQSNGGLLSTFEAMQDMARDGQIVFVCISQ

SEQ ID NO: 9423 - protein, 67 aa, Zea mays
  misc_feature (41)..(41): Xaa can be any naturally occurring amino acid
  Coding DNA Sequence Number=SeqID_3170
  Gene Ontology: Mol. function=iron ion transmembrane transporter activity; Cellular component=integral to membrane; Biological process=iron ion transport
  Homolog annotation: Hit_ID=A2YE27; Match level="QueryCoverage=98%, HitCoverage=13%, E-value=3e-13, Identity=56%"; Hit description =Putative uncharacterized protein
ALAVLLLLMCNFGTLMTGTLDWKGIPSYANNMMRCLSTIVXSAATLVYPLVHSRVITLHTVLWSIWM

SEQ ID NO: 9424 - protein, 89 aa, Zea mays
  Coding DNA Sequence Number=SeqID_3171
  Gene Ontology: Mol. function=phosphotransferase activity, alcohol group as acceptor; Cellular component=chromosome; Biological process= response to DNA damage stimulus
  Homolog annotation: Hit_ID=Q9M3G7; Match level="QueryCoverage=94%, HitCoverage=2%, E-value=1e-25, Identity=59%"; Hit description =Serine/threonine-protein kinase ATM
RLFPKHSKEDYKRTVQKALLNVVPFTPSAGVVEWVNGTVPLGDYLIGSTRSGGAHGRYGIGDWTYLQCREYLMSEKDKRRAFLKICRHA

SEQ ID NO: 9425 - protein, 159 aa, Zea mays
  Coding DNA Sequence Number=SeqID_3172
  Subcellular localization annotation: CTP_CleavageSite=54; ConfidenceScore=5.30e-01
HSSGPGHALLHRAGGSLSSVVLTFWNSYLAGPTDSPSPPLTMWRLARHQTWHPRRSNAQGPPTRASSFLPHLLLPPSPRPRHTKAVTPSDSHKKHDAMQEHIPHPREAQGPTVAQPALAVVTPGHDALAPVAQLLSSSGDDESSDDEGELELEVDFEFP

SEQ ID NO: 9426 - protein, 67 aa, Zea mays
  Coding DNA Sequence Number=SeqID_3174
  Gene Ontology: Mol. function=DNA binding
  Homolog annotation: Hit_ID=Q45GC6; Match level="QueryCoverage=98%, HitCoverage=42%, E-value=3e-22, Identity=83%"; Hit description =Sulfiredoxin-like protein
CAAEPSVTTDSGKKGPERMGIPLDQIRRALMRTRANDPVKVQELMDSIRVIGLQVPIDVLEVDGVYY

SEQ ID NO: 9427 - protein, 245 aa, Zea mays
  Coding DNA Sequence Number=SeqID_3175
  Gene Ontology: Mol. function=transporter activity; Cellular component= integral to membrane; Biological process=transport
  Homolog annotation: Hit_ID=A8GBQ7; Match level="QueryCoverage=94%, HitCoverage=47%, E-value=3e-83, Identity=68%"; Hit description=Major facilitator superfamily MFS_1
  Pfam annotation: Domain name=DUF554; Domain location=80-242; Score= -142.2; E_value=0.066; Accession=PF04474.3; Description=Protein of unknown function (DUF554)
  Subcellular localization annotation: CTP_CleavageSite=25; ConfidenceScore=5.06e-01
MSDLTSSAHVALAGNTPQGETQWIRSAADVTRLVNNSNASRSNARIVIAIALGGVFLDAYDLGALAFGIKDVTREFNLTPAGTGMVASAITFGAIVGALIGGYLTDKIGRYRVFMADMFFFVVAALACAFAPNEYVLAAARFVMGLGVGIDLPVAMAFLAEFSRLRGQGNKAASVAMWCPTWYAAISISYLLVLLLYAVLPESHTDWLWRLILGFGAVPALLIIAIRSRYMSESPIWAANQGNLQ

SEQ ID NO: 9428 - protein, 228 aa, Zea mays
  misc_feature (26)..(26): Xaa can be any naturally occurring amino acid
  misc_feature (63)..(63): Xaa can be any naturally occurring amino acid
  misc_feature (136)..(136): Xaa can be any naturally occurring amino acid
  misc_feature (180)..(180): Xaa can be any naturally occurring amino acid
  Coding DNA Sequence Number=SeqID_3176
  Gene Ontology: Mol. function=RNA-directed DNA polymerase activity; Cellular component=intracellular; Biological process=RNA-dependent DNA replication
  Homolog annotation: Hit_ID=Q8SA85; Match level="QueryCoverage=97%, HitCoverage=17%, E-value=1e-53, Identity=50%"; Hit description=Prpol
SQMGRNIFTYVDKVVIASKNKEDHLXDLAENANMHEARLRLNPEKCIFGVQQGKILGYLVAHXGIEANPTKIQAIMDMAPPQSTRYVQRLTRRLAALNRFISRSAEWSLPFLKMLRGAKDFAWGPEQATTFESLKXVLAELATLTIPNPALPLLLYVVASPSVVSAALVQEGCKNGRPQXCPIYFISEVLTSSKCNMTGLEKIAYGVVMASHKLRHYFEAPKIRITTV

SEQ ID NO: 9429 - protein, 192 aa, Zea mays
  Coding DNA Sequence Number=SeqID_3177
  Gene Ontology: Mol. function=protein serine/threonine kinase activity; Biological process=protein amino acid phosphorylation
  Homolog annotation: Hit_ID=Q2L3C7; Match level="QueryCoverage=32%, HitCoverage=5%, E-value=4e-22, Identity=77%"; Hit description =Clavata-like kinase
  Pfam annotation: Domain name=LRRNT_2; Domain location=137-177; Score =53.2; E_value=8.8e-13; Accession=PF08263.3; Description=Leucine rich repeat N-terminal domain
AAAHGHTQHYDNQSKICPFVSIFLEGTNCWRLLGAHLDPDLLSLPCINNSWGLPLYNSTFPTLREAPPQYLTKPAIHRIAAPSPLLTTSRHPPASASPPRRALPMLPRSRDAAPRLAFLEPLACALLLLLVSPCHCVNEQGQALLRWKDSLRPASGALASWRSADANPCWWTGVSCNARGDVVGLSITSVDL

SEQ ID NO: 9430 - protein, 154 aa, Zea mays
  Coding DNA Sequence Number=SeqID_3178
  Gene Ontology: Mol. function=transporter activity; Cellular component= integral to membrane; Biological process=transport
  Homolog annotation: Hit_ID=Q6D0B5; Match level="QueryCoverage=100%, HitCoverage=34%, E-value=9e-44, Identity=57%"; Hit description =Putative transport protein
QGAAIGGEVPGAWVFVAEHVPEKRIGFACGTLTAGLTAGILLGSLVATVLNTSLSPAAIRDHGWRIPFFLGGLFGLLAMYLRRWLHETPVFRQMQQRKALAEKLPLQTILASHKRGIAVSMLLTWLLSACIVVVILMAPTLMQKQHGVPAALSL

SEQ ID NO: 9431 - protein, 91 aa, Zea mays
  Coding DNA Sequence Number=SeqID_3179
  Gene Ontology: Mol. function=DNA topoisomerase (ATP-hydrolyzing) activity; Cellular component=chromosome; Biological process=DNA unwinding during replication
  Homolog annotation: Hit_ID=A7NZW3; Match level="QueryCoverage=96%, HitCoverage=13%, E-value=2e-26, Identity=68%"; Hit description =Chromosome chr6 scaffold_3, whole genome shotgun sequence
MPAESPAEFFAENKNIAGFDNPGKSLYTTLRELVENALDSAESISELPEIEITIEEITKTKFNTMIGLVDRQRVDEALYDDFESEKAREVR

SEQ ID NO: 9432 - protein, 194 aa, Zea mays
  Coding DNA Sequence Number=SeqID_3180
MAGDEAVWEEAGRRPIRELGRGKRRRVRRSFATGSQLGRAAMETRGLGEREARVGEPLGWTQGGRGKQAASRHLGARRGGRWSRESAPPEEARRAGSEEEDELKRWEISWAAGKIHGRRAAAGFVSRMAERMRTRETAAATAEQRKLRLGGARHGRAGAGDAQGAVSRDVGQRRWARKISNSFRPDKEKGQRWG

SEQ ID NO: 9433 - protein, 176 aa, Zea mays
  Coding DNA Sequence Number=SeqID_3182
  Gene Ontology: Mol. function=3-hydroxyacyl-CoA dehydrogenase activity; Cellular component=fatty acid beta-oxidation multienzyme complex; Biological process=fatty acid metabolic process
  Homolog annotation: Hit_ID=A8GH86; Match level="QueryCoverage=100%, HitCoverage=24%, E-value=2e-73, Identity=77%"; Hit description=Fatty acid oxidation complex, alpha subunit FadJ
  Pfam annotation: Domain name=3HCDH_N; Domain location=3-133; Score =167.9; E_value=2.7e-47; Accession=PF02737.8; Description=3 -hydroxyacyl-CoA dehydrogenase, NAD binding domain
KKVKRRQLKPAERQQQMARISGGTDYQGFRQRDLVIEAVFEDLALKQQMVAEMEEHCQPHTIFASNTSSLPIAQIAAGAQRPENVIGLHFFSPVDKMPLVEVIPHSGTSAQTLATTVDLARRQGKTAVVVADRPGFYVNRILAPYINEAMRCLLEGEPIEHIDSALVKFGFPVGPL

SEQ ID NO: 9434 - protein, 110 aa, Zea mays
  Coding DNA Sequence Number=SeqID_3183
  Gene Ontology: Mol. function=cation transmembrane transporter activity; Cellular component=integral to membrane; Biological process=potassium ion transport
  Homolog annotation: Hit_ID=Q83S20; Match level="QueryCoverage=100%, HitCoverage=19%, E-value=4e-34, Identity=70%"; Hit description =Putative transport protein ybjL
  Pfam annotation: Domain name=Asp-Al_Ex; Domain location=16-110; Score= 12.4; E_value=1.5e-06; Accession=PF06826.3; Description=Predicted Permease Membrane Region
VNINVAELLSGNDVLLLFVVLALGLCLGKLRLGSVQLGNSIGVLVVSLILGQQHFAINTDALSLGFMLFIFCVGVEAGPNFFSIFFRDGKNYFFLAIVMVVSALLIALTL

SEQ ID NO: 9435 - protein, 95 aa, Zea mays
  misc_feature (67)..(67): Xaa can be any naturally occurring amino acid
  Coding DNA Sequence Number=SeqID_3184
  Gene Ontology: Mol. function=aminoacyl-tRNA ligase activity; Cellular component=cytoplasm; Biological process=tRNA aminoacylation for protein translation
  Homolog annotation: Hit_ID=Q8ZCC0; Match level="QueryCoverage=94%, HitCoverage=19%, E-value=1e-21, Identity=57%"; Hit description =Cysteinyl-tRNA synthetase
  Pfam annotation: Domain name=DALR_2; Domain location=51-94; Score =3.7; E_value=0.0078; Accession=PF09190.1; Description=DALR domain
CIPPSGHNRSQVNYGEHNLYHARTALERLYAGLRHTKASATPAGGEAYEARYRTGMDEDFNTAEANXVWLDMAHEVKRVNGEHKSVVDALAAKLH

SEQ ID NO: 9436 - protein, 171 aa, Zea mays
  Coding DNA Sequence Number=SeqID_3185
  Gene Ontology: Mol. function=endoribonuclease activity, producing 5' -phosphomonoesters; Cellular component=nucleus; Biological process =removal of tRNA 3'-trailer sequence
  Homolog annotation: Hit_ID=A8A2D6; Match level="QueryCoverage=97%, HitCoverage=55%, E-value=5e-61, Identity=65%"; Hit description =Ribonuclease Z
  Pfam annotation: Domain name=Lactamase_B; Domain location=6-134; Score=29.0; E_value=1.7e-05; Accession=PF00753.17; Description =Metallo-beta-lactamase superfamily
ACLQRNVTAIALTLSKRGETWLFDCGEATQHQFMRSALKPGKLEKIFITHLHGDHIFGLPGLLTSRSMAGLTEPMTLYGPKGLRQFVDTALSLSGSYTGYPLEIVEIEAGPVLDNGEFRVTAYALNHVVECYGYRIEQHDKPGFLDAPRLKAEGVPRGPWYQDLKQGKRIT

SEQ ID NO: 9437 - protein, 127 aa, Zea mays
  Coding DNA Sequence Number=SeqID_3186
  Homolog annotation: Hit_ID=Q7D2Z4; Match level="QueryCoverage=91%, HitCoverage=32%, E-value=5e-18, Identity=45%"; Hit description =Chloromuconate cycloisomerase
  Pfam annotation: Domain name=MR_MLE; Domain location=60-125; Score =16.8; E_value=0.00056; Accession=PF01188.11; Description=Mandelate racemase  muconate lactonizing enzyme, C-terminal domain
MLERVHADGAGLLAPARMLFDMALHDLLAQQAGVSLAHWLGAAAASPGYPTNQTLFWGSEAQMLTQAEQYVARGFTQLKLRTGVADVATDLARLRALRARFSEAITLAIDVNGQWSLAQAHAAFPAL

SEQ ID NO: 9438 - protein, 105 aa, Zea mays
  Coding DNA Sequence Number=SeqID_3187
  Gene Ontology: Mol. function=protein kinase activity; Cellular component=membrane; Biological process=protein amino acid phosphorylation
  Homolog annotation: Hit_ID=A1FM79; Match level="QueryCoverage=62%, HitCoverage=13%, E-value=2e-26, Identity=89%"; Hit description =Putative uncharacterized protein
LKPLLRRAPVWSERDVRTLLASYLAQPADGTLVDTWLQRPALPLSITLADAAGTADLQLLSLLRVLPGQRYVGAGVWRGTPVLAKLLVGGNAARHFQRELQGVKL

SEQ ID NO: 9439 - protein, 140 aa, Zea mays
  Coding DNA Sequence Number=SeqID_3188
  Gene Ontology: Mol. function=ATPase activity, coupled to transmembrane movement of substances; Cellular component=integral to membrane; Biological process=proteolysis
  Homolog annotation: Hit_ID=A4WDK5; Match level="QueryCoverage=99%, HitCoverage=19%, E-value=1e-46, Identity=66%"; Hit description=ABC transporter related
MRKVMHALISWGVTIQGLVYASVIVVGAPMVINGDITTGAIVAASLLSSRMIAPMATLCGVLARWQQVKAAKSSLDALMNLPVENSKDETRIHCPVLFGHYQFTDAMFRYYSDSLTVALRIKTLTIKPGERIAVLGRNGS

SEQ ID NO: 9440 - protein, 76 aa, Zea mays
  misc_feature (39)..(39): Xaa can be any naturally occurring amino acid
  misc_feature (62)..(62): Xaa can be any naturally occurring amino acid
  Coding DNA Sequence Number=SeqID_3189
  Gene Ontology: Mol. function=nucleoside-triphosphatase activity; Cellular component=chloroplast; Biological process=chlorophyll biosynthetic process
  Homolog annotation: Hit_ID=Q4FE78; Match level="QueryCoverage=100%, HitCoverage=18%, E-value=6e-19, Identity=67%"; Hit description =Magnesium chelatase subunit I precursor
KISKVCSELNADVLRGHIVHSRSPQALTALEYRNSVTVXGMATVIPNYERHRFRKDPLESIXWGFLVIDNLYSVFS

SEQ ID NO: 9441 - protein, 134 aa, Zea mays
  Coding DNA Sequence Number=SeqID_3190
  Gene Ontology: Mol. function=ATP-dependent helicase activity; Cellular component=nucleus; Biological process=protein modification process
  Homolog annotation: Hit_ID=Q69J41; Match level="QueryCoverage=97%, HitCoverage=23%, E-value=5e-49, Identity=75%"; Hit description=ATP -dependent RNA helicase-like protein
EKHNISKKSGVAKSAAMLCHDMQPLKPAEMVEHLKQGLGKEGQIVHIQEISSREASFTELPCNLSEAMREALKSIGISRLYSHQSQAITSSISGRHIVVATSTSSGKSLCYNIPVLECLSQDLMACALYIFPMK

SEQ ID NO: 9442 - protein, 93 aa, Zea mays
  misc_feature (54)..(54): Xaa can be any naturally occurring amino acid
  misc_feature (80)..(80): Xaa can be any naturally occurring amino acid
  Coding DNA Sequence Number=SeqID_3191
  Homolog annotation: Hit_ID=A2X9E4; Match level="QueryCoverage=55%, HitCoverage=29%, E-value=6e-08, Identity=57%"; Hit description =Putative uncharacterized protein
  Subcellular localization annotation: CTP_CleavageSite=63; ConfidenceScore=5.85e-01
HNAGDAHPAPQPQSQYRPAPPVSRRTPRTVHAAQQFIRSTNRLRPRLVRVAVSXIPLATRRTRQQSVTATEPAIPSNFLXPISLEMIKDPVTA

SEQ ID NO: 9443 - protein, 118 aa, Zea mays
  Coding DNA Sequence Number=SeqID_3192
  Gene Ontology: Mol. function=protein transporter activity; Cellular component=membrane; Biological process=protein secretion
  Homolog annotation: Hit_ID=A8GCX6; Match level="QueryCoverage=98%, HitCoverage=29%, E-value=1e-29, Identity=59%"; Hit description =Efflux transporter, RND family, MFP subunit precursor
  Pfam annotation: Domain name=Biotin_lipoyl; Domain location=31-88; Score=-12.0; E_value=0.064; Accession=PF00364.12; Description=Biotin- requiring enzyme
MTKKWLFAALTALVMILVLWAYSASRSKPNPLMTAAVRQGDIENVIAATGKMDAIERVNVGAQVSGQVKKLYIKAGDNVRKGQLIAEIDDQPQRSDLRNAQAALSVAQADLQTRQATL

SEQ ID NO: 9444 - protein, 123 aa, Zea mays
  Coding DNA Sequence Number=SeqID_3193
  Homolog annotation: Hit_ID=Q5N810; Match level="QueryCoverage=79%, HitCoverage=79%, E-value=3e-41, Identity=78%"; Hit description =Putative uncharacterized protein P0004D12.8
MANGCPTSTTSSLPLFFLLSCLLIGHALCSQAHNGRTSGADYVVQFPHQELPAKHIVLPEAVKGLNKGILPKYARRMLIGSIAPICTYNECRGCRFKCTAEQVPVDANDPMNSAYHYKCVCHR

SEQ ID NO: 9445 - protein, 144 aa, Zea mays
  misc_feature (12)..(12): Xaa can be any naturally occurring amino acid
  Coding DNA Sequence Number=SeqID_3194
  Gene Ontology: Mol. function=endonuclease activity
  Homolog annotation: Hit_ID=Q73UZ5; Match level="QueryCoverage=94%, HitCoverage=24%, E-value=1e-24, Identity=47%"; Hit description =Putative uncharacterized protein
  Pfam annotation: Domain name=HNH; Domain location=38-85; Score=17.7; E_value=0.045; Accession=PF01844.13; Description=HNH endonuclease
MYLAVFDDHTGXPLYFGRAKRLASESQRFVTFAEYGGCSKPGCPRPFSHTEAHHAEQDWADGGMTDITDLAPACGPHNRAVHDGPGGWRTEKILDGPDRGKYGWVANGTTDPPRTNHLHRPDRILDDTGPPDPEWSDIEHSLEL

SEQ ID NO: 9446 - protein, 125 aa, Zea mays
  Coding DNA Sequence Number=SeqID_3195
FIGSSATLYLEQVSHQSKAEINNRGNLPQEDDRRIVRLRIRRRQDLHQSLQHHPLAQTRPADRLRTDSVRLPHRQPLHCLLCAERWVSREGRRAEGFGRQQLPGVAASLGSTAFWVGIRRRGLVF

SEQ ID NO: 9447 - protein, 170 aa, Zea mays
  Coding DNA Sequence Number=SeqID_3197
  Gene Ontology: Mol. function=transcription factor activity; Cellular component=intracellular; Biological process=regulation of transcription, DNA-dependent
  Homolog annotation: Hit_ID=Q5NRH6; Match level="QueryCoverage=75%, HitCoverage=75%, E-value=3e-40, Identity=64%"; Hit description=MarR family transcriptional regulator
  Pfam annotation: Domain name=MarR; Domain location=92-164; Score =62.7; E_value=1.2e-15; Accession=PF01047.13; Description=MarR family
  Subcellular localization annotation: CTP_CleavageSite=51; ConfidenceScore=5.08e-01
MAAITGRKFSATTKTSKANKPIADKRVRTKRHIARRELMRINMTDHVDFVVAQWASAMPELDASSMAIFGRMLRLMKHLAKKRAEALAPFGFRDGEFDVLATLRRAGAPYRLSPTQLYKSLLVTSGAMTNRLNRLEEEELIARVADADDKRSTLVTLTPPGLAKIEQALQ

SEQ ID NO: 9448 - protein, 329 aa, Zea mays
  Coding DNA Sequence Number=SeqID_3198
  Gene Ontology: Mol. function=protein serine/threonine kinase activity; Cellular component=integral to membrane; Biological process=protein amino acid phosphorylation
  Homolog annotation: Hit_ID=A2YGH4; Match level="QueryCoverage=100%, HitCoverage=53%, E-value=1e-146, Identity=43%"; Hit description =Putative uncharacterized protein
  Pfam annotation: Domain name=LRR_1; Domain location=121-143; Score =8.2; E_value=9.2; Accession=PF00560.23; Description=Leucine Rich Repeat
  Pfam annotation: Domain name=LRR_1; Domain location=145-166; Score =7.5; E_value=12; Accession=PF00560.23; Description=Leucine Rich Repeat
  Pfam annotation: Domain name=LRR_1; Domain location=198-220; Score =11.4; E_value=2.4; Accession=PF00560.23; Description=Leucine Rich Repeat
  Pfam annotation: Domain name=LRR_1; Domain location=222-244; Score =15.0; E_value=0.29; Accession=PF00560.23; Description=Leucine Rich Repeat
  Pfam annotation: Domain name=LRR_1; Domain location=24-46; Score =18.0; E_value=0.036; Accession=PF00560.23; Description=Leucine Rich Repeat
  Pfam annotation: Domain name=LRR_1; Domain location=246-268; Score =15.5; E_value=0.21; Accession=PF00560.23; Description=Leucine Rich Repeat
  Pfam annotation: Domain name=LRR_1; Domain location=48-70; Score =20.5; E_value=0.0064; Accession=PF00560.23; Description=Leucine Rich Repeat
  Pfam annotation: Domain name=LRR_1; Domain location=72-95; Score =12.0; E_value=1.8; Accession=PF00560.23; Description=Leucine Rich Repeat
  Pfam annotation: Domain name=LRR_1; Domain location=97-119; Score =6.0; E_value=23; Accession=PF00560.23; Description=Leucine Rich Repeat
  Pfam module annotation: Pfam domain module=LRR_1::LRR_1::LRR_1::LRR _1::LRR_1::LRR_1::LRR_1::LRR_1::LRR_1; Domain location=121-143::145 -166::198-220::222-244::24-46::246-268::48-70::72-95::97-119
QQLLIPSNKIQGRLDPGRIAKLSNLVSLDLSYNMFTGELPESISQLPKLEELRLGHNNLTGTLPPALSNCTGLRCLDLRSNSFVGDLDAVDFSGLGNLTVFDVAANNFTATIPQSIYSCTSLKALRFGGNQMEGQVAPEIGNLRRLQFLSLTINSFTNISGMFWNLQGCENLTALLVSYNFYGEALLDAGWVGDHLRGLRLLVMENCELTGQIPTWLSKLQDLSILNLGDNRLTGPIPRWIGGMKKLYYLDVSGNLLSGGIPPSLAELPLLTSEQAMANFSTGHMPLTFTLTPNNGAASRQGRGYYLMTGVNTTFNFSNNYLTGSIPGE

SEQ ID NO: 9449 - protein, 120 aa, Zea mays
  misc_feature (14)..(14): Xaa can be any naturally occurring amino acid
  misc_feature (27)..(27): Xaa can be any naturally occurring amino acid
  misc_feature (54)..(54): Xaa can be any naturally occurring amino acid
  misc_feature (65)..(65): Xaa can be any naturally occurring amino acid
  misc_feature (77)..(77): Xaa can be any naturally occurring amino acid
  Coding DNA Sequence Number=SeqID_3199
  Gene Ontology: Mol. function=nucleotide binding; Cellular component =endoplasmic reticulum; Biological process=membrane organization and biogenesis
  Homolog annotation: Hit_ID=P93042; Match level="QueryCoverage=95%, HitCoverage=13%, E-value=2e-43, Identity=77%"; Hit description=Root hair defective 3
MGDACFSTQLIDGXGLFNVSGLENFMXTVRLGECGLSYAVVSIMGPHSSGKSTXFLNHLFGTNFXRLDAFRGRSQTXTKGIWLAKAQNIEPCTLVMDLEGTDGRKRGEDDTAFEKQVHCL

SEQ ID NO: 9450 - protein, 166 aa, Zea mays
  Coding DNA Sequence Number=SeqID_3200
  Gene Ontology: Mol. function=transferase activity, transferring phosphorus-containing groups; Cellular component=membrane; Biological process=two-component signal transduction system (phosphorelay)
  Homolog annotation: Hit_ID=Q1IB73; Match level="QueryCoverage=100%, HitCoverage=44%, E-value=5e-84, Identity=92%"; Hit description =Sensor protein
  Pfam annotation: Domain name=PAS; Domain location=1-109; Score=34.8; E_value=3.1e-07; Accession=PF00989.14; Description=PAS domain
  Pfam annotation: Domain name=PAS_3; Domain location=19-112; Score =28.2; E_value=3e-05; Accession=PF08447.1; Description=PAS fold
  Pfam annotation: Domain name=PAS_4; Domain location=2-114; Score =44.1; E_value=4.9e-10; Accession=PF08448.1; Description=PAS fold
  Pfam module annotation: Pfam domain module=PAS::PAS_3::PAS_4; Domain location=1-109::19-112::2-114
LVQSVVDYAIYMLDPSGHVVSWNAGAQRIKGYRADEVIGKHFSLFFTPQDCTEGRPERLLRQALEQGVAQDEGWRVRKDGTQFWALAALDVIRDDQGQVVGLAKVTRDITDRRESALQLDAVRAQLFQAQKLEALGQLTGGLAHDFNNLLTIIISSARLALTTQDP

SEQ ID NO: 9451 - protein, 58 aa, Zea mays
  Coding DNA Sequence Number=SeqID_3201
LHACSVRDQTIYSGIHPGALPAAKKPPEALNLFRGNPGAFFELPGPTSQGDFLKGIQR

SEQ ID NO: 9452 - protein, 101 aa, Zea mays
  Coding DNA Sequence Number=SeqID_3203
  Gene Ontology: Biological process=type I hypersensitivity
  Homolog annotation: Hit_ID=A0TQ31; Match level="QueryCoverage=92%, HitCoverage=23%, E-value=2e-42, Identity=94%"; Hit description =Putative uncharacterized protein
  Pfam annotation: Domain name=DUF1311; Domain location=20-99; Score= -10.0; E_value=0.0034; Accession=PF07007.3; Description=Protein of unknown function (DUF1311)
RRRAPLPPPVNVAPRDPAIRRVRPSVQDAACEHALFDLNRYYQKLRRKMPAHSAATLVRAQRAWVAFRDATAPLVGEDGRVDLIGARIATMKRLSETAGNQ

SEQ ID NO: 9453 - protein, 200 aa, Zea mays
  Coding DNA Sequence Number=SeqID_3204
  Gene Ontology: Mol. function=transferase activity, transferring glycosyl groups; Biological process=metabolic process
  Homolog annotation: Hit_ID=Q6Z473; Match level="QueryCoverage=95%, HitCoverage=38%, E-value=1e-46, Identity=51%"; Hit description =Putative glucosyltransferase
AAARELGAAALVVDFFATAVLDVARGLAVPAYVYFTSTAALLALTLRLPALAETLAADFETFEGTVDVPGLPPVPAASVPGFLGRKDSPNFTWFVYHGRRFMDADGIVVNTVIELEPGVLSAIARRGAGCPAPPALYPVGPVISFAPPAEPPHPCVRWLETQPAASVVLLCFGSRGFFGAAQAREVARGLERSGHRFLWV

SEQ ID NO: 9454 - protein, 120 aa, Zea mays
  Coding DNA Sequence Number=SeqID_3205
  Gene Ontology: Mol. function=hydrolase activity, acting on ester bonds; Biological process=lipid metabolic process
  Homolog annotation: Hit_ID=A3CEK1; Match level="QueryCoverage=75%, HitCoverage=28%, E-value=3e-11, Identity=50%"; Hit description =Putative uncharacterized protein
  Subcellular localization annotation: CTP_CleavageSite=44; ConfidenceScore=5.34e-01
MALLLLLVLLRSAASAGAGAEPHRSPATALFVLGDSTVGCAAATASSILSLNLTTTTTTLPSSLSGEPCLFFHEARLRVPDLLAAKMGLPSPPPISKLNGTASAAARGVNFGGGGGQEHI

SEQ ID NO: 9455 - protein, 120 aa, Zea mays
  Coding DNA Sequence Number=SeqID_3206
  Subcellular localization annotation: CTP_CleavageSite=52; ConfidenceScore=5.18e-01
GPLPVTVGVPGSVPVPAPSLSVVVAEAPALGAPCARVGVGSPYAPVPSLCVVVGHGFPPSSGVFRRGFPWLLHPSLLPLYLGVPARPRALPMVLRPLLLTFLLWFAPLPLHALPPFFMVA

SEQ ID NO: 9456 - protein, 55 aa, Zea mays
  Coding DNA Sequence Number=SeqID_3208
RFIMHIFRQDNLDHVLLGDGRFGRKIEFHLQGGRQKRLVFQVRVSNIPCQPCVGL

SEQ ID NO: 9457 - protein, 81 aa, Zea mays
  Coding DNA Sequence Number=SeqID_3210
MRRRAGLSRDHARRIRAPCLDAGDTAEGTKETSPPQCDRHTDGIKARAGTQGSEVARTPTREGGIARRRQACHANVKNKTQ

SEQ ID NO: 9458 - protein, 95 aa, Zea mays
  Coding DNA Sequence Number=SeqID_3212
  Gene Ontology: Mol. function=cytokinin dehydrogenase activity; Biological process=cytokinin metabolic process
  Homolog annotation: Hit_ID=A2ZI62; Match level="QueryCoverage=95%, HitCoverage=17%, E-value=7e-19, Identity=52%"; Hit description =Putative uncharacterized protein
  Pfam annotation: Domain name=Cytokin-bind; Domain location=1-84; Score=-159.9; E_value=0.0036; Accession=PF09265.1; Description =Cytokinin dehydrogenase 1, FAD and cytok
MYVFSVLRWTDRARSGRACVKGILEQHCRLADEACRRLGAKQYLARQPSPAHWRDHFGASWDRFVARKARFDPSHVLGPGQGIFPWSDSASASSV

SEQ ID NO: 9459 - protein, 139 aa, Zea mays
  Coding DNA Sequence Number=SeqID_3213
  Homolog annotation: Hit_ID=A2Y8R5; Match level="QueryCoverage=97%, HitCoverage=17%, E-value=4e-13, Identity=41%"; Hit description =Putative uncharacterized protein
GGSPHESHGEDTDNGDAGSARKKHESTPDANDWMGLDGAHNRPIGCDRLYTGAGETHNRESKEDRNGGGDTDAQERKGPLHHSTLGGDNDGGGFADHNAKEAHVGRPHGSENGQRSKAAPQEKKGDAHTRPKRRHRQDQ

SEQ ID NO: 9460 - protein, 93 aa, Zea mays
  Coding DNA Sequence Number=SeqID_3214
  Gene Ontology: Mol. function=transcription factor activity; Cellular component=nucleus; Biological process=regulation of transcription, DNA-dependent
  Homolog annotation: Hit_ID=Q10EE7; Match level="QueryCoverage=95%, HitCoverage=11%, E-value=1e-08, Identity=45%"; Hit description=AP2 domain containing protein, expressed
  Subcellular localization annotation: CTP_CleavageSite=53; ConfidenceScore=5.47e-01
LLSSEAFFLLHDIVSVDAAGTGGSASAHVSNASSLAPSVSSSREQSPDRGGVSASLAMLFAKPEVAPRLACPLPLESWVSPSSAARPSGVSIA

SEQ ID NO: 9461 - protein, 97 aa, Zea mays
  Coding DNA Sequence Number=SeqID_3215
ENTCVRLLVCSTTFLNHYFIVVSPPLPALGNSNGQRPGLKAGAIAAIAVIGCMAVAGFLGWWVYSRFCSLAAKARRSPEPSQHQGSLPSNFSINYFN

SEQ ID NO: 9462 - protein, 94 aa, Zea mays
  misc_feature (39)..(39): Xaa can be any naturally occurring amino acid
  misc_feature (60)..(60): Xaa can be any naturally occurring amino acid
  Coding DNA Sequence Number=SeqID_3217
  Gene Ontology: Mol. function=AMP deaminase activity; Cellular component=integral to membrane; Biological process=purine ribonucleoside monophosphate biosynthetic process
  Homolog annotation: Hit_ID=Q84NP7; Match level="QueryCoverage=100%, HitCoverage=11%, E-value=1e-28, Identity=71%"; Hit description =Probable AMP deaminase
LFGCIQTGLVMSPLSNKSLFAENHQNPFPTIFLRCLNLXFFSTDDPLQIYPTKEPLVEEXSIAASLWKLSSCCLYEFTRNFVYQSGFSHRLLSY

SEQ ID NO: 9463 - protein, 195 aa, Zea mays
  Coding DNA Sequence Number=SeqID_3218
  Gene Ontology: Mol. function=histidine ammonia-lyase activity; Cellular component=cytoplasm; Biological process=histidine catabolic process
  Homolog annotation: Hit_ID=Q12EP6; Match level="QueryCoverage=99%, HitCoverage=37%, E-value=7e-58, Identity=62%"; Hit description =Histidine ammonia-lyase
  Pfam annotation: Domain name=PAL; Domain location=1-159; Score= -222.1; E_value=3.1e-05; Accession=PF00221.9; Description =Phenylalanine and histidine ammonia-lyase
DSGDVISGGNFHAEPVAFAADIIALAIAEVGAISERRLALLLDTGLSGLPPFLVRDGGVNSGFMIAQVTAAALASENKSLAHPGSVDSLPTSANQEDHVSMATYAARRLGEMCFNTAAVVGIEAMAAAQGIDFHRPLQSSAAIEQEMSRIRAQVAFLDQDRLLAPDIDAMRLWASSYVWPETLTALLPSQRSTAN

SEQ ID NO: 9464 - protein, 92 aa, Zea mays
  misc_feature (23)..(23): Xaa can be any naturally occurring amino acid
  Coding DNA Sequence Number=SeqID_3219
  Gene Ontology: Cellular component=chloroplast thylakoid membrane
  Homolog annotation: Hit_ID=A7QF53; Match level="QueryCoverage=80%, HitCoverage=39%, E-value=2e-15, Identity=58%"; Hit description =Chromosome undetermined scaffold_87, whole genome shotgun sequence
CSRSSSNSSAAPSPTAEEITEKXGLEFGLWKVFSSKEEEEGAEGKKSRTAKELLAKYGGAYLAISISLSLVSFALCYLLISAGADVQSCSPR

SEQ ID NO: 9465 - protein, 226 aa, Zea mays
  Coding DNA Sequence Number=SeqID_3220
  Homolog annotation: Hit_ID=A8AQ32; Match level="QueryCoverage=69%, HitCoverage=23%, E-value=1e-52, Identity=64%"; Hit description =Putative uncharacterized protein
  Pfam annotation: Domain name=LppC; Domain location=2-226; Score= -269.9; E_value=0.051; Accession=PF04348.4; Description=LppC putative lipoprotein
  Subcellular localization annotation: CTP_CleavageSite=57; ConfidenceScore=5.39e-01
PANGDANAVVSPATAAITPSDSVQPQQPAAQPAVAQPASSAQVKVYDTSSQPIAQVMQQAQQDGATLVVGPLLKNNVEQVANSQTPLNVLALNEPEQIQNHPNICYFALSPEDEARDAAHHIWDQGKRQPLLLMPRSSYGDRVGKAFAQEWQKLGGASVLQQRFGGVGELKQGINSGSGIALSGTPLTVQPDQPQGVAVAGQKLKHRRPALRHLRAPAATAALSSL

SEQ ID NO: 9466 - protein, 64 aa, Zea mays
  Coding DNA Sequence Number=SeqID_3221
  Gene Ontology: Mol. function=mismatched DNA binding; Biological process=mismatch repair
  Homolog annotation: Hit_ID=A3B5H8; Match level="QueryCoverage=85%, HitCoverage=7%, E-value=2e-20, Identity=90%"; Hit description =Putative uncharacterized protein
RAATEQLNSMMDLGSDVQVRAAGGLLAILDNERLLDTIEQMEGGASIAIDSVVQISFYPLMEIN

SEQ ID NO: 9467 - protein, 97 aa, Zea mays
  Coding DNA Sequence Number=SeqID_3222
MARLGHAVANGEGTSAVSSFIHDGEQGEGYRGWPGWRPAHRRRGFLPSYVYPMATAHESRRAAINGDGPPAVSKWMGSSSVTRYCTMASASSVAWQP

SEQ ID NO: 9468 - protein, 193 aa, Zea mays
  Coding DNA Sequence Number=SeqID_3224
  Gene Ontology: Mol. function=endonuclease activity
  Homolog annotation: Hit_ID=A7MJ16; Match level="QueryCoverage=100%, HitCoverage=76%, E-value=2e-79, Identity=69%"; Hit description =Putative uncharacterized protein
  Subcellular localization annotation: CTP_CleavageSite=38; ConfidenceScore=5.09e-01
MPQNTQGSSFKVLTINTHKGFTSFNRRFILPELRDAVRATSADIVFLQEVMGTHAIHSAHIENWPENSHYEYLADTMWHDFAYGRNAVYPEGHHGNAILSRFPITEYQNRDISVAGSEKRGMLHCQISLPDRPEPIHTLCVHLGLKEKHRLAQMRMMCELIESLPPDAPLVVAGDFNDWQVRANRFLQRGAGL

SEQ ID NO: 9469 - protein, 78 aa, Zea mays
  Coding DNA Sequence Number=SeqID_3225
  Subcellular localization annotation: CTP_CleavageSite=35; ConfidenceScore=5.32e-01
AQGSRSRPGTAWRNTTGNPSRTLYCNGEGQCRCCTCMLAAGRSNSGSAACTPMPRAFHRERTQRGQSGAWLLPQFSKR

SEQ ID NO: 9470 - protein, 88 aa, Zea mays
  misc_feature (75)..(75): Xaa can be any naturally occurring amino acid
  Coding DNA Sequence Number=SeqID_3226
  Gene Ontology: Mol. function=transcription factor activity; Cellular component=membrane; Biological process=regulation of transcription, DNA-dependent
  Homolog annotation: Hit_ID=A5W586; Match level="QueryCoverage=95%, HitCoverage=28%, E-value=6e-37, Identity=92%"; Hit description =Transcriptional regulator, LysR family
  Pfam annotation: Domain name=HTH_1; Domain location=5-64; Score=85.8; E_value=1.4e-22; Accession=PF00126.17; Description=Bacterial regulatory helix-turn-helix protein, lysR family
  Pfam annotation: Domain name=MarR; Domain location=3-66; Score=3.7; E_ value=0.017; Accession=PF01047.13; Description=MarR family
  Pfam module annotation: Pfam domain module=HTH_1::MarR; Domain location=5-64::3-66
MSVSHAQLKAFHAVAVHGSFTRAAEKLFLTQPAVSDQVRKLEERFGVLLFHRNKRSVQLTDLGERMMGISQRLIXCEAEAHELLQACK

SEQ ID NO: 9471 - protein, 172 aa, Zea mays
  Coding DNA Sequence Number=SeqID_3227
  Gene Ontology: Cellular component=integral to membrane
  Homolog annotation: Hit_ID=A1FLR5; Match level="QueryCoverage=57%, HitCoverage=52%, E-value=1e-46, Identity=91%"; Hit description =Putative uncharacterized protein precursor
  Pfam annotation: Domain name=Transgly_assoc; Domain location=33-76; Score=25.8; E_value=0.00016; Accession=PF04226.4; Description =Transglycosylase associated protein
MGIIGTISIGLIVGLLARFIKPGDYSMGWIMTILLGIAGSLLATYGGQALGIYQAGQAAGFLGALIGAVILLLMPKSDQQALEQMPDIDHNSPEAMGTFTDKGGLKQSKGLPAVMYSTKTVAAMNGKDIRLGGYPVPLESDAKGNSTLFFLVPYPGACIHVPPPPPNQLVLV

SEQ ID NO: 9472 - protein, 151 aa, Zea mays
  Coding DNA Sequence Number=SeqID_3228
  Gene Ontology: Mol. function=catalytic activity; Cellular component =nucleus; Biological process=metabolic process
  Homolog annotation: Hit_ID=A2W7N5; Match level="QueryCoverage=100%, HitCoverage=37%, E-value=4e-83, Identity=98%"; Hit description=L -alanine-DL-glutamate epimerase
  Pfam annotation: Domain name=MR_MLE_N; Domain location=5-107; Score =164.0; E_value=3.9e-46; Accession=PF02746.6; Description=Mandelate racemase  muconate lactonizing enzyme, N-terminal domain
MKITRLETFVVPPRWLFLKIETDEGIVGWGEPIVEGRAHTVEAAVQELADYLVGRDPLLIEDHWQVMYRAGFYRGGPIMMSAIAGVDQALWDIKGKHHGVPVHALLGGQVRDRIKVYSWIGGDRPSDVANNARAVVERGFKAVKMNGSEEL

SEQ ID NO: 9473 - protein, 144 aa, Zea mays
  Coding DNA Sequence Number=SeqID_3229
  Gene Ontology: Mol. function=carbohydrate binding; Biological process= carbohydrate metabolic process
  Homolog annotation: Hit_ID=A5WB48; Match level="QueryCoverage=100%, HitCoverage=48%, E-value=7e-70, Identity=88%"; Hit description =Aldose 1-epimerase
MGNTPVTISQALHSYFAVSDVRQARVEGVEGLSYIETLADWEQRQQQGPLAFAGETDRIYLATPQTLSIVDPHWERRITLTSSGSRSAVIWNPWTERARELPDMADDGWQRMLCIETANVWDDLVELKPVGSSSLGVRIGCEMI

SEQ ID NO: 9474 - protein, 169 aa, Zea mays
  Coding DNA Sequence Number=SeqID_3230
  Gene Ontology: Mol. function=lipoyl(octanoyl) transferase activity; Cellular component=cytoplasm; Biological process=lipoate biosynthetic process
  Homolog annotation: Hit_ID=Q39CJ1; Match level="QueryCoverage=99%, HitCoverage=66%, E-value=5e-79, Identity=88%"; Hit description =Octanoyltransferase
  Pfam annotation: Domain name=BPL_LipA_LipB; Domain location=73-157; Score=41.3; E_value=3.4e-09; Accession=PF03099.9; Description =Biotinlipoate AB protein ligase family
  Subcellular localization annotation: CTP_CleavageSite=16; ConfidenceScore=5.29e-01
MSVSQVAIVSTPVAVSASPAGSPVEPVVPVTVRWRGSEAYQASFDAMRAFTDTRTADTGDEIWVVEHPPVYTLGQAGDPAHLLVADSGVPLVKVDRGGQITYHGPGQIVVYLLLDQRRRKLMVRTLVTKIEEAVIETLAAYNLDTVRKAGAPGINVASGAHEGAKIPAP

SEQ ID NO: 9475 - protein, 127 aa, Zea mays
  Coding DNA Sequence Number=SeqID_3231
  Subcellular localization annotation: CTP_CleavageSite=43; ConfidenceScore=5.01e-01
MDQGARCGGPALDRARTVPSGDSTEVRDRGRVVFLSSRAGRVRRAASAGLVLAAVPISVAGIVAAPQAAHAAEQLPECSGVSAEQPKGTTLINVPTNDPVTQIGVPRAQQWLRGHRTQPGAGVTVAV

SEQ ID NO: 9476 - protein, 147 aa, Zea mays
  Coding DNA Sequence Number=SeqID_3233
  Gene Ontology: Mol. function=transcription factor activity; Cellular component=nucleus; Biological process=regulation of transcription, DNA-dependent
  Homolog annotation: Hit_ID=Q8LKW9; Match level="QueryCoverage=83%, HitCoverage=57%, E-value=1e-16, Identity=42%"; Hit description=DRE binding factor 1
LGTVLTTCHLSVHVAYDQAAYRRRGDAARLNFPDDAASRATLDPVVNAKLEAISATIATAAASSSKNAARAKSKAVPINAPILEAVASPSSSSSSDEGSGSDDEMSMSSPSPTPVVAELGQLDFGEVPWDEAENFVDWPPCPAVADE

SEQ ID NO: 9477 - protein, 92 aa, Zea mays
  misc_feature (1)..(1): Xaa can be any naturally occurring amino acid
  misc_feature (9)..(9): Xaa can be any naturally occurring amino acid
  Coding DNA Sequence Number=SeqID_3234
  Homolog annotation: Hit_ID=Q10MT7; Match level="QueryCoverage=72%, HitCoverage=26%, E-value=8e-23, Identity=76%"; Hit description=Gamma interferon inducible lysosomal thiol reductase family protein, expressed
XLELKYARXQTDALEPPHRYVPWVVVDGQPLLEDYENFEAYICKAYKGTPPKACEGLERLQMALETAEGRPFFGSCEVEAAFHLVVRFFIVQ

SEQ ID NO: 9478 - protein, 82 aa, Zea mays
  misc_feature (65)..(65): Xaa can be any naturally occurring amino acid
  misc_feature (74)..(74): Xaa can be any naturally occurring amino acid
  Coding DNA Sequence Number=SeqID_3235
  Gene Ontology: Mol. function=binding; Cellular component =mitochondrial inner membrane; Biological process=transport
  Homolog annotation: Hit_ID=P29518; Match level="QueryCoverage=100%, HitCoverage=18%, E-value=4e-30, Identity=78%"; Hit description =Protein brittle-1, chloroplast precursor
  Pfam annotation: Domain name=Mito_carr; Domain location=1-72; Score =27.3; E_value=8.9e-06; Accession=PF00153.17; Description =Mitochondrial carrier protein
SFEAPFYTTRTHLMVGEFGVNSMAGVFHWIMQNEGWTGLFRGNARNVLRVAPSKAIEIFTYETVXNFLTPKVDXPPKNPIPT

SEQ ID NO: 9479 - protein, 114 aa, Zea mays
  misc_feature (78)..(78): Xaa can be any naturally occurring amino acid
  Coding DNA Sequence Number=SeqID_3236
  Gene Ontology: Mol. function=phosphotransferase activity, alcohol group as acceptor; Cellular component=membrane; Biological process =lipopolysaccharide biosynthetic process
  Homolog annotation: Hit_ID=A1FM82; Match level="QueryCoverage=100%, HitCoverage=42%, E-value=3e-40, Identity=74%"; Hit description =Lipopolysaccharide kinase
  Pfam annotation: Domain name=Kdo; Domain location=20-114; Score= -67.5; E_value=0.0034; Accession=PF06293.4; Description =Lipopolysaccharide kinase (Kdo)
MKLILAEPFKRLWAERDAFESVEALQGEVYRELEGRRTLRTEVAGEGFFVKIHRGIGWGEIFKNLLTDKLPVLGAGSXEGRHIQRLHQVGVPTMTAVAYGERGSNPAVQNLLII

SEQ ID NO: 9480 - protein, 252 aa, Zea mays
  Coding DNA Sequence Number=SeqID_3237
  Gene Ontology: Mol. function=protein serine/threonine kinase activity; Cellular component=integral to plasma membrane; Biological process=protein amino acid phosphorylation
  Homolog annotation: Hit_ID=A7P926; Match level="QueryCoverage=94%, HitCoverage=61%, E-value=7e-82, Identity=64%"; Hit description =Chromosome chr3 scaffold_8, whole genome shotgun sequence
  Pfam annotation: Domain name=Pkinase; Domain location=77-250; Score= -32.6; E_value=1.1e-06; Accession=PF00069.15; Description=Protein kinase domain
  Pfam annotation: Domain name=Pkinase_Tyr; Domain location=77-252; Score=0.9; E_value=1.9e-12; Accession=PF07714.7; Description=Protein tyrosine kinase
  Pfam module annotation: Pfam domain module=Pkinase::Pkinase_Tyr; Domain location=77-250::77-252
  Subcellular localization annotation: CTP_CleavageSite=70; ConfidenceScore=5.05e-01
MACVRARAGNTSGYYWPSGARPPQWQTGGQAVTAAISTMQHGAVLPPPPLPPPPPPPMPADTATFSYEELAAATGGFSEANLLGQGGFGYVHRGVLPGPGGRVKEVAVKQLKAGSGQGEREFQAEVDTISRVQHRHLVSLVGYCVAQHHRMLIYEFVPNGTLEHHLHGRGMPVMDWPTRLKIAIGAAKGLAYLHEDCHPRIIHRDIKSANILLDYSFQAQVADFGLAKLTNDTNTHVSTRIMGTFGCVHVSP

SEQ ID NO: 9481 - protein, 70 aa, Zea mays
  Coding DNA Sequence Number=SeqID_3238
LSRRGCAVSISTGSAFVFTEVMLMIGIGRECCHMSNWRKPPLVCHQMRPEIFSASVILELINVVGGSSGI

SEQ ID NO: 9482 - protein, 70 aa, Zea mays
  Coding DNA Sequence Number=SeqID_3239
PGSPDPLSRRKLVVAATCTTQVQLLKFLTVHGKGSACACMQHLHSPWLPTSFDSQSLCCGRFTQAKKAQK

SEQ ID NO: 9483 - protein, 79 aa, Zea mays
  misc_feature (40)..(40): Xaa can be any naturally occurring amino acid
  misc_feature (49)..(49): Xaa can be any naturally occurring amino acid
  Coding DNA Sequence Number=SeqID_3241
  Gene Ontology: Mol. function=protein serine/threonine kinase activity; Biological process=recognition or rejection of self pollen
  Homolog annotation: Hit_ID=A2YMH8; Match level="QueryCoverage=67%, HitCoverage=8%, E-value=2e-12, Identity=62%"; Hit description =Putative uncharacterized protein
  Pfam annotation: Domain name=PAN_2; Domain location=2-52; Score=13.4; E_value=5.7e-05; Accession=PF08276.2; Description=PAN-like domain
PARMRTDDNATSANARSPEDCQVTCFNSCSYSAYTYNNTXCFVWHGDLXVNLQEQHTGDGGGTLLLTQACCIQGASCCR

SEQ ID NO: 9484 - protein, 221 aa, Zea mays
  Coding DNA Sequence Number=SeqID_3242
  Gene Ontology: Mol. function=methyltransferase activity; Biological process=metabolic process
  Homolog annotation: Hit_ID=A4ST99; Match level="QueryCoverage=100%, HitCoverage=31%, E-value=1e-102, Identity=77%"; Hit description =Putative uncharacterized protein
  Pfam annotation: Domain name=DUF323; Domain location=1-151; Score= -47.2; E_value=7.2e-05; Accession=PF03781.6; Description=Domain of unknown function (DUF323)
WDWPAEVNQLEAAAFCRWLAEESGKAIQLPCEAEWMQLREQVAGDQPDWIDAPGNINLARWASSCPVDHFTQGDFFDIVGNVWQWTTTPTNGFEGFRVHPLYDDFSTPTFDGKHALIKGGSWISTGNEALKSSRYAFRRHFFQHAGFRYVVSSHQESMALNPYETDSMVSQYLDFQYGPGYYGVPNYAAALVDIVLPHCAQRGHALDIGCATGRASFELAR

SEQ ID NO: 9485 - protein, 106 aa, Zea mays
  Coding DNA Sequence Number=SeqID_3243
LILTCVALSDQVTCAILSLDPSAQHTDGCGISEGHTHSQRARCRTVLLLASTCEVIIIYLHYKSSSLLSSYPQAIDSEGILDFMHNRLSEVQVETHCICSIKQLQN

SEQ ID NO: 9486 - protein, 251 aa, Zea mays
  Coding DNA Sequence Number=SeqID_3244
  Gene Ontology: Mol. function=oxidoreductase activity, acting on the CH-OH group of donors, NAD or NADP as acceptor; Cellular component =nucleus; Biological process=metabolic process
  Homolog annotation: Hit_ID=A8GBF0; Match level="QueryCoverage=100%, HitCoverage=78%, E-value=2e-61, Identity=51%"; Hit description=D -isomer specific 2-hydroxyacid dehydrogenase NAD-binding
  Pfam annotation: Domain name=2-Hacid_dh; Domain location=5-220; Score= 19.6; E_value=4.8e-06; Accession=PF00389.20; Description=D-isomer specific 2-hydroxyacid dehydro
  Pfam annotation: Domain name=2-Hacid_dh_C; Domain location=113-251; Score=102.2; E_value=1.6e-27; Accession=PF02826.9; Description=D -isomer specific 2-hydroxyacid dehydro
  Pfam module annotation: Pfam domain module=2-Hacid_dh::2-Hacid_dh_C; Domain location=5-220::113-251
MSLNCIILDDYQNVALSLADWASLQPQVQTSALHRHYADEDELVAHIAHADILVVMRERTPLSARLIGRLPNLKLIVTSGMRNASIDLHACAERLIAVCGTASSSAAPLELSWGLLLGLARHIPAESQALRSNGAWQHTLGMTLHGKTLGLLGLGKIGGEMANVARAFGMRVCAWSQNLSEARATACGAEKMASLPALLRASDVVSIHLVLSERTRHLLDGVALAHMKPGALLINTSRAGIVDQQAMISAL

SEQ ID NO: 9487 - protein, 144 aa, Zea mays
  Coding DNA Sequence Number=SeqID_3245
  Gene Ontology: Mol. function=oxidoreductase activity, acting on the CH-CH group of donors; Biological process=electron transport
  Homolog annotation: Hit_ID=A4JJU9; Match level="QueryCoverage=81%, HitCoverage=29%, E-value=3e-33, Identity=63%"; Hit description=Acyl -CoA dehydrogenase, type 2, C-terminal domain
  Pfam annotation: Domain name=Acyl-CoA_dh_2; Domain location=1-94; Score=-9.5; E_value=0.0017; Accession=PF08028.2; Description=Acyl -CoA dehydrogenase, C-terminal doma
QRFGDMHVQAVAAAALADRAAAALQRAWSRRDALTADERAAAALAVSDAKIVAQRAALANGEALFDACGARATAASLGLDRFWRNARTHTLHDPLDYRLRDVGRFALTGEWPQASLYTPSTKRCYRKARCGAAARAALRCSQLA

SEQ ID NO: 9488 - protein, 76 aa, Zea mays
  Coding DNA Sequence Number=SeqID_3246
  Gene Ontology: Mol. function=transcription factor activity; Biological process=regulation of transcription, DNA-dependent
  Homolog annotation: Hit_ID=A6V8A6; Match level="QueryCoverage=98%, HitCoverage=35%, E-value=5e-26, Identity=81%"; Hit description =Transcriptional regulatory protein
  Pfam annotation: Domain name=TetR_N; Domain location=27-73; Score =62.6; E_value=1.4e-15; Accession=PF00440.13; Description=Bacterial regulatory proteins, tetR family
MAAQRNAKISERKKPQQARSSELVAAILQAATQVLEQEGATRFTTARVAERAGVSIGSLYQYFPNKAAILFRLQAC

SEQ ID NO: 9489 - protein, 125 aa, Zea mays
  Coding DNA Sequence Number=SeqID_3247
  Gene Ontology: Mol. function=oxidoreductase activity, acting on single donors with incorporation of molecular oxygen, incorporation of two atoms of oxygen; Biological process=aromatic compound catabolic process
  Homolog annotation: Hit_ID=A5FC80; Match level="QueryCoverage=99%, HitCoverage=40%, E-value=3e-45, Identity=66%"; Hit description =Glyoxalase/bleomycin resistance protein/dioxygenase
  Pfam annotation: Domain name=Glyoxalase; Domain location=7-124; Score= 48.6; E_value=2.2e-11; Accession=PF00903.15; Description =GlyoxalaseBleomycin resistance proteinDioxygenase superfamily
KENQVVGLHHITAIANEAKRNLDFYTKVLGLRLVKKTVNFDDPGTYHFYYGNESGTPGTILTFFPWEGIGAGRNGTGLATHIGYSVPKGALAFWKERLTQFNVPYEQGEVFGESMISFKDPDGLQ

SEQ ID NO: 9490 - protein, 113 aa, Zea mays
  Coding DNA Sequence Number=SeqID_3248
LGAVAVQVHGGGAKGEHARVEHERPVAVPGAEEGIDHGGASAWKRRKGGHAQVEHKRPVVVLDAEEGIDHGEDEGPSKNRVGGGQAPMTRLDVRRQSRHQSRAWPATTTVQAT

SEQ ID NO: 9491 - protein, 84 aa, Zea mays
  Coding DNA Sequence Number=SeqID_3250
LPEREGGVLVARQEPAWDLVGAREGTPLPGAKSHLPGTSADTTSRAQSISGSGQIHLIPSINTLRHPLLIALCFSKAAGQHHRG

SEQ ID NO: 9492 - protein, 249 aa, Zea mays
  Coding DNA Sequence Number=SeqID_3252
  Gene Ontology: Mol. function=ATPase activity, coupled to transmembrane movement of substances; Cellular component=integral to membrane; Biological process=transport
  Homolog annotation: Hit_ID=A6T6Y3; Match level="QueryCoverage=75%, HitCoverage=32%, E-value=1e-55, Identity=62%"; Hit description=ATP -binding component of cytochrome-related transport
MGALQQAAQQQTTLMITHQLHALDQWDEVWVMQAGQLVQQGHWQQLIAEAGPLRELAQHRLGVVLAIVTLLASIGLLTLSGWFLAASSLAGVAGLYSFNYMLPAAGVRGAAITRTAARYFERLVSHDATFRVLQHLRVFTFSRLMALAPAQLARFRNGELLNRFVSDVDTLDHLYLRVISPLLGTAVVIVVVTCGLALLDMRLALLLGAIMLLTLLLKPPLIWRLGARPGAQIARYQARWRLQLTPWVN

SEQ ID NO: 9493 - protein, 175 aa, Zea mays
  Coding DNA Sequence Number=SeqID_3253
  Gene Ontology: Mol. function=homoserine dehydrogenase activity; Biological process=aspartate family amino acid biosynthetic process
  Homolog annotation: Hit_ID=A7MNG6; Match level="QueryCoverage=100%, HitCoverage=21%, E-value=1e-57, Identity=65%"; Hit description =Putative uncharacterized protein
  Pfam annotation: Domain name=NAD_binding_3; Domain location=57-173; Score=80.9; E_value=4.1e-21; Accession=PF03447.6; Description =Homoserine dehydrogenase, NAD binding domain
HRFWQQIKDQPVEFVWQSEDHISLVAVLRVGPTQHLIQGLHQSLFRAEKRIGLILFGKGNIGSRWLELFAREQETLSARTGFEFVLAGVADSSRSLLSYDSLDASRALAFFDDEAEARDEETLVLWMRAHPRDDLVVLDVTARDSLAQQYHEYASHGLHVISAHKEAGAASGQSW

SEQ ID NO: 9494 - protein, 266 aa, Zea mays
  Coding DNA Sequence Number=SeqID_3254
  Gene Ontology: Mol. function=2 iron, 2 sulfur cluster binding; Biological process=electron transport
  Homolog annotation: Hit_ID=A5NVJ2; Match level="QueryCoverage=100%, HitCoverage=38%, E-value=6e-79, Identity=58%"; Hit description =Pyridoxamine 5'-phosphate oxidase-related, FMN-binding
  Pfam annotation: Domain name=Pyridox_oxidase; Domain location=115 -211; Score=61.8; E_value=2.4e-15; Accession=PF01243.10; Description =Pyridoxamine 5'-phosphate oxidase
VDAQGDAWATLLEGQPGFILSPNATTLDIAAGPDASDPAAAGMTDGAPVGLLGIELHTRRRNRMNGVLTAIGGGLRVQVDQSFGNCPRYIQLRDFRFDHAPGRAYQGEVETLSALDDAARAAIGQADTFYVTTYADQARRQVDVSHRGGKAGFVRIAADDVLTIPDFNGNLFFSTLGNIVLNGKAGLLFIDYASGDVLQMSGDATVITDSAEIAAFQGAERLWRFSARRIVRRRAALALRWADQPDGVSPASLMTGDWPSASERRR

SEQ ID NO: 9495 - protein, 116 aa, Zea mays
  Coding DNA Sequence Number=SeqID_3255
PSTQSIFGAAAGGFGQAASRLHDPAPSPSDFHGGLLGSEGLHLHHPRSDVHGHGGDELSGVVAGGSCKLNYSSHAGAAATSSPGAASGDKPPDGGAGAPGRPGRGEGLDPWICTSE

SEQ ID NO: 9496 - protein, 144 aa, Zea mays
  misc_feature (88)..(88): Xaa can be any naturally occurring amino acid
  misc_feature (102)..(102): Xaa can be any naturally occurring amino acid
  Coding DNA Sequence Number=SeqID_3256
  Gene Ontology: Mol. function=glutathione gamma-glutamylcysteinyltransf erase activity; Cellular component=cytoplasm; Biological process =phytochelatin biosynthetic process
  Homolog annotation: Hit_ID=Q8GZS7; Match level="QueryCoverage=97%, HitCoverage=27%, E-value=2e-46, Identity=64%"; Hit description =Phytochelatins synthase
  Pfam annotation: Domain name=DUF1984; Domain location=45-125; Score =128.9; E_value=1.5e-35; Accession=PF09328.1; Description=Domain of unknown function (DUF1984)
  Pfam annotation: Domain name=Phytochelatin; Domain location=1-44; Score=-34.6; E_value=0.0018; Accession=PF05023.5; Description =Phytochelatin synthase
  Pfam module annotation: Pfam domain module=DUF1984::Phytochelatin; Domain location=45-125::1-44
LHACSRTQDCHIITSYHRWPFGQTGSGHFSPIGGYHAEQNMVFILDVACFKYPPNWVPSQLLWEAMNMTDDSTRLLRGFMLISRKVAXPSLLHTVSCRDENXKSMSMFCVEDLPSLLKVEIGTSVGLVTSGLSASYRISDGGLQ

SEQ ID NO: 9497 - protein, 67 aa, Zea mays
  Coding DNA Sequence Number=SeqID_3257
KNKPIWDKIRKSPLKKTIILFVPLQAWKHSQDQGLPSGFILRSGNNFVVVKKRPHKSPQKTLVFFEN

SEQ ID NO: 9498 - protein, 85 aa, Zea mays
  Coding DNA Sequence Number=SeqID_3258
  Gene Ontology: Biological process=cell redox homeostasis
  Homolog annotation: Hit_ID=Q7N3Y0; Match level="QueryCoverage=97%, HitCoverage=17%, E-value=4e-34, Identity=84%"; Hit description =Similar to unknown protein YcjX of Escherichia coli
KDSLVNQLLNVHSGARLPLFSVVREERLLGVKRVPQRELGTPRFTYDEGLAQLYGTPPMWPTPTRGVSEMRLALRYRPDQSLLRH

SEQ ID NO: 9499 - protein, 94 aa, Zea mays
  misc_feature (47)..(47): Xaa can be any naturally occurring amino acid
  misc_feature (71)..(71): Xaa can be any naturally occurring amino acid
  Coding DNA Sequence Number=SeqID_3259
  Gene Ontology: Mol. function=cobyrinic acid a,c-diamide synthase activity; Biological process=plasmid partitioning
  Homolog annotation: Hit_ID=A7MRK9; Match level="QueryCoverage=97%, HitCoverage=23%, E-value=3e-21, Identity=60%"; Hit description =Putative uncharacterized protein
  Subcellular localization annotation: CTP_CleavageSite=55; ConfidenceScore=5.22e-01
CRLQGNIGFMSKLSNVADHLMCLSLAKVLFGAAMLFAALPRLGGFAXCGESFATVLSAFPSTCVGSSEALXPVRFSFPYFSLAVVDRIGSLRLP

SEQ ID NO: 9500 - protein, 224 aa, Zea mays
  Coding DNA Sequence Number=SeqID_3260
INRPRQQPVLLVLTLLITLALGALPLLSYAANRLVSGQPLMLWQVTAGWLLLLPLLWLWLGLWWPPGRGAALAQLLGAELLFALLIGIGGHAASELARSGSPLARTALGSGLWCAAGLALLLAAEAIRQLSQQTPLRILLNLQLWLPPLILLLSGQLDALSLLKEYSNRTAVFNAAFSQHLLLLGGTLLPTLLIGLPLGLAIARRARWQHAAFSVLNLIQTVPS

SEQ ID NO: 9501 - protein, 74 aa, Zea mays
  misc_feature (37)..(37): Xaa can be any naturally occurring amino acid
  Coding DNA Sequence Number=SeqID_3262
  Gene Ontology: Mol. function=oxidoreductase activity; Cellular component=chloroplast; Biological process=metabolic process
  Homolog annotation: Hit_ID=Q8W3L2; Match level="QueryCoverage=100%, HitCoverage=10%, E-value=5e-10, Identity=48%"; Hit description =Zeaxanthin epoxidase
LQSNALAALEAVDAAAADEVMDAGCVTGDRVNGIVVXDGVSGSWYIKFDTFTPAVFSRLQTTEYIHHDELMKPL

SEQ ID NO: 9502 - protein, 82 aa, Zea mays
  misc_feature (65)..(65): Xaa can be any naturally occurring amino acid
  Coding DNA Sequence Number=SeqID_3263
  Gene Ontology: Mol. function=nucleoside-triphosphatase activity; Cellular component=intracellular; Biological process=transport
  Homolog annotation: Hit_ID=Q7N3X1; Match level="QueryCoverage=100%, HitCoverage=30%, E-value=2e-28, Identity=75%"; Hit description =Peptide transport system ATP-binding protein SapF
MVETLLEVKNLTKTFRYRTGLFRRHHLDAAKPASFTLQPRKTLAIIGANGSGKSTLARMLSGVIXPTSGEILINHHKLIYGD

SEQ ID NO: 9503 - protein, 92 aa, Zea mays
  Coding DNA Sequence Number=SeqID_3264
DCPKKKKKKKKKKKKKKKKKKKKQKKKKGGEGFKESNFYFPLASQIKNFGGGRPKKKFIAPGFKTTKLVKIWGSPNLMGGGINPFPPGGKNG

SEQ ID NO: 9504 - protein, 94 aa, Zea mays
  Coding DNA Sequence Number=SeqID_3265
  Homolog annotation: Hit_ID=Q4KBL6; Match level="QueryCoverage=98%, HitCoverage=58%, E-value=5e-41, Identity=77%"; Hit description =Putative uncharacterized protein
  Pfam annotation: Domain name=DUF1348; Domain location=1-85; Score =91.3; E_value=3e-24; Accession=PF07080.2; Description=Protein of unknown function (DUF1348)
QRKWARELDYRLIKELWAWHHDKLAVRFAYEWRDDSGNWFRSYGNENWHFGADGLMIQRFACINDLPISAEARLFHWPAGRRPDDHPGLSELGL

SEQ ID NO: 9505 - protein, 159 aa, Zea mays
  Coding DNA Sequence Number=SeqID_3266
  Gene Ontology: Mol. function=dihydrofolate reductase activity; Biological process=nucleotide biosynthetic process
  Homolog annotation: Hit_ID=A9HP20; Match level="QueryCoverage=80%, HitCoverage=83%, E-value=3e-47, Identity=70%"; Hit description =Dihydrofolate reductase
  Pfam annotation: Domain name=DHFR_1; Domain location=11-154; Score =117.2; E_value=4.8e-32; Accession=PF00186.9; Description =Dihydrofolate reductase
PGDPRPGGGLVLTLIVARARNGAIGRAGAIPWDVPEDLTSFQRESLGGAVIMGRKTWESLPVKPLPRRLNIVVSARPDAAELVAPDVGAAIALAYERGHDRVYGIGGARIYQEMLPLADRLVISEVALDVPDADTFFPDFPAPAWRLVHERVLRAQAPD

SEQ ID NO: 9506 - protein, 224 aa, Zea mays
  Coding DNA Sequence Number=SeqID_3267
  Gene Ontology: Mol. function=hydrolase activity, acting on ester bonds; Cellular component=cellular_component; Biological process =catabolic process
  Homolog annotation: Hit_ID=A6T994; Match level="QueryCoverage=100%, HitCoverage=62%, E-value=1e-115, Identity=91%"; Hit description =Putative hydrolase
  Pfam annotation: Domain name=PTE; Domain location=2-223; Score=55.1; E_value=2.4e-13; Accession=PF02126.9; Description=Phosphotriesterase family
MGTGLYLEPSHPECVKTISVEQLTDKLIYDLGGLPEKPEVLAGLIGEIGISSRFTPDEEKSLRAAGRASAATGVPIQVHLPGWERLGHKVLDILAQEGADLRHTVLCHMNPSFADKTYQRELADRGVFLEYDMIGMSYYYADESAQSPSDEENARAICALIDDGYLPQILLSQDVFLKTMLTRYGGHGYGYILKHFVPRLKRHGVSGEQLETLMITNPQRVFGG

SEQ ID NO: 9507 - protein, 91 aa, Zea mays
  misc_feature (39)..(39): Xaa can be any naturally occurring amino acid
  Coding DNA Sequence Number=SeqID_3268
  Gene Ontology: Mol. function=ribulose-bisphosphate carboxylase activity; Cellular component=chloroplast ribulose bisphosphate carboxylase complex; Biological process=carbon utilization by fixation of carbon dioxide
  Homolog annotation: Hit_ID=B0B771; Match level="QueryCoverage=95%, HitCoverage=20%, E-value=1e-14, Identity=55%"; Hit description =Ribulose-1,5-bisphosphate carboxylase/oxygenase large subunit
GHRIEMVKRPVFASRLGVHSVRLGYFPGGFPVKAPLSHXSRVYGLCLTVFRAMRADIYSQKSLGMHCGVLATALCMSGVGHILSGTAVGEL

SEQ ID NO: 9508 - protein, 217 aa, Zea mays
  Coding DNA Sequence Number=SeqID_3269
  Gene Ontology: Mol. function=oxidoreductase activity; Cellular component=cytoplasm; Biological process=metabolic process
  Homolog annotation: Hit_ID=A8GHS0; Match level="QueryCoverage=100%, HitCoverage=63%, E-value=3e-67, Identity=57%"; Hit description =Alcohol dehydrogenase GroES domain protein
  Pfam annotation: Domain name=ADH_zinc_N; Domain location=41-177; Score=97.8; E_value=3.5e-26; Accession=PF00107.16; Description=Zinc -binding dehydrogenase
YAGAPAKNAHRLPASILDLFASLVEPFTIAANITAFLKPQPQDVALIYGAGPMGLTAIQVLKGVYGVQQVLVVDRLPERLALAQQNGADRLYNNSEIPLAAQLEGVQPTLIIDAACHPAILAEAAALASPAARIGLLGFSAEPCSLTQQALTSKELSLFTSRLNSNRFPQVIAWLEQGLIQPEKLVTHYFPLAQIERAMTLFEQDPRTCCKVILQMD

SEQ ID NO: 9509 - protein, 73 aa, Zea mays
  Coding DNA Sequence Number=SeqID_3270
  Subcellular localization annotation: CTP_CleavageSite=34; ConfidenceScore=5.62e-01
GEKQHGHPFIQPAAGAGASRPSRRQSRRRPRRARAQKAGRAGTRRYRRRSLCADAAVPYISRDARGILYSQPA

SEQ ID NO: 9510 - protein, 174 aa, Zea mays
  misc_feature (174)..(174): Xaa can be any naturally occurring amino acid
  Coding DNA Sequence Number=SeqID_3272
  Gene Ontology: Biological process=T cell differentiation in the thymus
  Homolog annotation: Hit_ID=Q7EZ54; Match level="QueryCoverage=70%, HitCoverage=23%, E-value=5e-43, Identity=59%"; Hit description =Putative uncharacterized protein OSJNBa0036M16.113
FLAPSSPAQFPEASRTGFPALIPQKDAFLRLVAWDGGMDSGGGEGGSTGGRFPILQANRDPESNWEVDVAKSLEQYLLKICSGEVSGEDESHSVNFAEAALLLQGSVQVYSRKVEYLYSLVLHAIEFLSHKKQDQQENVTAQSNQSDPSTIPSEDYIFMGLDDVLMETRTSLDX

SEQ ID NO: 9511 - protein, 247 aa, Zea mays
  Coding DNA Sequence Number=SeqID_3273
  Gene Ontology: Mol. function=catalytic activity; Biological process =metabolic process
  Homolog annotation: Hit_ID=A4JI94; Match level="QueryCoverage=57%, HitCoverage=47%, E-value=1e-63, Identity=85%"; Hit description=Enoyl- CoA hydratase/isomerase
MHGPAVGAGLVAGLLADISIAAKDARIIDGHTRLGVAAGDHAAIVWPLLCGMAKAKYYLLLCEPVSGEEAERIGLVSLAVEPADLLPKAYEVAQRLAHGSQTAIRWTKYALNNWLRSAGPAFDTSLALEFMGFSGPDVQEGIRRPHLPCRPLRPPVNQDARMTNDASGSNPFAGFAGFKPADMLDRMWDMMRMSPFGGMASFPGAASGLPPSLSSMSDMMATLTSVEELDKRITDLRAVEQWLKLNR

SEQ ID NO: 9512 - protein, 70 aa, Zea mays
  Coding DNA Sequence Number=SeqID_3274
  Gene Ontology: Mol. function=N-acetyltransferase activity; Biological process=metabolic process
  Homolog annotation: Hit_ID=Q337G6; Match level="QueryCoverage=98%, HitCoverage=38%, E-value=3e-20, Identity=73%"; Hit description =Acetyltransferase, GNAT family protein, expressed
  Pfam annotation: Domain name=Acetyltransf_1; Domain location=3-64; Score=34.0; E_value=5.3e-07; Accession=PF00583.14; Description =Acetyltransferase (GNAT) family
CNTSLWATITKVAVKENCRRQGHGEALLAGAMERFRRRKVQRLSLQVDPTRTASVALYRKAGFQVDTTVE

SEQ ID NO: 9513 - protein, 113 aa, Zea mays
  Coding DNA Sequence Number=SeqID_3275
  Homolog annotation: Hit_ID=Q13I31; Match level="QueryCoverage=100%, HitCoverage=60%, E-value=3e-48, Identity=75%"; Hit description =Putative uncharacterized protein
  Pfam annotation: Domain name=PagL; Domain location=1-113; Score=95.9; E_value=1.3e-25; Accession=PF00583.14; Description=Lipid A 3-O -deacylase (PagL)
HAAYWNVGESGAVHPDIWEFGLTPVFRIIKDTGWFRPFFEAGIGVRLLTHARQTADRTMSSSFQFADLVGVGAQFGAHQNYLVGVRFQHLSNAGLDQPNPGVNFSQIYVQYNF

SEQ ID NO: 9514 - protein, 333 aa, Zea mays
  Coding DNA Sequence Number=SeqID_3276
  Gene Ontology: Mol. function=cysteine-type endopeptidase activity; Cellular component=lysosome; Biological process=proteolysis
  Homolog annotation: Hit_ID=Q95VQ1; Match level="QueryCoverage=94%, HitCoverage=94%, E-value=1e-159, Identity=83%"; Hit description =Cysteine protease CP19
  Pfam annotation: Domain name=Inhibitor_I29; Domain location=28-88; Score=88.8; E_value=1.7e-23; Accession=PF08246.2; Description =Cathepsin propeptide inhibitor domain
  Pfam annotation: Domain name=Peptidase_C1; Domain location=116-332; Score=424.3; E_value=1.7e-124; Accession=PF00112.13; Description =Papain family cysteine protease
  Pfam module annotation: Pfam domain module=Inhibitor_I29::Peptidase _C1; Domain location=28-88::116-332
MKVLIVLAACVVAALAGVPSESEIKAHWESFKATHGKTYANAVEEAYRAKVFKENAIRISKHNDRFASGEVTFKVGYNQYADMHTHEVTEKMNGFRMEMKKPSAFVHSASNDSWPWSKKVDWRSKGYVTPIKDQGQCGSCWSFSATGSLEGQLFKKTGKLVALSEQNLVDCSWDYDNQGCNGGLMDSAFQYVQANGGIDTEESYPYTGEDGSACAYTSDNSGGVNTGYTDVKATENDLRDAVEKVGPVSVAIDASNWSFQMYSTGIYYEPACSSKSLDHGVLAVGFGSDWPNKEFWIVKNSWGTSWGEEGYIKMARNKKNNCGIATMASYPTV

SEQ ID NO: 9515 - protein, 119 aa, Zea mays
  Coding DNA Sequence Number=SeqID_3277
  Gene Ontology: Mol. function=carbon-nitrogen ligase activity, with glutamine as amido-N-donor; Cellular component=cytoplasm; Biological process=translation
  Homolog annotation: Hit_ID=A6T9D0; Match level="QueryCoverage=98%, HitCoverage=25%, E-value=1e-46, Identity=79%"; Hit description =Putative amidase
QQSGALLSGMLNMDAYAYGFTTENTHYGATRNPRDLSRVAGGSSGGSAAAVAAGLVHFSLGTDTNGSIRVPASLCGIFGLKPTFGRLSRSGSHPFVASLDHIGPFARSVEDLSLVYDAL

SEQ ID NO: 9516 - protein, 113 aa, Zea mays
  misc_feature (41)..(41): Xaa can be any naturally occurring amino acid
  misc_feature (92)..(92): Xaa can be any naturally occurring amino acid
  misc_feature (102)..(102): Xaa can be any naturally occurring amino acid
  Coding DNA Sequence Number=SeqID_3278
  Gene Ontology: Mol. function=repressor LexA activity; Biological process=negative regulation of transcription, DNA-dependent
  Homolog annotation: Hit_ID=Q07267; Match level="QueryCoverage=99%, HitCoverage=54%, E-value=4e-43, Identity=75%"; Hit description=LexA repressor
  Pfam annotation: Domain name=Peptidase_S24; Domain location=25-93; Score=60.0; E_value=8.2e-15; Accession=PF00717.13; Description =Peptidase family S24
VQEPIESHCKVDPQLFNPNADIIMRARGMSISDIGIMNGDXLAVHKTQYVQIGQVIVARIEDEVTVKRFKQTGNKIELIAENPEFKPIVVDXREQNFTIEGXAVGVIRNGDWF

SEQ ID NO: 9517 - protein, 194 aa, Zea mays
  Coding DNA Sequence Number=SeqID_3279
  Gene Ontology: Mol. function=diaminopimelate decarboxylase activity; Cellular component=chloroplast; Biological process=lysine biosynthetic process via diaminopimelate
  Homolog annotation: Hit_ID=A4WE18; Match level="QueryCoverage=99%, HitCoverage=46%, E-value=1e-84, Identity=81%"; Hit description =Diaminopimelate decarboxylase
  Pfam annotation: Domain name=Orn_DAP_Arg_deC; Domain location=54-171; Score=138.1; E_value=2.4e-38; Accession=PF00278.12; Description =Pyridoxal-dependent decarboxylase, C-terminal sheet domain
GRLSIPYRFGEEAIDTQHYYGLWNGARERIAAHLGHAVKLEIEPGRFLVAESGVLVSQVRAVKQMGSRHFVLVDAGFSDLMRPSMYGSYHHISLLPADGSAPGDAHVESVVAGPLCESGDVFTQLEGGKVETRALPAAQVGDYLVFHDTGAYGASMSSNYNSRPLIPEVLFEQGVPREIRRAQTIQELLALELN

SEQ ID NO: 9518 - protein, 115 aa, Zea mays
  Coding DNA Sequence Number=SeqID_3280
  Gene Ontology: Mol. function=sequence-specific DNA binding; Cellular component=intracellular; Biological process=regulation of transcription, DNA-dependent
  Homolog annotation: Hit_ID=Q1H3T0; Match level="QueryCoverage=100%, HitCoverage=33%, E-value=4e-39, Identity=69%"; Hit description =Transcriptional regulator, AraC family
  Pfam annotation: Domain name=HTH_AraC; Domain location=1-44; Score =12.1; E_value=0.11; Accession=PF00165.13; Description=Bacterial regulatory helix-turn-helix proteins, araC family
  Pfam annotation: Domain name=HTH_AraC; Domain location=50-94; Score =24.0; E_value=0.00054; Accession=PF00165.13; Description=Bacterial regulatory helix-turn-helix proteins, araC family
  Pfam module annotation: Pfam domain module=HTH_AraC::HTH_AraC; Domain location=1-44::50-94
  Subcellular localization annotation: CTP_CleavageSite=52; ConfidenceScore=5.18e-01
QRIHADWQQPLDVPHLASVSFMSVPRFHLHFKSVTQTSPIQYLKSLRLHQARLMMIRDNLTAAGAAARVGYESDSQFNREFKRMFGRTPADEARVMKRAFALLPPEQLSARLQAH

SEQ ID NO: 9519 - protein, 106 aa, Zea mays
  misc_feature (53)..(53): Xaa can be any naturally occurring amino acid
  misc_feature (71)..(71): Xaa can be any naturally occurring amino acid
  misc_feature (79)..(79): Xaa can be any naturally occurring amino acid
  Coding DNA Sequence Number=SeqID_3281
  Gene Ontology: Mol. function=protein kinase activity; Cellular component=mitochondrion; Biological process=protein amino acid phosphorylation
  Homolog annotation: Hit_ID=A2WP51; Match level="QueryCoverage=100%, HitCoverage=19%, E-value=1e-27, Identity=60%"; Hit description =Putative uncharacterized protein
  Pfam annotation: Domain name=ABC1; Domain location=27-105; Score=7.6; E_value=5.6e-06; Accession=PF03109.7; Description=ABC1 family
IPLKETSNIRYELLPALDIVCQGADVAKEGAKFSPSRLRSFDYEPLAAVSIGXVHRAALKDGSYVVVKMQXPGVADSIXSDVENVRLLLTYTNLIPKGIFLDRPMK

SEQ ID NO: 9520 - protein, 256 aa, Zea mays
  Coding DNA Sequence Number=SeqID_3282
  Gene Ontology: Mol. function=transferase activity, transferring phosphorus-containing groups; Cellular component=outer membrane -bounded periplasmic space; Biological process=two-component signal transduction system (phosphorelay)
  Homolog annotation: Hit_ID=Q1I798; Match level="QueryCoverage=97%, HitCoverage=20%, E-value=1e-40, Identity=37%"; Hit description =Sensor protein
  Pfam annotation: Domain name=PAS; Domain location=134-246; Score =39.2; E_value=1.5e-08; Accession=PF00989.14; Description=PAS domain
  Pfam annotation: Domain name=PAS_4; Domain location=140-251; Score =39.5; E_value=1.2e-08; Accession=PF08448.1; Description=PAS fold
  Pfam module annotation: Pfam domain module=PAS::PAS_4; Domain location=134-246::140-251
LLARKVDAVIVPKIFADYHLRNHFGSGLIVEGTLGADPARFVMRVEPGNETLVSILDKALLAIPPETLFKLMAQWRQAEPPFLSGSWQNYKQTILLIVSVSLGLILLILLWNHHLRKVIQQRMQAENALKNQLNFTHTLFNDSPVAMYIRDKQTRLVDCNNAYLRFLHIKRDEVIGKRLSDVFNTNNASIHTIEDGYQQTLLDGEAVMRDVQLMFGQQAFHLYHWTLPFRDRLGEVAGVIGGWVDVTERNALLQAC

SEQ ID NO: 9521 - protein, 148 aa, Zea mays
  Coding DNA Sequence Number=SeqID_3283
  Gene Ontology: Mol. function=translation elongation factor activity; Cellular component=cytoplasm; Biological process=selenocysteine incorporation
  Homolog annotation: Hit_ID=Q5PLQ3; Match level="QueryCoverage=89%, HitCoverage=21%, E-value=9e-17, Identity=31%"; Hit description =Selenocysteine-specific elongation factor
  Pfam annotation: Domain name=SelB-wing_2; Domain location=54-111; Score=60.3; E_value=6.4e-15; Accession=PF09106.1; Description =Elongation factor SelB, winged helix
QAHLACQNAAYDELGWARHLTAPALDALLLPLNPVRLGTSLMSDTMASAWQQRLREALSAFHQQHPELPGIVSDRLRRVALPHAPAPLVPGLIDQMLAQGELRQKQGWLHLPDFAPRFNPQEATLWQQVEPLFIDQPLWVRDIADALQ

SEQ ID NO: 9522 - protein, 108 aa, Zea mays
  Coding DNA Sequence Number=SeqID_3284
KSWGFAEGPQATGVNMREHKRSLLLQDQAGGRHPMFLHVSPGKQRGADRIVTLGVGGREPSGTVPRGEGAAMAVGGAAMSCKTSSMATTGPAIFFLPPLMNDYASGRI

SEQ ID NO: 9523 - protein, 123 aa, Zea mays
  Coding DNA Sequence Number=SeqID_3285
  Gene Ontology: Mol. function=transporter activity; Cellular component= integral to membrane; Biological process=transport
  Homolog annotation: Hit_ID=P33915; Match level="QueryCoverage=100%, HitCoverage=36%, E-value=8e-58, Identity=86%"; Hit description=Inner membrane ABC transporter permease protein yejE
  Pfam annotation: Domain name=BPD_transp_1; Domain location=2-123; Score=-1.8; E_value=0.009; Accession=PF00528.12; Description=Binding- protein-dependent transport s
QGYFGGRVDLIGQRLIEVWSGMPTLFMLILLSSVIQPNFWWLLLLTVIFGWMSLVSVVRAEFLRTRNFDYIRAARALGVSDSRIMLRHMLPNAMVATLTFLPFILCGSITTLTSLDFLGFGLP

SEQ ID NO: 9524 - protein, 307 aa, Zea mays
  misc_feature (21)..(21): Xaa can be any naturally occurring amino acid
  Coding DNA Sequence Number=SeqID_3286
  Gene Ontology: Mol. function=calcium ion binding; Cellular component =extracellular region; Biological process=pathogenesis
  Homolog annotation: Hit_ID=Q8XQP2; Match level="QueryCoverage=99%, HitCoverage=87%, E-value=6e-63, Identity=42%"; Hit description =Probable hemagglutinin/hemolysin-related protein
QVIDNVGASQGPLTSGATIYXYTPTLSGSGEAGALISIYDGSTLLGNTLVGANGSWSFTTPALSNGSHSLTVTQTDAAGNVSSATAEFVVNVDAALPPASASIELVGDSGNTLVSLQNGAVTNDDSPTLAGLTRAGSLVRIFDGGDLLGSTTADGNGQWSFALSNLSEGGHAFSATITDVDGNVIDTVTLNITVDTTPPAAASDLALLNDAGSTAQPVTGGSAINDATPLLSGTAEAGSIVTIRDGNTVLGSVSVGSNGSWSFTTPALGEGNHSLSTTVTDAAGNVSPASTPIAFSVDTTAPAAVSG

SEQ ID NO: 9525 - protein, 27 aa, Zea mays
  Coding DNA Sequence Number=SeqID_3287
MVGEEHSLKVEKVLFQGKPDYQNVMVF

SEQ ID NO: 9526 - protein, 84 aa, Zea mays
  Coding DNA Sequence Number=SeqID_3288
  Subcellular localization annotation: CTP_CleavageSite=28; ConfidenceScore=5.23e-01
ATFRHNSGAASLLRPAHPSKCCHPASHRAAAPPCRQLVGQHPCSGPLHPASTVHEPPCSVLSRLAPPRCWFLSRPRASSTTTVI

SEQ ID NO: 9527 - protein, 204 aa, Zea mays
  Coding DNA Sequence Number=SeqID_18
  Gene Ontology: Mol. function=protein dimerization activity; Cellular component=nucleus; Biological process=regulation of transcription, DNA-dependent
  Homolog annotation: Hit_ID=Q40627; Match level="QueryCoverage=99%, HitCoverage=98%, E-value=1e-36, Identity=49%"; Hit description=DNA -binding factor of bZIP class
  Pfam annotation: Domain name=bZIP_1; Domain location=127-190; Score =29.4; E_value=1.4e-05; Accession=PF00170.11; Description=bZIP transcription factor
  Pfam annotation: Domain name=bZIP_2; Domain location=127-182; Score =8.4; E_value=0.06; Accession=PF07716.5; Description=Basic region leucine zipper
  Pfam module annotation: Pfam domain module=bZIP_1::bZIP_2; Domain location=127-190::127-182
MPTDHGSSSDGGHQAQCRRRGASVDVELRAAMALADMAGAGAGAAADHALPAQRLRHAAAPAAQAAMEQEDEELASTRLSLELGNVGIQSSPCSSSSSGAGQQPPQSSAAVTGYGLSRPRHMLTEAEKEAKRLRRVLANRESARQTILRRQAIRDELARKVADLASQNENMKKEKDKVLEQYLTLKETNKQLKQQAHHLSLSFL

SEQ ID NO: 9528 - protein, 240 aa, Zea mays
  Coding DNA Sequence Number=SeqID_19
  Homolog annotation: Hit_ID=Q2RBF7; Match level="QueryCoverage=34%, HitCoverage=38%, E-value=1e-25, Identity=76%"; Hit description =Expressed protein
  Subcellular localization annotation: CTP_CleavageSite=57; ConfidenceScore=5.35e-01
MGRYIMRTGSMGLGSMRFTSPRITGHRQRSDRSSAAAELLRNMPSPPQHSLCGVGVSASLPVRNDAHVISPASGVTQSVGADGGEGDAPPKPPVPPTGMPGKPGCGFAAVHGGEMGAGGACAWDGGGVIGLPLGDGGVSLPADGGDSLERGKPLKPLGLRCLVPGYQSTWASARRAAAAASAGCSSAAAAAAATVTTTSKTKAVLHLDAAIATKYGCLLLSGKLECQEAQEQMLTGTIDV

SEQ ID NO: 9529 - protein, 90 aa, Zea mays
  Coding DNA Sequence Number=SeqID_20
RSLPASNMAKCLAVALLLLLVLAYCDGRELNQKDQALATARGAGAAGGGVGEEKILGLPDLPPVGTVTGTSTTNGPLVALPALPGIPAHP

SEQ ID NO: 9530 - protein, 126 aa, Zea mays
  Coding DNA Sequence Number=SeqID_21
  Subcellular localization annotation: CTP_CleavageSite=87; ConfidenceScore=5.58e-01
SWVLLASQAIASCQLASCAPQCGPWPPGRRWRPCSIGCSRRGTHGGSSPTGRRARSRRPRGPGTLRRGRRHPSRPGRRHRWWPPSPPCHEFARRPRRRGGRPTRGERRARREPWWTPLPIDLTRAS

SEQ ID NO: 9531 - protein, 150 aa, Zea mays
  Coding DNA Sequence Number=SeqID_23
  Subcellular localization annotation: CTP_CleavageSite=65; ConfidenceScore=5.31e-01
ISIKKPIKMARQFVTLALLALTVATVFAADAPSASPQKSPSPTTAPTKAPTTPTKAPAAAPKSTSASSPKASSPAAEGPAAEDDYSAASPSDSGEAPTDSAASPPAPTPDSTSADGPSEAEAPSSSAVTTVKLSVAGTIITAVSFLFFSL

SEQ ID NO: 9532 - protein, 123 aa, Zea mays
  Coding DNA Sequence Number=SeqID_25
TTTKQCRDDIYRTQKSSTIGVPITPGAVPKKTVCDGCGCDEEWQLNQTLCCHYTCKVCMGGSKRKRGRLLEKRLRERQQRNDKLKLVPFSFLISHFSFLCTIKLFELFHLVSISSMSISLSLF

SEQ ID NO: 9533 - protein, 135 aa, Zea mays
  Coding DNA Sequence Number=SeqID_27
  Subcellular localization annotation: CTP_CleavageSite=33; ConfidenceScore=5.43e-01
PPSSSSSSSSKPSSGLLVAMALRTVAAKLKAPVASLKQAWAVCRPQAKHPLEGLNVDPLTLQEMKALERAVRAGEMKQTLVTIGFMGGLTGAVAHLLHSDLAAREATAEAEAEAAVREVLDSLDSDVNAVGTNKD

SEQ ID NO: 9534 - protein, 457 aa, Zea mays
  Coding DNA Sequence Number=SeqID_29
  Homolog annotation: Hit_ID=A8LEB1; Match level="QueryCoverage=92%, HitCoverage=94%, E-value=1e-35, Identity=27%"; Hit description =Putative uncharacterized protein
MGSITPQEPQFLEVNVPKIIHLPETDSSKSIILEPYHVDLLPEYGYVSREYLIKGTAAGHPYCTRLLLRCPEDPSKFSGFAVEEPSHLWGGTSIWRHINRWLMRNGHAWLEVDSQAPSALEKLKLADPERYGRMEFMPAPLCSEFQKTIPFATDLTKEALRDSYAAFKTGWWPATQQSPEIITAASYALRSGSLGLKATRIVLSGLSQTGGLTRRFITHSAPYLRLPDGSIPFEGYIPCQSGGEVLPDVPGAKIIELLGEAEFQSVRLPCGISGQMKEVEHRRPDSDGFRVYEVAGMAHRESRWASPRELERWSVVDLRGAEWSTFANSFIYHAVFELVERWTGKLSVAPPPSMLLQTIDDTDEILRDEHGNALGGVRTVHSESPISRLFSTLLTLPLGSEWRFDNEKLKSLYGTTANYRRAAGLALQAQLAQGLLLPGDAETLRRETIEAVTITED

SEQ ID NO: 9535 - protein, 265 aa, Zea mays
  Coding DNA Sequence Number=SeqID_30
  Gene Ontology: Mol. function=metal ion binding; Biological process =metal ion transport
  Homolog annotation: Hit_ID=Q9ZRE9; Match level="QueryCoverage=18%, HitCoverage=27%, E-value=1e-18, Identity=80%"; Hit description=ATFP1
SLSLEVDSKLKPPSDFQISDLSSSFDAMAEKGKEKVTMMKLKVDLDCAKCYKKVKKVLCKFPQIRDQLFDEKSNIVIIKVVCCSPERIMDKLCSKGGGSIKTIEIVEPPKPPQPQPQQPPQKPKDAQPKAPEKPKEPEKPKQPEKPKEPEKPKQPEKPKEPEKPKQPAPAPAPAPAPAAKPAPVPAPAPAPAPKQPGPPPQVIPMMPQGQPAMCCGPYYDGYGGPAFNGYGMPPQPYECYGRPVYESWGGGCPPPPLVPPPPPII

SEQ ID NO: 9536 - protein, 138 aa, Zea mays
  misc_feature (138)..(138): Xaa can be any naturally occurring amino acid
  Coding DNA Sequence Number=SeqID_31
FWTTATARSSLRRLVRRLRAFVDSIMRTFGKNSQTGIDYESLMSLSQGSGLEAIRTMTDLSERVSIRSASSHGSVESPGRQRSSRKRRGESSRSSSTSSKASKASKSRPKLSKAPKATQEPHSGRGSMSRHHPKDTKX

SEQ ID NO: 9537 - protein, 96 aa, Zea mays
  Coding DNA Sequence Number=SeqID_33
  Gene Ontology: Mol. function=metal ion binding; Cellular component =integral to membrane
  Homolog annotation: Hit_ID=A2Y0Q2; Match level="QueryCoverage=97%, HitCoverage=36%, E-value=7e-38, Identity=80%"; Hit description =Putative uncharacterized protein
LSRKRLFGMMNDLPTVFEVVSSGVKQSKERDRSGTDNGGRNKLSVKQTSEPRLENNAREPDEGYDEDDSNHSETLCGTCGGIYSADEFWIGCDVCE

SEQ ID NO: 9538 - protein, 116 aa, Zea mays
  Coding DNA Sequence Number=SeqID_34
  Gene Ontology: Mol. function=metal ion binding
  Homolog annotation: Hit_ID=Q8LR61; Match level="QueryCoverage=100%, HitCoverage=25%, E-value=4e-60, Identity=94%"; Hit description =Putative WD repeat domain 45
VSSDKGTIHVFNLKINVGLTTNDKPLPAPDADVPHMSPSFSFIKGVLPKYFHSEWSVAQFRLHEGEQYIVAFGHEKNTVAVVGMDGSFYRCQFDPVNGGEMQQLECHNFLKPSDQP

SEQ ID NO: 9539 - protein, 377 aa, Zea mays
  Coding DNA Sequence Number=SeqID_324
  Gene Ontology: Mol. function=protein dimerization activity; Cellular component=nucleus; Biological process=regulation of transcription, DNA-dependent
  Homolog annotation: Hit_ID=Q10PC3; Match level="QueryCoverage=99%, HitCoverage=98%, E-value=1e-134, Identity=67%"; Hit description =Transcription factor HBP-1a, putative, expressed
  Pfam annotation: Domain name=MFMR; Domain location=1-197; Score =290.1; E_value=4.5e-84; Accession=PF07777.2; Description=G-box binding protein MFMR
  Pfam annotation: Domain name=bZIP_1; Domain location=296-359; Score =83.0; E_value=9.5e-22; Accession=PF00170.11; Description=bZIP transcription factor
  Pfam annotation: Domain name=bZIP_2; Domain location=296-350; Score =30.9; E_value=4.6e-06; Accession=PF07716.5; Description=Basic region leucine zipper
  Pfam module annotation: Pfam domain module=MFMR::bZIP_1::bZIP_2; Domain location=1-197::296-359::296-350
MGKGDVATRSKPQKSSAIQNEPSTPANPPTAYPDWSQFQAYYNAAGTGPVTPPAFFHSSVAPTHQGHPYMWGPQMMPPYGTPPPYATMYAQGTPYQQAPMPPGSYPYGPYPMPSPNGTIQPPTSGAGGTETDKSKNKRKTPLKRSKGSLGSLDVVAVKNNKSAAKPSVSSSNEGSSQSESGSGSSSEGSSTNSKSGSRAKDGSERGQGNDARSKGTRSSAVEPTQPSSGPVVLNPMMPFWPVPSPMAGPATTMNMGVDYWGTASVPMHGKVIAAPISAPSSNSRDIVLSDPAIQDERELKRQKRKQSNRESARRSRLRKQAEWEEVANRADLLKQENSSLKEELKQLQEKCDGLTSENTSLHEKLKALEDEKSNGNL

SEQ ID NO: 9540 - protein, 115 aa, Zea mays
  Coding DNA Sequence Number=SeqID_325
  Pfam annotation: Domain name=DUF1754; Domain location=33-110; Score= -25.7; E_value=0.003; Accession=PF08555.1; Description=Eukaryotic family of unknown function
RSSHGGGKQTLAARRRRSGSEYRAPQFTREMSEYKNVVGGRLKLKGKALDVKEGGVKKKKKKHQLEESSQIEHDELHKGGNSGLPADHNNELIEADASFFFFFLPSIFFPSLRII

SEQ ID NO: 9541 - protein, 255 aa, Zea mays
  misc_feature (66)..(66): Xaa can be any naturally occurring amino acid
  misc_feature (76)..(76): Xaa can be any naturally occurring amino acid
  Coding DNA Sequence Number=SeqID_326
  Subcellular localization annotation: CTP_CleavageSite=56; ConfidenceScore=5.54e-01
HGWCGCRRRRPCPSSHAPSAPLAAALRPSARWSGRSPPASPPAASPPPRARKPRPPASSGPRRPRXAQPQRHHGSXPPLPQPRPLPSIQNLTLEINISEMHISLKFIAHPRLRGPTELVVGFGILQGRQGRGWGRGGRQRRAMRRGGGRSDATPLEQEAVALMSLEETREATVSREAWEAASRRRRRWIRRRRRSSMEVGSKIWMSYAEVLASVAAAAASEASDGWEEEREEGEVRPREDAWSGGDHGACHMCAC

SEQ ID NO: 9542 - protein, 150 aa, Zea mays
  misc_feature (1)..(22): Xaa can be any naturally occurring amino acid
  Coding DNA Sequence Number=SeqID_327
  Subcellular localization annotation: CTP_CleavageSite=61; ConfidenceScore=5.17e-01
XXXXXXXXXXXXXXXXXXXXXXTMCAPTAAASPLDPQCTARSRPQPLTAATSNAPRTIATSTSSFWSRDPWSTPLEEPGSGLPGTVSSFRRLSRQRGVLRHRPMEQPTKQELYPCSCRGAVSTLYSICSVPAPARRPLRIRPPPRQHHVN

SEQ ID NO: 9543 - protein, 292 aa, Zea mays
  Coding DNA Sequence Number=SeqID_329
  Subcellular localization annotation: CTP_CleavageSite=68; ConfidenceScore=5.30e-01
SRTTQHNLPSSNVGTQQGDIALDYFQRGGPVSLSARATRSHGRPPALAPPLSPPPLFPPRRRWRRLPEAGADSKDAGFGAFLVRLVSPCSDLSGFCAGRFKVQPCRLLGRAPSPRRRLPRAVGGLCTTDQQPRRPVGSRAPSSMRGRGLWTGRSRPHGRRWWRRSGPLAVWARAGGGSFTLRVGGWQEDGEHTLPCGMLRLSGLLPAQRRGRAVDTRGWGALGRHHAVPVAFGGVVAVTQVGLSGWEDRELRAGGGGYLLWFCGCSRWWIDGICWWWRGCAVFGGGRATWWI

SEQ ID NO: 9544 - protein, 94 aa, Zea mays
  Coding DNA Sequence Number=SeqID_331
MDLMQRLYGTESCLVGWFLSGFSLIFSLALTDCFNSGFRYSQVWETGRRLQQQIRLQQPRLPANANVKFSLPNHLQGLLFFVLADFPQDFNPEQ

SEQ ID NO: 9545 - protein, 93 aa, Zea mays
  Coding DNA Sequence Number=SeqID_333
WREHCQGLAVLLRLQDGSAVEHGQPRKCLHRRLEILFRVRTCISFIPHRVRGKGTITPRVCWSAMAPLPALPASYTRGRRIVPANDLEKEGPD

SEQ ID NO: 9546 - protein, 175 aa, Zea mays
  Coding DNA Sequence Number=SeqID_335
  Gene Ontology: Mol. function=sugar:hydrogen symporter activity; Cellular component=integral to membrane; Biological process =carbohydrate transport
  Homolog annotation: Hit_ID=Q94EC4; Match level="QueryCoverage=85%, HitCoverage=29%, E-value=9e-55, Identity=72%"; Hit description =Putative monosaccharide transport protein
MAGGAFTEKGKQYPGKMTVFVFLACLVASSGGLIFGYDIGISGGVTSMDPFLKRFFPSVYAKEQEVVETNQYCKFDSVLLTLFTSSLYLAALVASLFAGYITKRCGRRVSMLGGGAIFLVGAVLNGLAQNVAMLIIGRIFLGIGVGFSNQPDAWICVAIYFWNRFSDRLAFLAGN

SEQ ID NO: 9547 - protein, 176 aa, Zea mays
  Coding DNA Sequence Number=SeqID_336
  Gene Ontology: Mol. function=metal ion binding
  Homolog annotation: Hit_ID=Q2QUC7; Match level="QueryCoverage=80%, HitCoverage=39%, E-value=6e-20, Identity=45%"; Hit description=Zinc finger, C3HC4 type family protein, expressed
MPRPRSPRHALRPIRRAPRPSPLAGWDEEFVLLAAMVVEDTPVRESRRKRRASTSSVGDSAGSSTRKRRSRRQSPAKIPPVVFALDDKKSDTAADGKSEVKASKEEEKPVLVGDKEASGSGEKAVAAANMPCMDRLREELSCAELHHNLIKIQRIPTLALASPHRRHRAEEAEAEA

SEQ ID NO: 9548 - protein, 172 aa, Zea mays
  misc_feature (127)..(127): Xaa can be any naturally occurring amino acid
  misc_feature (135)..(135): Xaa can be any naturally occurring amino acid
  misc_feature (144)..(144): Xaa can be any naturally occurring amino acid
  Coding DNA Sequence Number=SeqID_337
  Gene Ontology: Mol. function=oxidoreductase activity, acting on the CH-OH group of donors, NAD or NADP as acceptor; Cellular component =cytoplasm; Biological process=malate metabolic process
  Homolog annotation: Hit_ID=A2WUL9; Match level="QueryCoverage=44%, HitCoverage=20%, E-value=2e-20, Identity=55%"; Hit description=Malic enzyme
  Subcellular localization annotation: CTP_CleavageSite=43; ConfidenceScore=5.16e-01
MEAPTTCSTPGLTEHAMAEAARRAAGAPSRAASMPASHVPSARAAQPLRLRLARRCLPRCVCRRWTSYRGDLVVMRFGFGTGRHGEWILDSDTRCVLDLDDVATVAGGVEDTYGEDRATEEQLVTPXTVSVASGXTERERERHXYLCGLLPPAIVVALMDLEEGNEKLFYKH

SEQ ID NO: 9549 - protein, 115 aa, Zea mays
  Coding DNA Sequence Number=SeqID_338
  Subcellular localization annotation: CTP_CleavageSite=48; ConfidenceScore=5.27e-01
LLPVLCCSTPPRPKAQVASTTSLLRHFLRCPYYPPHRRCRCRVPTRIVADVVSDLCPCAKPLVVPCANAADQHLLCPRHDVPTLMVSACSSSTWSIPWRDTKFFSHCTRPATVPR

SEQ ID NO: 9550 - protein, 78 aa, Zea mays
  Coding DNA Sequence Number=SeqID_340
IAFTISGMTCPFPVYSSFFLHASHAYQTARWSIPFLYDLICQLDALSMHLSRSCSRCKGEGILSSMHGTLSCHLDRAT

SEQ ID NO: 9551 - protein, 166 aa, Zea mays
  misc_feature (64)..(64): Xaa can be any naturally occurring amino acid
  Coding DNA Sequence Number=SeqID_3290
  Gene Ontology: Mol. function=transferase activity, transferring pentosyl groups; Cellular component=cytoplasm; Biological process =amino acid biosynthetic process
  Homolog annotation: Hit_ID=Q7N6I3; Match level="QueryCoverage=95%, HitCoverage=81%, E-value=1e-51, Identity=63%"; Hit description =Imidazole glycerol phosphate synthase subunit hisH
  Pfam annotation: Domain name=GATase; Domain location=1-166; Score =35.7; E_value=2e-08; Accession=PF00117.18; Description=Glutamine amidotransferase class-I
LDADVAKQAEKSLLPGVCTSATATAQLHQRELIPVITSLTQPVVGIRLGMQLLAESSQESGDIXLLKLISAPVKKMATCGLPLPHMGWNKANFPSDHPLFHGIENNAYFYFVHSCALPVGEYTIAQTDYGGSLSSAISKHNFFGVQFHPERSGAAREQLLKNFLEM

SEQ ID NO: 9552 - protein, 150 aa, Zea mays
  Coding DNA Sequence Number=SeqID_3291
  Gene Ontology: Mol. function=lyase activity; Biological process =nucleotide biosynthetic process
  Homolog annotation: Hit_ID=A1JN87; Match level="QueryCoverage=58%, HitCoverage=25%, E-value=6e-36, Identity=80%"; Hit description =Putative exported protein precursor
  Pfam annotation: Domain name=ADC_lyase; Domain location=1-82; Score= -114.8; E_value=2.7e-05; Accession=PF02618.6; Description =Aminodeoxychorismate lyase
MGDSYTGTLTRKDLETPTGYNTYTISGLPPGPIAMPGRASLEAAAHPEKTNYLYFVADGKGGHTFTTNLASHNKAVQVYRLAMKEKNENKFIVIEGLEGAGKTTAREAVVAVLHEQGIEDVVFTREPGGTPLAEQLRVLVKQGIDGEQVK

SEQ ID NO: 9553 - protein, 153 aa, Zea mays
  Coding DNA Sequence Number=SeqID_3292
  Subcellular localization annotation: CTP_CleavageSite=59; ConfidenceScore=5.79e-01
ISGLTRSIIGGRPLFFFFFFFFFFFFFFFFFFFFFFFFFFFFFFFFEQTSKCFYPREKQASQATNNSAGEHPSTTRLPIPVVFLPRPRTCQLSSRPRLLRRSLRSPILNAPPSLSCPRLACAESSNFGAAMVRSGAEDGGQGERGWRLGAWRR

SEQ ID NO: 9554 - protein, 114 aa, Zea mays
  misc_feature (18)..(18): Xaa can be any naturally occurring amino acid
  Coding DNA Sequence Number=SeqID_3294
  Gene Ontology: Mol. function=protein serine/threonine kinase activity; Biological process=protein amino acid phosphorylation
  Homolog annotation: Hit_ID=A3BBA6; Match level="QueryCoverage=73%, HitCoverage=11%, E-value=5e-12, Identity=50%"; Hit description =Putative uncharacterized protein
LLELVWRLHGAGRLLEAXVDPRLAAGGYGYDGEEAERLLLLGLACSHPNPRQRPKAQAILQNLQTRSVPPLPVPMSKPVFMWPAPLADGEGEEEEEDATHASFMSVQGGHTAWA

SEQ ID NO: 9555 - protein, 87 aa, Zea mays
  misc_feature (25)..(25): Xaa can be any naturally occurring amino acid
  misc_feature (38)..(38): Xaa can be any naturally occurring amino acid
  Coding DNA Sequence Number=SeqID_3295
  Gene Ontology: Mol. function=protein serine/threonine kinase activity; Cellular component=cell surface; Biological process =protein amino acid phosphorylation
  Homolog annotation: Hit_ID=A2YK93; Match level="QueryCoverage=97%, HitCoverage=12%, E-value=1e-15, Identity=51%"; Hit description =Putative uncharacterized protein
TNILNCAKGFQVIKGMTFALLYLHXKGNMVVVFRDSKXEDVLFHHDRNGRLVHYDLGSLINLGPDPQTTHMVVAMGYLTIELVPTDK

SEQ ID NO: 9556 - protein, 253 aa, Zea mays
  Coding DNA Sequence Number=SeqID_3296
  Homolog annotation: Hit_ID=UPI00005F7F94; Match level="QueryCoverage =99%, HitCoverage=25%, E-value=2e-88, Identity=61%"; Hit description =COG4457: Uncharacterized protein conserved in bacteria, putative virulence factor
  Pfam annotation: Domain name=SrfB; Domain location=1-253; Score= -625.7; E_value=3.6e-06; Accession=PF07520.2; Description=Virulence factor SrfB
QHRMAIIPALRAMCEVVSLYQCDVLLLTGRPSRFPGIQALVRHLQPLPGSRILSLEGYHTSDWYPFNKQGRIDNPKSTAAVGAMLCLLALDLRLSSFWFRAGDFEPYSTIRYLGVLDENATLSDDNLCYSEIDLDSHSFALDRKSSFRIRGNVCLGFRQLENDRWPATPLYSLSITDPQLARQVAGESVLRIRLAVQPGPDNLGPERLVLSEARMDDGTRVPLEQLSLKLNTLSATGNANAQYWIDSGSVCKR

SEQ ID NO: 9557 - protein, 289 aa, Zea mays
  Coding DNA Sequence Number=SeqID_3297
  Gene Ontology: Mol. function=transcription factor activity; Cellular component=cytoplasm; Biological process=regulation of transcription, DNA-dependent
  Homolog annotation: Hit_ID=A0KBR1; Match level="QueryCoverage=100%, HitCoverage=94%, E-value=1e-159, Identity=93%"; Hit description =Transcriptional regulator, LysR family
  Pfam annotation: Domain name=HTH_1; Domain location=2-56; Score=59.7; E_value=1e-14; Accession=PF00126.17; Description=Bacterial regulatory helix-turn-helix protein, lysR family
  Pfam annotation: Domain name=LysR_substrate; Domain location=81-286; Score=76.0; E_value=1.2e-19; Accession=PF03466.10; Description=LysR substrate binding domain
  Pfam module annotation: Pfam domain module=HTH_1::LysR_substrate; Domain location=2-56::81-286
QLFDLLYEVRSVTRVAEQLGQSQPTISIWLRRLREHLHDPLFIRTPGGMAPTPQADALIGPCREILESLRRFAAWEIAFDPATAQRRFRICMTDASHITLLPRLLAHVRAQAPGVRLEAARIDGNTERSLESGEADLAIGYVPWLGGGIYQQKLYDQDWVCLANRHHPRIRGRLGPKQYRSEGHVAITAGTGAQLLEQALRQARIERDVVLELPGFLGLGAIIQSTDLITTLPRHIGETLAQASDLAVHACPIAVDGFAVRQHWHARYHHEAGNRWLRGLVIQLFGASH

SEQ ID NO: 9558 - protein, 220 aa, Zea mays
  Coding DNA Sequence Number=SeqID_3298
  Gene Ontology: Mol. function=transporter activity; Cellular component= integral to membrane; Biological process=transport
  Homolog annotation: Hit_ID=A8GKE0; Match level="QueryCoverage=98%, HitCoverage=77%, E-value=7e-76, Identity=64%"; Hit description =Binding-protein-dependent transport systems inner membrane component precursor
  Pfam annotation: Domain name=BPD_transp_1; Domain location=3-214; Score=3.5; E_value=0.0049; Accession=PF00528.12; Description=Binding- protein-dependent transport s
  Subcellular localization annotation: CTP_CleavageSite=49; ConfidenceScore=5.38e-01
MDISLWSSVYGLLIALFAGYSLHKLGTGRFQRFLLSFTNMTSNFAGVPLAFAFVILLGLNGCLTLLLRHYGWLDSFKLFSRDGMVLVYTWFQIPLGILLLYPAFDGLRKDWEESAALLGASRWRYWWHIGLPILFPALLGTFVILLANALGAYATIYALTTGNFNVVPVRIAALVSGDISLDPNTGGALAMLLVLIMALITVVQQYLVRRSYLHARVQES

SEQ ID NO: 9559 - protein, 92 aa, Zea mays
  misc_feature (12)..(12): Xaa can be any naturally occurring amino acid
  misc_feature (29)..(29): Xaa can be any naturally occurring amino acid
  misc_feature (62)..(62): Xaa can be any naturally occurring amino acid
  Coding DNA Sequence Number=SeqID_3299
  Gene Ontology: Mol. function=transferase activity, transferring phosphorus-containing groups; Cellular component=membrane; Biological process=two-component signal transduction system (phosphorelay)
  Homolog annotation: Hit_ID=Q2ACC1; Match level="QueryCoverage=98%, HitCoverage=10%, E-value=2e-31, Identity=70%"; Hit description =Histidine kinase
AAALKKYGANVXCVESGKDAISLLQPSHXFDACLMDVQMPEMDGYANEERKNKLALTEGSTXHHLHVLAMTTDVIRATYEEWIKSGMGGFVF

SEQ ID NO: 9560 - protein, 118 aa, Zea mays
  misc_feature (16)..(16): Xaa can be any naturally occurring amino acid
  Coding DNA Sequence Number=SeqID_3300
  Homolog annotation: Hit_ID=A6T740; Match level="QueryCoverage=97%, HitCoverage=63%, E-value=1e-46, Identity=73%"; Hit description =Putative uncharacterized protein ycbW
  Pfam annotation: Domain name=DUF1379; Domain location=1-118; Score =134.3; E_value=3.6e-37; Accession=PF07126.2; Description=Protein of unknown function (DUF1379)
MKIKPDDNWRWYFDAXHDRMMLDLADGMLFRSRFSRKMLTPDAFNDSGFCVDDAALYFTFEERCRQSGLKSDQRAELVLNALVASRLLKPLLPKSWHFTSHAHSWQPRAGDMVAVTAG

SEQ ID NO: 9561 - protein, 70 aa, Zea mays
  Coding DNA Sequence Number=SeqID_3301
  Gene Ontology: Mol. function=RNA binding; Cellular component=cytosol
  Homolog annotation: Hit_ID=A2XDF4; Match level="QueryCoverage=97%, HitCoverage=9%, E-value=2e-18, Identity=66%"; Hit description =Putative uncharacterized protein
  Pfam annotation: Domain name=PUF; Domain location=1-31; Score=16.7; E_ value=0.09; Accession=PF00806.9; Description=Pumilio-family RNA binding repeat
  Pfam annotation: Domain name=PUF; Domain location=33-66; Score=2.7; E_ value=6; Accession=PF00806.9; Description=Pumilio-family RNA binding repeat
  Pfam module annotation: Pfam domain module=PUF::PUF; Domain location =1-31::33-66
LIAVSLNTHGTRVVQKLIEKVSSREQIMLIISALQPSFMLLVNDHNGHHVIQRCMVNFGVEDNKVHNDSY

SEQ ID NO: 9562 - protein, 149 aa, Zea mays
  Coding DNA Sequence Number=SeqID_3302
  Gene Ontology: Mol. function=fumarate hydratase activity; Cellular component=tricarboxylic acid cycle enzyme complex; Biological process=fumarate metabolic process
  Homolog annotation: Hit_ID=A2VRU7; Match level="QueryCoverage=100%, HitCoverage=31%, E-value=3e-53, Identity=73%"; Hit description =Fumarate hydratase, class II
  Pfam annotation: Domain name=Lyase_1; Domain location=2-149; Score= -44.9; E_value=8.8e-08; Accession=PF00206.10; Description=Lyase
TPELTHALVIVKRWPCSSNQWLGELYRNLARAIIDAADEIIVGKHPREFPLAVWQTGSGTQTNMNLNEVIANRASELLGGERGEARKVHPNDDVNRGQSSNDVFPTAMHVAAAYAIVNHLLPALRTLRATLDAKSKAFADIVKIGRTHL

SEQ ID NO: 9563 - protein, 81 aa, Zea mays
  misc_feature (35)..(35): Xaa can be any naturally occurring amino acid
  Coding DNA Sequence Number=SeqID_3303
  Gene Ontology: Cellular component=cytoplasm; Biological process=rRNA processing
  Homolog annotation: Hit_ID=A7ZS64; Match level="QueryCoverage=100%, HitCoverage=60%, E-value=3e-21, Identity=62%"; Hit description =Ribosome-binding factor A
  Pfam annotation: Domain name=RBFA; Domain location=1-82; Score=30.4; E_value=3.6e-07; Accession=PF02033.8; Description=Ribosome-binding factor A
DPRLGMMVIVSGVEVSRDLAYAEAILTLLNDQDEXTDKNGLLTLKEARDYIRILLRKAIRVPMTPELTFFYDNSVIEGMPM

SEQ ID NO: 9564 - protein, 126 aa, Zea mays
  Coding DNA Sequence Number=SeqID_3304
SGARSGRWSWSLESWSSSSTPPTQDAGTLGKLELLACCCLLDRKLHGTDRKGLGRAHAVAVRPLAHAGAVRRPRSSSPPWSLPSRAHAGRREQWTAGRRASSGVQADDGGRRGGELRQAAADQCKS

SEQ ID NO: 9565 - protein, 320 aa, Zea mays
  misc_feature (260)..(260): Xaa can be any naturally occurring amino acid
  Coding DNA Sequence Number=SeqID_3306
  Gene Ontology: Mol. function=transporter activity; Cellular component= integral to membrane; Biological process=transport
  Homolog annotation: Hit_ID=A7MEZ7; Match level="QueryCoverage=99%, HitCoverage=60%, E-value=1e-142, Identity=76%"; Hit description =Putative uncharacterized protein
  Pfam annotation: Domain name=MFS_1; Domain location=1-285; Score= -15.1; E_value=0.06; Accession=PF07690.6; Description=Major Facilitator Superfamily
PEDRGKAFGLSSIAIIVAPVIGPTLGGWITDNYSWRWVFFINIPVGILTVLAIYQLLEDPPWERKWAKGRLKIDYIGISLITLGLGCLQVFLDRGEDEDWFASHFIRLFAMLAAVGIVGAVYWLLYARKPVVDITVMKDRNFWVAGLLMAGMAMILYGSSVVLPQLAQQDLGYTATWSGLVLSPGAVLIVLTIPLVLKLMPIVQTRYIIAFGFTCLALAFFYSSTLTPNVDFTTLVLMRSAQSIGLGFLFVPLTTIAFDXVPQRLNADASALFTMFRNVAGSIGISLATAGITEREQVRSAHMVGYMSPLNEQFNLTLQV

SEQ ID NO: 9566 - protein, 233 aa, Zea mays
  Coding DNA Sequence Number=SeqID_3307
  Gene Ontology: Mol. function=pyridoxal phosphate binding; Cellular component=mitochondrion; Biological process=amino acid metabolic process
  Homolog annotation: Hit_ID=Q6CYX7; Match level="QueryCoverage=100%, HitCoverage=52%, E-value=1e-117, Identity=88%"; Hit description =Putative aminotransferase
  Pfam annotation: Domain name=Aminotran_3; Domain location=42-232; Score=-131.4; E_value=2e-06; Accession=PF00202.11; Description =Aminotransferase class-III
MDTNSFRAEHADALDPATRTLTDKRSKVLGESYRLFYRKPVHLVRGEGQYLWDAAGNKYLDVYNNVASIGHCHPAVIEAVNQQMKMLNTHTRYLHERILDYSEALLATTPEAIDRAMYMCTGSEANDLAIRVARAWSGGTGIIVSQEAYHGTSDLTSGASPALGSGQPLAPTTRLVPPPDAYRVDAPDLGAWFADQIQQQIDDMKAHGIKFAGFLADSIFSSDGVLPNPRGFL

SEQ ID NO: 9567 - protein, 99 aa, Zea mays
  Coding DNA Sequence Number=SeqID_3308
  Gene Ontology: Mol. function=hydrolase activity, acting on glycosyl bonds; Cellular component=extracellular region; Biological process =cell wall catabolic process
  Homolog annotation: Hit_ID=O80423; Match level="QueryCoverage=68%, HitCoverage=26%, E-value=2e-23, Identity=75%"; Hit description =Chitinase
  Pfam annotation: Domain name=Glyco_hydro_19; Domain location=32-100; Score=-64.6; E_value=0.00017; Accession=PF00182.9; Description =Chitinase class I
YVHGEGFALVACAAAAAALLLLGVAAADVASIITQDVYNQMLPNRDNTQCPANGFYTYDAFIQAANFFPGFGTGSSTDELNKRELAAFFGQASHETTGQ

SEQ ID NO: 9568 - protein, 73 aa, Zea mays
  misc_feature (38)..(38): Xaa can be any naturally occurring amino acid
  misc_feature (42)..(42): Xaa can be any naturally occurring amino acid
  Coding DNA Sequence Number=SeqID_3309
  Gene Ontology: Mol. function=NADH dehydrogenase (ubiquinone) activity; Cellular component=mitochondrial respiratory chain; Biological process=ATP synthesis coupled electron transport
  Homolog annotation: Hit_ID=P29388; Match level="QueryCoverage=100%, HitCoverage=10%, E-value=2e-09, Identity=49%"; Hit description=NADH -ubiquinone oxidoreductase chain 5
MYLNIMSTPMVCSTLYGILGWFGGCDGHEIMATTCVSXNRSXSLIACYIVAHAGSASDLRNVPWICSRMIEAS

SEQ ID NO: 9569 - protein, 85 aa, Zea mays
  Coding DNA Sequence Number=SeqID_3310
  Gene Ontology: Mol. function=tRNA-pseudouridine synthase activity; Biological process=tRNA pseudouridine synthesis
  Homolog annotation: Hit_ID=A6TEI5; Match level="QueryCoverage=100%, HitCoverage=27%, E-value=4e-23, Identity=65%"; Hit description=tRNA pseudouridine synthase B
MNRATYRDRDCQCVFLLDKHQGASSNDVLLKAKHLVNADKEGHTGALDSVASAMLAICIGETTKFSRYLLDSYKRYRTIALLGQR

SEQ ID NO: 9570 - protein, 146 aa, Zea mays
  Coding DNA Sequence Number=SeqID_3311
  Gene Ontology: Mol. function=microtubule motor activity; Cellular component=microtubule associated complex; Biological process =microtubule-based movement
  Homolog annotation: Hit_ID=A3C0U6; Match level="QueryCoverage=86%, HitCoverage=15%, E-value=6e-58, Identity=88%"; Hit description =Putative uncharacterized protein
  Pfam annotation: Domain name=Kinesin; Domain location=1-87; Score= -127.6; E_value=8.2e-07; Accession=PF00225.13; Description=Kinesin motor domain
SRYPGVRLKEGSHINRSLLTLGKVIRQLSKGRNGHIPYRDSKLTRILQSSLGGNARTAIICTMSPAHSHIEQSRNTLLFANCAKNVVTDAKVNVVMSDKVLLKHLQREIARLENELKFPRPTSCSNYADLYSLFIFNKECCPSYEK

SEQ ID NO: 9571 - protein, 68 aa, Zea mays
  Coding DNA Sequence Number=SeqID_3312
  Gene Ontology: Mol. function=nucleic acid binding
  Homolog annotation: Hit_ID=Q69UJ1; Match level="QueryCoverage=51%, HitCoverage=11%, E-value=1e-08, Identity=80%"; Hit description =Putative RNA-binding protein RBP37
QKKGGAGGGFSGHGHPARRRTNSRTSMAQRDEIIRRTVYVSDIDHQVPDPFLCALFCFAFCVLGCLCC

SEQ ID NO: 9572 - protein, 108 aa, Zea mays
  Coding DNA Sequence Number=SeqID_3313
  Gene Ontology: Mol. function=citrate transmembrane transporter activity; Cellular component=integral to membrane; Biological process=citrate transport
  Homolog annotation: Hit_ID=Q5PG16; Match level="QueryCoverage=99%, HitCoverage=28%, E-value=3e-34, Identity=68%"; Hit description =Putative membrane protein
SSLVDLQPHFAAIGQLGEGGIYLLAIGLSQVISNVPATILLLQKVPPSEVLAWAVNIGGFGLLPGSLANLIALRMAQDAKVWWRFHLFSLPMLAWSMLCGWLLLQLLR

SEQ ID NO: 9573 - protein, 225 aa, Zea mays
  misc_feature (33)..(33): Xaa can be any naturally occurring amino acid
  Coding DNA Sequence Number=SeqID_3314
  Gene Ontology: Mol. function=electron carrier activity; Cellular component=endoplasmic reticulum membrane; Biological process =electron transport
  Homolog annotation: Hit_ID=Q8VX49; Match level="QueryCoverage=97%, HitCoverage=31%, E-value=1e-101, Identity=79%"; Hit description =Cytochrome P450 reductase
  Pfam annotation: Domain name=NAD_binding_1; Domain location=78-190; Score=113.7; E_value=5.7e-31; Accession=PF00175.11; Description =Oxidoreductase NAD-binding domain
  Subcellular localization annotation: CTP_CleavageSite=20; ConfidenceScore=5.09e-01
SRPAGISSSPSMAPTRTHVTCALVHETTPAGRXHKGVCSTWIKNAVPSEGSEDCSSWAPIFVRKSNFKLPADPSVPIIMIGPGTGLAPFRGFLQERLAWKESGAELGRSVFFFGCRNSKMDFIYEDELSNFLEQGALFELVLAFSRQGPTKEYVQHKMAQKASEIWDMISQGAYIYVCGDAKGMARDVHRVLHTIVQEQGSPDSSKAESFVKNLPMEGRYLGDVW

SEQ ID NO: 9574 - protein, 190 aa, Zea mays
  Coding DNA Sequence Number=SeqID_3315
  Gene Ontology: Mol. function=cytochrome-c oxidase activity; Cellular component=mitochondrial respiratory chain; Biological process =electron transport
  Homolog annotation: Hit_ID=A0TJN7; Match level="QueryCoverage=100%, HitCoverage=35%, E-value=1e-106, Identity=96%"; Hit description =Cytochrome c oxidase, subunit II precursor
  Pfam annotation: Domain name=COX2; Domain location=1-75; Score=81.1; E_value=3.6e-21; Accession=PF00116.11; Description=Cytochrome C oxidase subunit II, periplasmic domain
  Pfam annotation: Domain name=Cytochrom_C; Domain location=108-182; Score=27.5; E_value=5e-05; Accession=PF00034.11; Description =Cytochrome c
  Pfam module annotation: Pfam domain module=COX2::Cytochrom_C; Domain location=1-75::108-182
NPLVVPVNKKIRIITTANDVVHSWYVPAFGVKQDAIPGFVRDTWFKADKVGTFRGFCTELCGKEHAFMPVVVEVLSEDDYAKWVTAQKAKLASAAVDPNKVYTMAELVAHGEEVYKANCAACHQVNGKGLGAFPAMDGSPIVNGPIAGHVERVLHGKGAMPSWASLSDLDIASVITYERNSWGNHKNDLL

SEQ ID NO: 9575 - protein, 182 aa, Zea mays
  Coding DNA Sequence Number=SeqID_3316
  Gene Ontology: Mol. function=nucleic acid binding; Cellular component= nucleus; Biological process=protein amino acid phosphorylation
  Homolog annotation: Hit_ID=A7PP85; Match level="QueryCoverage=85%, HitCoverage=27%, E-value=3e-50, Identity=60%"; Hit description =Chromosome chr8 scaffold_23, whole genome shotgun sequence
  Pfam annotation: Domain name=PPR; Domain location=20-54; Score=22.9; E_value=0.0012; Accession=PF01535.11; Description=PPR repeat
  Pfam annotation: Domain name=PPR; Domain location=56-89; Score=8.5; E_ value=0.77; Accession=PF01535.11; Description=PPR repeat
  Pfam module annotation: Pfam domain module=PPR::PPR; Domain location =20-54::56-89
DKAVKLFSRMLLEGLTPDNAVFTIVLTACCHAGLVEEGKKFFDIMKNVYLMVPSGEHYACLVNLLGRCGMLEDAYWLIMSMPGKPHPGAWGALLGGCKLHCNIKLGKIAAKKLFEIEPDNAGNYVSLSNMYANIDRWGDVSEVRAEMTGKRITKIAGRTLVLQRSSVDQNGVFILYHVTGPH

SEQ ID NO: 9576 - protein, 75 aa, Zea mays
  misc_feature (60)..(60): Xaa can be any naturally occurring amino acid
  Coding DNA Sequence Number=SeqID_3317
  Gene Ontology: Mol. function=G-protein coupled photoreceptor activity; Cellular component=membrane; Biological process=regulation of transcription, DNA-dependent
  Homolog annotation: Hit_ID=P93528; Match level="QueryCoverage=98%, HitCoverage=6%, E-value=6e-13, Identity=55%"; Hit description =Phytochrome C
TGKEEQNMENKQKTYHEQECNGPEIMKENSSRKQDLTEKDIEERYETQKKTKQKTIMEKXTRKQRDNVAIKKNPT

SEQ ID NO: 9577 - protein, 289 aa, Zea mays
  Coding DNA Sequence Number=SeqID_3318
  Gene Ontology: Mol. function=hydrolase activity, acting on acid anhydrides, catalyzing transmembrane movement of substances; Cellular component=integral to membrane; Biological process=calcium ion transport
  Homolog annotation: Hit_ID=Q7XEK4; Match level="QueryCoverage=100%, HitCoverage=27%, E-value=1e-119, Identity=75%"; Hit description =Calcium-transporting ATPase 13, plasma membrane-type, putative, expressed
AIEACTKAGVAVKMVTGDNVLTARAIAKECGIISNSDHDAIVIEGQEFRAMSPEEQLEIVDRIRVMARSLPMDKLVLVQRLKQKGHVVAVTGDGTNDAPALKEADVGLSMGIQGTEVAKESSDIVIMNDNFDTVVTATRWGRCVFNNIQKFIQFQLTVNVAALIINFVSAMTSGKMPLTTVQLLWVNLIMDTLGALALATEPPNDAMMRRPPVGRGDNFITKVMWRNIVGQSIYQLVVLGVLIFKGKSLLRLNGGGDLSDAQLNTFLFNTFVFCQVFNEVNSREMEKIN

SEQ ID NO: 9578 - protein, 150 aa, Zea mays
  misc_feature (84)..(84): Xaa can be any naturally occurring amino acid
  Coding DNA Sequence Number=SeqID_3319
  Gene Ontology: Mol. function=hydrolase activity, acting on glycosyl bonds; Cellular component=beta-galactosidase complex; Biological process=carbohydrate metabolic process
  Homolog annotation: Hit_ID=Q8X213; Match level="QueryCoverage=100%, HitCoverage=15%, E-value=2e-58, Identity=69%"; Hit description=Beta -galactosidase
  Pfam annotation: Domain name=Glyco_hydro_35; Domain location=1-150; Score=-160.1; E_value=7.2e-05; Accession=PF01301.10; Description =Glycosyl hydrolases family 35
AAIIAKNQITNGGPIILYQPENEYTEWTNGASFDPQYMQDIMNSARNAGVVIPFINNDAAPDGHDAPGSGVGAVDIYGHDSYPXDPSSWPSGGLPTYFHQLHEEQSPSTPYSLVEFQGGSFDPWGGTGYEKCTALVNEQFENVFYKNNLA

SEQ ID NO: 9579 - protein, 347 aa, Zea mays
  Coding DNA Sequence Number=SeqID_3320
  Gene Ontology: Mol. function=acyltransferase activity; Cellular component=integral to membrane; Biological process=metabolic process
  Homolog annotation: Hit_ID=Q2QNJ7; Match level="QueryCoverage=97%, HitCoverage=60%, E-value=2e-68, Identity=49%"; Hit description =Acyltransferase family protein
  Subcellular localization annotation: CTP_CleavageSite=46; ConfidenceScore=5.34e-01
MAWKMLPAASELFPAIVRAGTATPPRPQPPAARNSPSPTVHRHAPPAARLGSAGTVLVVDVDGALLLSRSLFPYFMLVALEAGSFLRGLVLLLLYPAIRCCYCCLGGGDLAVRAMAAVAFCGLRARTFRAGRAVLPRWLLEDVAAEALEAARRVGDPARVVWASAMPRVMVEPFLREYLQVPAAAAVAAREMKTAWGFYTGLMEGGGEDCEATMALMTKRTSAGEGAGDVVGFSAARSVAFLSSSPLASTCKVEVYVVCPEEKSKWRRLARRDYPTPLVFHDGRLAFLPTPLNTVAMFTWLPLGAALAILRLAVALALPYKVATALLAATGQSWRLRGSLPPPGNSG

SEQ ID NO: 9580 - protein, 147 aa, Zea mays
  Coding DNA Sequence Number=SeqID_3321
  Gene Ontology: Mol. function=motor activity; Cellular component=cell outer membrane; Biological process=ciliary or flagellar motility
  Homolog annotation: Hit_ID=A7MQ10; Match level="QueryCoverage=100%, HitCoverage=35%, E-value=1e-55, Identity=72%"; Hit description =Putative uncharacterized protein
NVLVAAANPLINAIPQIRHSVSHDDPARLRQQLIDQIRRFELSCQQSGLSYEVIVGARYCLCTALDEAAALTPWGSRGVWTSNGLLVTFHNETWGGEKFFQLLAKLSQNPRQHILLLELIYFCLLLGFEGRNRVLDNGRSQLETIKQ

SEQ ID NO: 9581 - protein, 148 aa, Zea mays
  Coding DNA Sequence Number=SeqID_3322
MRLTLRARLAAIVSLLCLLLIIAAVWGIIGLRAADQRAQNAYQNELLPLQYSSRLYRMVQEQSATLFDALRYWTDSSEVEKRLARITQYGQQITADRHTWQQLAFDAQTKPLSQRFLTHLDGWQGALHEAGELLKGGNPSAALVVIEN

SEQ ID NO: 9582 - protein, 268 aa, Zea mays
  misc_feature (106)..(106): Xaa can be any naturally occurring amino acid
  misc_feature (222)..(222): Xaa can be any naturally occurring amino acid
  misc_feature (256)..(256): Xaa can be any naturally occurring amino acid
  misc_feature (258)..(258): Xaa can be any naturally occurring amino acid
  Coding DNA Sequence Number=SeqID_3324
  Gene Ontology: Mol. function=nucleic acid binding
  Homolog annotation: Hit_ID=Q653U4; Match level="QueryCoverage=47%, HitCoverage=18%, E-value=6e-57, Identity=86%"; Hit description=Zinc finger (C3HC4-type RING finger) protein-like
  Pfam annotation: Domain name=YTH; Domain location=7-85; Score=103.6; E_value=6.1e-28; Accession=PF04146.6; Description=YT521-B-like family
VKGCAKMTSRIGGYIGGGNWKSAHGTAHFGRNFSMQWLKLCELSFQKTHHLRNPYNDNLPVKISRDCQELEPFIGEQLASLLYLEPDSELTAMLIAAEAKREEEKXAKGVSADEAADNQDIVLFDDNEEDEEEESEEEEEGAGREPQGRGGRGGRGMMWPHQMPMMRGPMMAGRGFPPNMMGFGGGFGLPDPFGMPRGFPPFVGPRFPGDFPRSPMPGMGVXLGRPPQPFPLGLDMMMGPGRGPLMGMGGPGPGRXGXPWAWRPYAPA

SEQ ID NO: 9583 - protein, 101 aa, Zea mays
  Coding DNA Sequence Number=SeqID_3325
  Homolog annotation: Hit_ID=A4Q942; Match level="QueryCoverage=98%, HitCoverage=17%, E-value=7e-43, Identity=82%"; Hit description =Putative uncharacterized protein
MKVRIYTASQVDNELEAAKRDYLQAAVGITKTSKLIIPKLLDWYLLDFAKDLESLLDWICLQLPIELRKEAIECLERRGRQPLSQLVQMMPYDFSFRLLLH

SEQ ID NO: 9584 - protein, 172 aa, Zea mays
  Coding DNA Sequence Number=SeqID_3326
  Gene Ontology: Mol. function=transferase activity
  Homolog annotation: Hit_ID=A8GEA1; Match level="QueryCoverage=100%, HitCoverage=42%, E-value=1e-66, Identity=66%"; Hit description =Putative uncharacterized protein
FRYPLSGEFAMRTHVLNGIKIPGDWGLEIGVLSEIYRNYTTRQTCQVEIADNYDHKHQPLAEEDGTGGLKRMSNDIVQSLLRKLATMGVPLTSDSFRVLKATYYRNALDMMEIYNHEATMNGLKFDQHIEEAAVEMFTQAILDAGQSFIERPNEKPFIPSWSRVQSAFPDIL

SEQ ID NO: 9585 - protein, 181 aa, Zea mays
  misc_feature (161)..(161): Xaa can be any naturally occurring amino acid
  Coding DNA Sequence Number=SeqID_3327
  Homolog annotation: Hit_ID=A7MEX3; Match level="QueryCoverage=94%, HitCoverage=41%, E-value=1e-55, Identity=59%"; Hit description =Putative uncharacterized protein
  Pfam annotation: Domain name=PqiA; Domain location=2-181; Score =162.3; E_value=1.3e-45; Accession=PF04403.3; Description=Paraquat -inducible protein A
  Subcellular localization annotation: CTP_CleavageSite=23; ConfidenceScore=5.07e-01
MCATHQTQHWMLCPQCDLTVKLPAVPVGSRARCPRCHTTLVANWHEPRKRPTGYALAALFMLLLANLFPFISMHVAGLSSQISLMAIPQVMDREDYRSLATLFLLFVQGIPAFCMIAILLLVNPVRLPHSLRLGLTRILFQLRSWGMAEIFMAGVLVSFVXKLMAYGEIGLGSSFWPWCLF

SEQ ID NO: 9586 - protein, 66 aa, Zea mays
  misc_feature (12)..(12): Xaa can be any naturally occurring amino acid
  misc_feature (53)..(53): Xaa can be any naturally occurring amino acid
  Coding DNA Sequence Number=SeqID_3328
  Gene Ontology: Mol. function=small conjugating protein ligase activity; Biological process=ubiquitin-dependent protein catabolic process
  Homolog annotation: Hit_ID=A2YFV1; Match level="QueryCoverage=93%, HitCoverage=20%, E-value=3e-21, Identity=77%"; Hit description =Ubiquitin carrier protein
  Pfam annotation: Domain name=UQ_con; Domain location=1-67; Score= -47.2; E_value=0.094; Accession=PF00179.16; Description=Ubiquitin -conjugating enzyme
TPYENGVYRMKXLLSRDMPQSPPLGVFSTKIPHPNISTSGEICVNTLTNDWNXDLALKHVLLARLV

SEQ ID NO: 9587 - protein, 187 aa, Zea mays
  Coding DNA Sequence Number=SeqID_3329
  Gene Ontology: Mol. function=transferase activity, transferring glycosyl groups; Cellular component=intracellular; Biological process=carbohydrate metabolic process
  Homolog annotation: Hit_ID=A7ME77; Match level="QueryCoverage=99%, HitCoverage=23%, E-value=2e-69, Identity=69%"; Hit description =Phosphorylase
  Pfam annotation: Domain name=Phosphorylase; Domain location=1-187; Score=-336.9; E_value=8.4e-14; Accession=PF00343.10; Description =Carbohydrate phosphorylase
QAESPGIEADKLTKVLYPNDNHAPGKRLRLMQQYFQCACAVSDILRRHRLAGRALHTLPDFEVIQLNDTHPTIAIPELLRLLLDEHSLSWDDAWHITSRTFAYTNHTLMPEALERWPASLLRELLPRHLQIIKQINRQLKQQVKQRWPNDSALWHKLAVVSDGEVRMANLCVVSCFAVNGVAALHSQ

SEQ ID NO: 9588 - protein, 115 aa, Zea mays
  Coding DNA Sequence Number=SeqID_3330
  Gene Ontology: Mol. function=hydrolase activity, hydrolyzing O -glycosyl compounds; Cellular component=cytoplasm; Biological process= carbohydrate metabolic process
  Homolog annotation: Hit_ID=Q2TI56; Match level="QueryCoverage=100%, HitCoverage=24%, E-value=2e-42, Identity=68%"; Hit description=BglY
  Pfam annotation: Domain name=Glyco_hydro_1; Domain location=5-115; Score=-310.9; E_value=0.0044; Accession=PF00232.9; Description =Glycosyl hydrolase family 1
MQHPNPGAFPHGFLWGASTSAYQVEGAWNEDGKGPSVIDKGHFPEGMTDFTVTSDHYHRFREDIALLAELGLKTYRFSIAWSRIYPQGDGELNPAGIQFYQQLIDEICRHGIEPL

SEQ ID NO: 9589 - protein, 49 aa, Zea mays
  misc_feature (7)..(7): Xaa can be any naturally occurring amino acid
  misc_feature (13)..(13): Xaa can be any naturally occurring amino acid
  misc_feature (26)..(26): Xaa can be any naturally occurring amino acid
  misc_feature (41)..(41): Xaa can be any naturally occurring amino acid
  Coding DNA Sequence Number=SeqID_3331
  Homolog annotation: Hit_ID=Q10M12; Match level="QueryCoverage=100%, HitCoverage=14%, E-value=7e-09, Identity=51%"; Hit description =Expressed protein
RGVGMAXNICFRXGAFLGDRGYGGMXYGSNIVLWKWCEGGXQRWKIVPW

SEQ ID NO: 9590 - protein, 147 aa, Zea mays
  Coding DNA Sequence Number=SeqID_3332
  Gene Ontology: Mol. function=di-trans,poly-cis-decaprenylcistransferas e activity; Cellular component=endoplasmic reticulum membrane; Biological process=cell wall organization and biogenesis
  Homolog annotation: Hit_ID=Q88MH6; Match level="QueryCoverage=71%, HitCoverage=41%, E-value=7e-51, Identity=95%"; Hit description =Undecaprenyl pyrophosphate synthetase
  Pfam annotation: Domain name=Prenyltransf; Domain location=59-147; Score=-57.2; E_value=3.3e-06; Accession=PF01255.10; Description =Putative undecaprenyl diphosphate synth
VRNVRRDALADLKKLTKDKEISEDEERRAADEIQKLTDKYVAETKPAAPSSVPRHVAIIMDGNNRWAKKRLLPGVAGHKAGVDAVRAVIEVCAESGVEVLTLFAFSSENWQRPAEEVGALMELFFSALRREAKRLNENNISVRIIGE

SEQ ID NO: 9591 - protein, 31 aa, Zea mays
  Coding DNA Sequence Number=SeqID_3333
SMQLFCGDPYVALLTVRFQKNFDFFSLNIFF

SEQ ID NO: 9592 - protein, 120 aa, Zea mays
  Coding DNA Sequence Number=SeqID_3335
  Gene Ontology: Mol. function=ubiquitin thiolesterase activity; Cellular component=integral to membrane; Biological process =ubiquitin-dependent protein catabolic process
  Homolog annotation: Hit_ID=A7PVG3; Match level="QueryCoverage=83%, HitCoverage=21%, E-value=4e-29, Identity=59%"; Hit description =Chromosome chr9 scaffold_33, whole genome shotgun sequence
PKPIWWSVILIFVLGFTAGGFILGGVHNAILIIVVVILCGAVRASFTWNSCFARKAIVGFISRYPDAEFRSAKNGQFAKVSGVYSIKQIPMGKAQSCKHTHAHVTIHALIIHFFITADLQ

SEQ ID NO: 9593 - protein, 141 aa, Zea mays
  Coding DNA Sequence Number=SeqID_3336
  Gene Ontology: Mol. function=N-succinylarginine dihydrolase activity; Biological process=arginine catabolic process to glutamate
  Homolog annotation: Hit_ID=A8AHD7; Match level="QueryCoverage=65%, HitCoverage=20%, E-value=1e-36, Identity=81%"; Hit description=N -succinylarginine dihydrolase
  Pfam annotation: Domain name=AstB; Domain location=1-95; Score= -263.0; E_value=2.3e-05; Accession=PF04996.3; Description =Succinylarginine dihydrolase
QVFDLRESMCNGGGPACLRLRVVLTEAERQAVNPAVLMNDRLFTRLNDWVDRHYRDRLTQADLADPQLLSEGRSALDELTQLLDLGSVYAFQRRPPAQRQGSNAHLHWQWHDEGILSLTPHTPTQQALVLSAGIHGNETAP

SEQ ID NO: 9594 - protein, 109 aa, Zea mays
  Coding DNA Sequence Number=SeqID_3337
ELGAKETMLKGARRTRNARGTCHQRVVFSAAPDRTPPRRDVDQEPELEVAYPGLTLPGSPRQRRPRARATPPRPLPVPHYCQATTAAGAANAASPERKNLGADQDPAVD

SEQ ID NO: 9595 - protein, 120 aa, Zea mays
  Coding DNA Sequence Number=SeqID_3338
TAARGHTGRRAKDGRKTPRTRTSEKQPRKAHMLACKRDKPRGARGAQRKDRGSRGTPYSRWAGSTWKRTSKGSNAGPPAGERKNHNKQRGRKEATCAAKTASRETTTKNAKTRVKLAQRA

SEQ ID NO: 9596 - protein, 137 aa, Zea mays
  Coding DNA Sequence Number=SeqID_3340
  Homolog annotation: Hit_ID=A2YFZ8; Match level="QueryCoverage=64%, HitCoverage=7%, E-value=4e-09, Identity=44%"; Hit description =Putative uncharacterized protein
  Subcellular localization annotation: CTP_CleavageSite=17; ConfidenceScore=5.16e-01
MAAASLNISGLGLTSTVSATVGNLTYLESLILEKNQLSRGQSNPPSGNFSLPSLSSAMQAPTAMDLSHNQLDGPLPSDVSGLTNLGQVALSGNKLIVTKNQLPRSPPAASLAGRFVREPTRHLRKAAARRRASVVHA

SEQ ID NO: 9597 - protein, 100 aa, Zea mays
  Coding DNA Sequence Number=SeqID_3341
  Gene Ontology: Mol. function=oxidoreductase activity; Cellular component=flagellum; Biological process=negative regulation of transcription
  Homolog annotation: Hit_ID=A2Z7Q5; Match level="QueryCoverage=100%, HitCoverage=19%, E-value=5e-29, Identity=62%"; Hit description =Putative uncharacterized protein
LQEAGGVLFGFPTRYGAMATQMKAFFDSTGSLWEAQKLAGKPVRFFVSTGTQGGGQETMAWRLSTLTPHPQLLFLCLSYRMDGWMYKCRSVKPARPLASG

SEQ ID NO: 9598 - protein, 166 aa, Zea mays
  Coding DNA Sequence Number=SeqID_3342
  Homolog annotation: Hit_ID=UPI00005F76B5; Match level="QueryCoverage =94%, HitCoverage=17%, E-value=4e-31, Identity=42%"; Hit description =COG3210: Large exoproteins involved in heme utilization or adhesion
ACLQLSYPILPQPVELHGNLTLPTFADGLPVAGELSGALNLTQWPQPLALTLNWQQQQGELVVRQQQEPQPLLQLPWQVDAQQIRITAGHWRWPFGSQPLSGGVALTLDDWQQGLEQTQIRGRFNLLTAGRGGKGNLVLSVGPGKLSLTDSALPFQLTGESKFADL

SEQ ID NO: 9599 - protein, 134 aa, Zea mays
  Coding DNA Sequence Number=SeqID_3343
  Homolog annotation: Hit_ID=A3B771; Match level="QueryCoverage=65%, HitCoverage=22%, E-value=3e-14, Identity=51%"; Hit description =Putative uncharacterized protein
  Pfam annotation: Domain name=X8; Domain location=1-45; Score=-29.1; E_ value=0.015; Accession=PF07983.3; Description=X8 domain
  Subcellular localization annotation: CTP_CleavageSite=47; ConfidenceScore=5.35e-01
MQPFLKWIQGCRPVQSWAPRFGRSCDFGGTAALTTADPSTSTCQYPSTSTGASVLNTSTPLTPTNGSPPGPGYGSSPPAGYANSPPLYGNMSPPDYGDNISAAARALPGRKTTATAAVASLATTCLLTAALSLT

SEQ ID NO: 9600 - protein, 115 aa, Zea mays
  Coding DNA Sequence Number=SeqID_3344
  Gene Ontology: Mol. function=mismatched DNA binding; Biological process=response to DNA damage stimulus
  Homolog annotation: Hit_ID=Q6D8C1; Match level="QueryCoverage=100%, HitCoverage=13%, E-value=2e-50, Identity=84%"; Hit description=DNA mismatch repair protein mutS
  Pfam annotation: Domain name=MutS_I; Domain location=13-115; Score =204.5; E_value=2.5e-58; Accession=PF01624.10; Description=MutS domain I
MKGAEQMGFSGHTPMMQQYLRLKADHPDILLFYRMGDFYELFYDDARRASQLLEISLTKRGASAGEPIPMAGVPYHAVEGYLAKLVQLGESVAICEQIGDPALSKGPVERKVVRI

SEQ ID NO: 9601 - protein, 67 aa, Zea mays
  Coding DNA Sequence Number=SeqID_3345
STAVGYLLLEYTTRYHSATVLCEDLDGDGGLRLDDCGDMANESMVAGSSTLTVQKMTVCTDLYVERL

SEQ ID NO: 9602 - protein, 72 aa, Zea mays
  Coding DNA Sequence Number=SeqID_3347
  Gene Ontology: Mol. function=phosphotransferase activity, alcohol group as acceptor; Biological process=phosphoinositide-mediated signaling
  Homolog annotation: Hit_ID=Q2R903; Match level="QueryCoverage=90%, HitCoverage=5%, E-value=4e-28, Identity=92%"; Hit description =Phosphatidylinositol 4-kinase, putative, expressed
TLRDPPGDSQTVADQPIEWVKVTLSAVPGVNMEDVDDNEPTRKKDHRRVPSTIAIEEVKAAALKGEAPLMLS

SEQ ID NO: 9603 - protein, 103 aa, Zea mays
  misc_feature (32)..(32): Xaa can be any naturally occurring amino acid
  misc_feature (80)..(80): Xaa can be any naturally occurring amino acid
  misc_feature (87)..(87): Xaa can be any naturally occurring amino acid
  Coding DNA Sequence Number=SeqID_3348
  Homolog annotation: Hit_ID=Q5YLM3; Match level="QueryCoverage=89%, HitCoverage=10%, E-value=4e-34, Identity=81%"; Hit description =Roothairless 1
LLGLFGIWTLQNSHYDLANVAPTLAKFYHQAXESYELACTRHMSSPIYLQFERLFQFNRKVNELTYTIASKKISFQLGLXKTDIRRXVLKSNLYGVSKSISAS

SEQ ID NO: 9604 - protein, 118 aa, Zea mays
  Coding DNA Sequence Number=SeqID_3349
  Gene Ontology: Mol. function=3-mercaptopyruvate sulfurtransferase activity; Cellular component=cytoplasm; Biological process=sulfate transport
  Homolog annotation: Hit_ID=A6TCE0; Match level="QueryCoverage=99%, HitCoverage=41%, E-value=5e-46, Identity=72%"; Hit description=3 -mercaptopyruvate sulfurtransferase
  Pfam annotation: Domain name=Rhodanese; Domain location=7-118; Score =55.4; E_value=2e-13; Accession=PF00581.10; Description=Rhodanese -like domain
MTAMFVSADWLNEHYHEERLQVLDARMLPPGQEAVRDITAEYLAGHLPDAPFFNIEALSDHTSPYPHMMPRAETFAVAMRELGISQDKHLVVYDENNLFSAPRAWWMLRAFGCEQVTI

SEQ ID NO: 9605 - protein, 92 aa, Zea mays
  Coding DNA Sequence Number=SeqID_3350
  Gene Ontology: Mol. function=oxidoreductase activity; Cellular component=extracellular region; Biological process=response to oxidative stress
  Homolog annotation: Hit_ID=Q5U1Q4; Match level="QueryCoverage=69%, HitCoverage=19%, E-value=2e-25, Identity=87%"; Hit description=Class III peroxidase 39 precursor
PGPVSRPVQVKSLLLAPYARPEPACVCFFIQGCDGSILLDNSSSIVSEKFATPNNNSARGYPVVDAVKAALEEVCPGEISCADILAIAAKIS

SEQ ID NO: 9606 - protein, 213 aa, Zea mays
  Coding DNA Sequence Number=SeqID_3351
  Gene Ontology: Mol. function=hydrolase activity
  Homolog annotation: Hit_ID=A2VY45; Match level="QueryCoverage=100%, HitCoverage=38%, E-value=1e-113, Identity=92%"; Hit description =Superfamily I DNA and RNA helicase
VAADRIVDASRKAQLAQVIQQILPEHDEPLPNAAKLHHFLADELALTPDTSALVGQAGTLVTRLSGGLAAWARQLEFTPFRLRVTGTAGSGKTQLAVQAMRDAVAAGKRVLYVCFNRPLADYIARIAPPGAKIANYHQLCDWVARDGGYTPDFDAPGAFERLEARFAQTPVTERWRFDVLIVDEGQDFHAPWAAALERLLAPDGAWWWLEDPL

SEQ ID NO: 9607 - protein, 78 aa, Zea mays
  Coding DNA Sequence Number=SeqID_3352
  Homolog annotation: Hit_ID=Q8SA86; Match level="QueryCoverage=97%, HitCoverage=8%, E-value=1e-11, Identity=43%"; Hit description =Putative retrotransposon protein
MPSKMSYIEIRRSTLKEKDPQSMRRLEYFSSKVNVRLPGEETTPKPGKDEVIVYKSFFKAGLWLPMYKTIAKVLQRYE

SEQ ID NO: 9608 - protein, 104 aa, Zea mays
  Coding DNA Sequence Number=SeqID_3353
  Gene Ontology: Mol. function=calmodulin binding; Cellular component =integral to membrane; Biological process=cell death
  Homolog annotation: Hit_ID=Q94CG7; Match level="QueryCoverage=86%, HitCoverage=18%, E-value=2e-41, Identity=85%"; Hit description=Seven transmembrane protein Mlo8
  Pfam annotation: Domain name=Mlo; Domain location=2-104; Score= -371.1; E_value=0.073; Accession=PF03094.6; Description=Mlo family
MSFIIYLFLLVKEYVKGIGNDSVILSWLHSFGKQFYRSVSRSDYTTMRLGFIKTHCPSNPKFDFHGYMVRVLEADFRRVVGISWYLWIFVVIFLLLNVNGKKKT

SEQ ID NO: 9609 - protein, 171 aa, Zea mays
  Coding DNA Sequence Number=SeqID_3354
  Gene Ontology: Mol. function=binding; Cellular component=mitochondrion
  Homolog annotation: Hit_ID=Q5VMT5; Match level="QueryCoverage=99%, HitCoverage=10%, E-value=3e-54, Identity=62%"; Hit description =Putative Spo76 protein
ATYFDKVEMKALEQRLLQKQRLQQEMMKYISLRQLSQVEDAPDLQKRIIGCFRNISRLFSDSAKCEENLNMLHQLKDADIWKIFTSLLNCSTTFEKAWSLRADLLKIFGEKHVLYNFVGALAMGCSYLLVNKEYAKEILSEASEQKTSGNTKLISSCMNLLTVRCCLLPTL

SEQ ID NO: 9610 - protein, 114 aa, Zea mays
  Coding DNA Sequence Number=SeqID_3355
  Gene Ontology: Mol. function=sulfotransferase activity
  Homolog annotation: Hit_ID=Q39EM9; Match level="QueryCoverage=100%, HitCoverage=28%, E-value=2e-45, Identity=77%"; Hit description =Sulfotransferase
MAHTLWQMYADDPDPLAVGAQWNAGMARAIGAAMAARDALPAGRFLDVRFEDTVSNPLGVAQAVYRFAGMPLDARQRAAITEWLARNGRDRRAAHDYSIARFGFTEAQLAHDFA

SEQ ID NO: 9611 - protein, 101 aa, Zea mays
  Coding DNA Sequence Number=SeqID_3356
  Gene Ontology: Mol. function=oxidoreductase activity, acting on the CH-OH group of donors, NAD or NADP as acceptor; Cellular component =cytoplasm; Biological process=isocitrate metabolic process
  Homolog annotation: Hit_ID=Q9XGU8; Match level="QueryCoverage=89%, HitCoverage=21%, E-value=5e-47, Identity=97%"; Hit description=NADP -specific isocitrate dehydrogenase
YNVAIKCATITPDETRVKEFNLKHMWKSPNGTIRNIINGTVFREPIICKNVPRLVPGWTKPICIGRHAFGDQYRATDAVLKGPGKLKLVFGMDIWLPTSDH

SEQ ID NO: 9612 - protein, 110 aa, Zea mays
  Coding DNA Sequence Number=SeqID_3357
  Homolog annotation: Hit_ID=A9PFF6; Match level="QueryCoverage=95%, HitCoverage=12%, E-value=2e-29, Identity=63%"; Hit description =Putative uncharacterized protein
  Subcellular localization annotation: CTP_CleavageSite=68; ConfidenceScore=5.01e-01
FVLTHPLNSCHVAETLCTITRVASSTLAIKLSSPSFVAKILGYALEDSQSKSSLVNSLSVCISLLDPKKSAISSPLFHSFRSQNMYEPPIPVNPDTIGAMLPKLGNHLII

SEQ ID NO: 9613 - protein, 66 aa, Zea mays
  Coding DNA Sequence Number=SeqID_3358
  Homolog annotation: Hit_ID=Q8H4Y5; Match level="QueryCoverage=93%, HitCoverage=14%, E-value=1e-20, Identity=83%"; Hit description =Nuclear inhibitor of PP1-like
ADRASKMSKAVSIHSQFSIYVIDLGSVHGTFVANERLTKDNPVELEVGQSLRFAASTRTYILRKNA

SEQ ID NO: 9614 - protein, 131 aa, Zea mays
  misc_feature (69)..(69): Xaa can be any naturally occurring amino acid
  misc_feature (79)..(79): Xaa can be any naturally occurring amino acid
  misc_feature (95)..(95): Xaa can be any naturally occurring amino acid
  Coding DNA Sequence Number=SeqID_3359
  Gene Ontology: Mol. function=transcription factor activity; Biological process=regulation of transcription, DNA-dependent
  Homolog annotation: Hit_ID=A4WE34; Match level="QueryCoverage=100%, HitCoverage=45%, E-value=3e-34, Identity=59%"; Hit description =Transcriptional regulator, LysR family
  Pfam annotation: Domain name=HTH_1; Domain location=5-64; Score=68.1; E_value=3e-17; Accession=PF00126.17; Description=Bacterial regulatory helix-turn-helix protein, lysR family
MKYSPESLEAFVQTVASGSFSATARALAKSQSTISSSVAYLEDDLGFALFDRSGRQPVLTDQGQRALAXVQQILAASQXLDELAVVLSQGDEPRXSAWPISDFWQADLHENLLTRCEARYPYIEFECMIAE

SEQ ID NO: 9615 - protein, 205 aa, Zea mays
  Coding DNA Sequence Number=SeqID_3360
  Gene Ontology: Mol. function=nucleoside-triphosphatase activity; Cellular component=cytoplasm; Biological process=protein metabolic process
  Homolog annotation: Hit_ID=A7MQ33; Match level="QueryCoverage=99%, HitCoverage=23%, E-value=8e-71, Identity=70%"; Hit description =Putative uncharacterized protein
QALINEVQSSPTPIVLFVDEIHTLVGAGGQQGTGDAANLLKPALARGQLRTIGATTWAEYKKYIEKDPALTRRFQTVQVQEPDEAKAILMLRSTVSALEKHHQVLLLDEAVSAAVKLSHRYIPARQLPDKAVAILDTACARVAVSQGAQPAALEDCLHRLAALEIEAEIIERESKVGLGDAARSQAVAAQRATLETERDALQACK

SEQ ID NO: 9616 - protein, 137 aa, Zea mays
  Coding DNA Sequence Number=SeqID_3361
  Gene Ontology: Cellular component=nucleus; Biological process =regulation of transcription, DNA-dependent
  Homolog annotation: Hit_ID=Q9ST48; Match level="QueryCoverage=65%, HitCoverage=14%, E-value=2e-09, Identity=43%"; Hit description=DELLA protein DWARF8
ACVCYVCKLNACPPLRPRLAPKLPPAHGHAASPWGPCPGPPSRLVSTSSSVTSGAAAGDGYFDLPSAVDSSSSTYALKPIPSPVVAASADPSPDSAREPKQMRTGPRLTASSPQLVPTMIGGHARVPFCVCAGVPSS

SEQ ID NO: 9617 - protein, 67 aa, Zea mays
  Coding DNA Sequence Number=SeqID_3362
  Gene Ontology: Mol. function=protein serine/threonine kinase activity; Cellular component=nuclear envelope; Biological process =protein amino acid phosphorylation
  Homolog annotation: Hit_ID=A7QBS4; Match level="QueryCoverage=98%, HitCoverage=8%, E-value=5e-13, Identity=60%"; Hit description =Chromosome chr1 scaffold_75, whole genome shotgun sequence
MRERTMLKDCRTVNEQERLTKVCYGTYCALYRAMDTMTTEIMALKKVEMAIEPEGYPLTLLREINIL

SEQ ID NO: 9618 - protein, 77 aa, Zea mays
  Coding DNA Sequence Number=SeqID_3363
  Homolog annotation: Hit_ID=Q5VPC8; Match level="QueryCoverage=97%, HitCoverage=5%, E-value=3e-31, Identity=84%"; Hit description=WD-40 repeat family protein-like
LGAICHLSSHFRYVAIVWPDIPSFAVYKANDWSVVDSGTGKLFAWDTCRDRYALVESALAPRMPLVVKGGSSKKAKE

SEQ ID NO: 9619 - protein, 88 aa, Zea mays
  Coding DNA Sequence Number=SeqID_3364
  Homolog annotation: Hit_ID=A3BM65; Match level="QueryCoverage=94%, HitCoverage=36%, E-value=9e-14, Identity=54%"; Hit description =Putative uncharacterized protein
MAASARPGERATSFAVACSLLSRFVRQNGVAAAELGLRIKAEVEQQRSPATASLLPGSEGLEVVRRKEPMELFLQSVGFSNKDPNAPP

SEQ ID NO: 9620 - protein, 191 aa, Zea mays
  misc_feature (185)..(185): Xaa can be any naturally occurring amino acid
  Coding DNA Sequence Number=SeqID_3365
  Gene Ontology: Mol. function=thioredoxin-disulfide reductase activity; Cellular component=cytoplasm; Biological process=removal of superoxide radicals
  Homolog annotation: Hit_ID=A1JME7; Match level="QueryCoverage=98%, HitCoverage=59%, E-value=1e-86, Identity=83%"; Hit description =Thioredoxin reductase precursor
  Pfam annotation: Domain name=Pyr_redox; Domain location=66-162; Score= 83.7; E_value=5.9e-22; Accession=PF00070.17; Description=Pyridine nucleotide-disulphide oxidor
DHIHTVDLQNRPFRLTGDSGEYTADALIIATGASARYLGLPSEEAFKGKGVSACATCDGFFYRNQKVAVIGGGNTAVEEALYLANIASEVHLIHRRDSFRAEKILIDRLMEKVRNGNIVLHTDRALDEVVGDQMGVTGLKLSSTKGEAPVSLEVAGLFVAIGHSPNTAIFDGQLDLENGYIKVQXGLQACK

SEQ ID NO: 9621 - protein, 72 aa, Zea mays
  Coding DNA Sequence Number=SeqID_3366
  Gene Ontology: Mol. function=phosphogluconate dehydrogenase (decarboxylating) activity; Cellular component=mitochondrion; Biological process=pentose-phosphate shunt
  Homolog annotation: Hit_ID=A2Y8G5; Match level="QueryCoverage=83%, HitCoverage=31%, E-value=5e-14, Identity=71%"; Hit description =Putative uncharacterized protein
EMALTRIGLAGLAVMGQSLALNIAQKGCPISVYSSTTSKVDETGSVPGEGNLRLVHDPSSEPSDPALCLGWR

SEQ ID NO: 9622 - protein, 191 aa, Zea mays
  Coding DNA Sequence Number=SeqID_3367
  Gene Ontology: Mol. function=L-xylulokinase activity; Biological process=carbohydrate metabolic process
  Homolog annotation: Hit_ID=Q92W66; Match level="QueryCoverage=99%, HitCoverage=37%, E-value=2e-45, Identity=47%"; Hit description =Putative L-xylulose kinase protein
  Pfam annotation: Domain name=FGGY_N; Domain location=1-189; Score =53.4; E_value=1.9e-13; Accession=PF00370.11; Description=FGGY family of carbohydrate kinases, N-termi
ACLQQAGTRGSEVIAVGAAGHGNGLYALDRQQRPLFGIQSIDHRASATVQALESSGAAEQIYALSLQKPWPAATPVLISWMRQHQPERWAQIGHLLCAKDVIAHFLCGNVSADYSDAAGAGLIDYRQRSYSRELLALYGIEEALALLPPLRESCEVTGVVSARAAQLTGLPAGIPVVAGMFDVVASAVGSG

SEQ ID NO: 9623 - protein, 248 aa, Zea mays
  Coding DNA Sequence Number=SeqID_3368
  Gene Ontology: Mol. function=structural constituent of ribosome; Cellular component=intracellular; Biological process=translation
  Homolog annotation: Hit_ID=A7NZ54; Match level="QueryCoverage=43%, HitCoverage=12%, E-value=4e-15, Identity=41%"; Hit description =Chromosome chr6 scaffold_3, whole genome shotgun sequence
  Pfam annotation: Domain name=PPR; Domain location=161-195; Score =13.5; E_value=0.19; Accession=PF01535.11; Description=PPR repeat
  Pfam annotation: Domain name=PPR; Domain location=196-230; Score =17.7; E_value=0.045; Accession=PF01535.11; Description=PPR repeat
  Pfam module annotation: Pfam domain module=PPR::PPR; Domain location =161-195::196-230
  Subcellular localization annotation: CTP_CleavageSite=81; ConfidenceScore=5.37e-01
MVKLLADILHHTAPSTWTFALAAPLLRQRLTSAHVSSLLILPASLRRPDLSRRFLLLLPSHLVSPVSFSLLALSFLSSSPSSSASSPHADSLLLSLASSTPSASSSFSYLSHANTLAIFRPGAATAAATLLASSYLRIRRSRDAATVLRLSLSSGIAMKQYTASQILFALIKIRQFALARDLFDEMLQYKFPLDEYVYTAGIRAYCEIRNLDGAGRLLARMESEGVKGSAVPYNVLMYGLCRSTTRKS

SEQ ID NO: 9624 - protein, 91 aa, Zea mays
  misc_feature (19)..(19): Xaa can be any naturally occurring amino acid
  misc_feature (52)..(52): Xaa can be any naturally occurring amino acid
  Coding DNA Sequence Number=SeqID_3369
  Gene Ontology: Mol. function=acyl carrier activity; Biological process=fatty acid biosynthetic process
  Homolog annotation: Hit_ID=A2Y957; Match level="QueryCoverage=96%, HitCoverage=21%, E-value=9e-22, Identity=64%"; Hit description =Putative uncharacterized protein
  Subcellular localization annotation: CTP_CleavageSite=68; ConfidenceScore=5.37e-01
GSLAASAIFHGQRGSPAAXAKNLAGKEPDSLSVRGSVAKLNAKSGNMQVKAXAQTLPKVNGTKVNLKNASSDTEEAIPYTAPKTSHNQGYR

SEQ ID NO: 9625 - protein, 64 aa, Zea mays
  Coding DNA Sequence Number=SeqID_3370
KAFDLQVSLHGNPLRYPTFYTFSTWENPAVFQIMGFQAKTPFPKRFKTEWALKIRLLKDFLPGI

SEQ ID NO: 9626 - protein, 172 aa, Zea mays
  Coding DNA Sequence Number=SeqID_3372
  Gene Ontology: Mol. function=L-xylulokinase activity; Biological process=carbohydrate metabolic process
  Homolog annotation: Hit_ID=Q2K1Z6; Match level="QueryCoverage=80%, HitCoverage=27%, E-value=5e-37, Identity=52%"; Hit description=L -xylulose kinase protein
  Pfam annotation: Domain name=FGGY_C; Domain location=2-170; Score =30.7; E_value=5.5e-09; Accession=PF02782.6; Description=FGGY family of carbohydrate kinases, C-terminal domain
MAIEASATSAANLDWFLREFDDGRAGQGAARSSDSVAQVRPDAQLPLYHPYLYSGRKAEPAKAGFYGLGGWHTRADMLFALFEGVTFAHRAHIDRLRAAGITVNQATLSGGATRSSVWPQMFADVLGMPIRVATCHETGALGAALCAGVGVGQWPNLAAAVQQAVTLAPEAL

SEQ ID NO: 9627 - protein, 113 aa, Zea mays
  misc_feature (60)..(60): Xaa can be any naturally occurring amino acid
  misc_feature (92)..(92): Xaa can be any naturally occurring amino acid
  Coding DNA Sequence Number=SeqID_3373
  Gene Ontology: Mol. function=protein transporter activity; Cellular component=cytoplasmic vesicle; Biological process=intracellular protein transport
  Homolog annotation: Hit_ID=A2X2A5; Match level="QueryCoverage=87%, HitCoverage=11%, E-value=2e-23, Identity=61%"; Hit description =Putative uncharacterized protein
QLEMAEECLLHAMDLNGLVLLDSFLGEGEGLNQLAFGAQEPGKNHGAFPWFFQVRKLEKXLQLVIKKERIRKQALMASSNLPSKVLKIEALXKKDLQKVFCHKSLKLPFYSLL

SEQ ID NO: 9628 - protein, 164 aa, Zea mays
  misc_feature (132)..(132): Xaa can be any naturally occurring amino acid
  Coding DNA Sequence Number=SeqID_3374
RRRVPGSRRCCLRRRRLRRRFCRRGFRWRFRCRRLRRGCGRCPRLRPRLRGWRRAGFCGCASAPWAPAACRRSRRCCGRGRRRRCAGCASPVSPRSRASAPFAPGCSWSGSACARGFRCPRRFRARGRRRRXSRRGAAGCRGPRARRPHGPRWWLWARRIRGEL

SEQ ID NO: 9629 - protein, 161 aa, Zea mays
  Coding DNA Sequence Number=SeqID_3375
  Subcellular localization annotation: CTP_CleavageSite=10; ConfidenceScore=5.04e-01
AGGSSGFLPCGVAGWCFWPVSGVRPLRFLLRGVLLAGVLLHVGIWGWGPSPRLCSAVLLPRCLCLFLRLLPRRALWSVCVRPSSSVLCWLPGGLWSIVCGPGLVHRWWGWVPLVLHAGGVSLRCSRSVLPLVPFSCAAWVGCRRAFPAKNKTFWCPPGGAV

SEQ ID NO: 9630 - protein, 166 aa, Zea mays
  Coding DNA Sequence Number=SeqID_3377
  Gene Ontology: Mol. function=catalytic activity; Cellular component =mitochondrial inner membrane; Biological process=metabolic process
  Homolog annotation: Hit_ID=A4WEA8; Match level="QueryCoverage=96%, HitCoverage=56%, E-value=1e-58, Identity=65%"; Hit description=5 -oxopent-3-ene-1,2,5-tricarboxylate decarboxylase
  Pfam annotation: Domain name=FAA_hydrolase; Domain location=42-166; Score=5.7; E_value=1.4e-08; Accession=PF01557.9; Description =Fumarylacetoacetate (FAA) hydrolase family
ACLQVYLSEPVDYAFSAIRFLPVVENPGKVFCVGMNYADKRQEFAATLDAPTLFVRFADSLAAHEQPLLKPATTAEFDYEGELAVIIGKAAYQVKAADALQHVAGYSCFMDATVRDMQFTWFTAGKNWQQTGGFGPWMTTADDIPDPQQLAIKTWLNQREVQNDTT

SEQ ID NO: 9631 - protein, 110 aa, Zea mays
  Coding DNA Sequence Number=SeqID_3378
  Gene Ontology: Mol. function=transferase activity, transferring nitrogenous groups; Cellular component=intracellular; Biological process=regulation of transcription, DNA-dependent
  Homolog annotation: Hit_ID=A2W5B0; Match level="QueryCoverage=100%, HitCoverage=22%, E-value=6e-48, Identity=87%"; Hit description =Transcriptional regulator
QEYQPPQGPDWARAAGALWLAAPGFTPSPDQVVVTSGAQHGLYAVLNSLIGTDGVIVADRLTYYGLKALAPVFQFEIVSAAADDDGLLPDEIERICQRMPVKAIFVVPNL

SEQ ID NO: 9632 - protein, 72 aa, Zea mays
  Coding DNA Sequence Number=SeqID_3379
  Gene Ontology: Cellular component=nucleus; Biological process =multicellular organismal development
  Homolog annotation: Hit_ID=A2WWI7; Match level="QueryCoverage=79%, HitCoverage=21%, E-value=2e-21, Identity=82%"; Hit description =Putative uncharacterized protein
  Pfam annotation: Domain name=DUF260; Domain location=3-68; Score =65.7; E_value=1.6e-16; Accession=PF03195.5; Description=Protein of unknown function DUF260
CTPCAACKLLRRRCAQECPFSPYFSPLEPHKFAAVHRVFGASNVSKMLLFIGHHKTLDFCHTYTQRSICRHA

SEQ ID NO: 9633 - protein, 111 aa, Zea mays
  Coding DNA Sequence Number=SeqID_3380
SRQVQVSGWGAFLFLFLPDNHMVGSRVITHMWGFERVNNWRGLVALPPPRHSNSSALLASRDELMMGRRRRLPLPPSTRFGLCALADRSPVTVCAECAVMQSRTILLPRNS

SEQ ID NO: 9634 - protein, 79 aa, Zea mays
  Coding DNA Sequence Number=SeqID_3382
  Gene Ontology: Mol. function=histone-lysine N-methyltransferase activity; Cellular component=nucleus; Biological process=chromatin modification
  Homolog annotation: Hit_ID=A2ZW50; Match level="QueryCoverage=44%, HitCoverage=3%, E-value=3e-11, Identity=88%"; Hit description =Putative uncharacterized protein
MKLSSPAFSKKDSNVPIVDKYDIMFYFSTLFQKTEHGRVCFGRSGIHRWGLFARRDIQEGEMVLSFSYVVIIGGLLTLQ

SEQ ID NO: 9635 - protein, 126 aa, Zea mays
  Coding DNA Sequence Number=SeqID_3383
  Gene Ontology: Mol. function=unfolded protein binding; Cellular component=cytoplasm; Biological process=intracellular protein transport across a membrane
  Homolog annotation: Hit_ID=A5WA86; Match level="QueryCoverage=100%, HitCoverage=78%, E-value=2e-63, Identity=96%"; Hit description =Protein-export protein secB
  Pfam annotation: Domain name=SecB; Domain location=1-118; Score =113.7; E_value=5.6e-31; Accession=PF02556.5; Description=Preprotein translocase subunit SecB
PQIFRQTWEPSVALDLNTKQKALEGDFHEVVLTLSVTVKNGDEVAFIAEVQQAGIFLIKNLDAASMSHTLGAFCPNILFPYARETLDSLVTRGSFPALMLSPVNFDALYAQEMQRMQEAGEAPTVQ

SEQ ID NO: 9636 - protein, 67 aa, Zea mays
  Coding DNA Sequence Number=SeqID_3384
  Homolog annotation: Hit_ID=A0TDR0; Match level="QueryCoverage=98%, HitCoverage=15%, E-value=5e-30, Identity=93%"; Hit description=FAD dependent oxidoreductase
DGERIAANHVVVAAGTGSRQFFGQLGVRVPLEGIAGYQALVTDPGVEFRHSVIYADGGFCFSPMTRG

SEQ ID NO: 9637 - protein, 95 aa, Zea mays
  Coding DNA Sequence Number=SeqID_3385
  Subcellular localization annotation: CTP_CleavageSite=45; ConfidenceScore=5.08e-01
FAGRSWPRVTLGRAGACAAVGGAWGVWRGGLGPPPPPPGARRGGSASRRGGGPLPPPGGARVSWPGGPRPGAPAGWPASLPGWAWGPGRPAPGSG

SEQ ID NO: 9638 - protein, 63 aa, Zea mays
  Coding DNA Sequence Number=SeqID_3386
MNSDIVLFTLIGIHSHVTSGFSPSGITLRKCLLDDDHLGTILLCWHLFSRFFFRLIHQHYLVE

SEQ ID NO: 9639 - protein, 247 aa, Zea mays
  Coding DNA Sequence Number=SeqID_3388
  Gene Ontology: Mol. function=sequence-specific DNA binding; Cellular component=nucleus; Biological process=regulation of transcription, DNA-dependent
  Homolog annotation: Hit_ID=Q67UX6; Match level="QueryCoverage=63%, HitCoverage=52%, E-value=2e-21, Identity=44%"; Hit description =Putative homeodomain leucine zipper protein
  Pfam annotation: Domain name=HALZ; Domain location=169-213; Score =42.3; E_value=1.7e-09; Accession=PF02183.8; Description=Homeobox associated leucine zipper
  Pfam annotation: Domain name=Homeobox; Domain location=81-168; Score =20.7; E_value=0.0001; Accession=PF00046.19; Description=Homeobox domain
  Pfam module annotation: Pfam domain module=HALZ::Homeobox; Domain location=169-213::81-168
PLFGEVLSVQDGDEAQALRHHHGCWPPAASSRKKKRRDASAAGGASATDAAANGHHHQSKKTRTAAARRDDDGGGGDGGRKKLRLTAAQATLLEDSFRAHSILSHVCRTHARIHPAPMHAYVFLQSCIRADGSNPIYQGEKQELARQAGLSARQVEVWFQNRRARTKLKQTEVDCDLLRRWCARLSDDNDRLRRDLADLRRAASSSSAGLGAVVFCASCGADRQLALAAAGNVLPSVASPSHSPHLT

SEQ ID NO: 9640 - protein, 88 aa, Zea mays
  Coding DNA Sequence Number=SeqID_3389
ANGQRQQALQAPGLDLTCVADESDLGWDRGYRAMHTTVIAACEHVAVAHDDAPRPSMELVVDGGPARIGSFEEGAAVLPDWWLEAGGW

SEQ ID NO: 9641 - protein, 103 aa, Zea mays
  misc_feature (31)..(31): Xaa can be any naturally occurring amino acid
  misc_feature (33)..(33): Xaa can be any naturally occurring amino acid
  misc_feature (84)..(84): Xaa can be any naturally occurring amino acid
  misc_feature (89)..(90): Xaa can be any naturally occurring amino acid
  Coding DNA Sequence Number=SeqID_3391
  Gene Ontology: Mol. function=oxidoreductase activity, acting on NADH or NADPH; Cellular component=membrane; Biological process=ATP synthesis coupled electron transport
  Homolog annotation: Hit_ID=A7PR42; Match level="QueryCoverage=94%, HitCoverage=13%, E-value=3e-38, Identity=84%"; Hit description=NADH -ubiquinone oxidoreductase 75 kDa subunit
IFSCFSLLRCVRFATEVAGVQDLGMLGPAVXEXGTYVEKLMTSEPSGNVIDICPVVALTSKPFAFKARNWELKGTETIDVTDAXGSNIXXDSRGPEVMRIGAR

SEQ ID NO: 9642 - protein, 98 aa, Zea mays
  Coding DNA Sequence Number=SeqID_3392
  Subcellular localization annotation: CTP_CleavageSite=36; ConfidenceScore=5.26e-01
MPAAPPRRRAGVRRQACALRPSTLLAVPILFFAVCPSSSAAHLHGSLRTGWARARRSFASANTTKFRISGQAHEHEEAAMLAYGNFDNELAHELIESD

SEQ ID NO: 9643 - protein, 86 aa, Zea mays
  Coding DNA Sequence Number=SeqID_3394
  Gene Ontology: Mol. function=hydrolase activity; Cellular component =mitochondrion
  Homolog annotation: Hit_ID=Q69MU0; Match level="QueryCoverage=95%, HitCoverage=24%, E-value=2e-23, Identity=67%"; Hit description =Glyoxalase II
FEPVSLQMYSSLQKITALPDDTKVYCGHEYTLSNSKFALSVEPRNKALQEYAANATKLRNSNIPTVTLPQSFEASCSNFISTCKSH

SEQ ID NO: 9644 - protein, 127 aa, Zea mays
  Coding DNA Sequence Number=SeqID_3395
  Gene Ontology: Mol. function=calcium ion binding; Cellular component =extracellular region; Biological process=pathogenesis
  Homolog annotation: Hit_ID=Q8XQP2; Match level="QueryCoverage=70%, HitCoverage=82%, E-value=3e-18, Identity=46%"; Hit description =Probable hemagglutinin/hemolysin-related protein
MLLGLGLLSAIGAAAGIIYHNNKKDHGKSGEGEGGNLPDPVFTRGATIDAVTDNVGAIQGPLASGDYTDDATPTLSGTGTNPGNTVEIWDNGTKIGEAIVDQDGNWTFTPGTALAEGDHSFTVIERD

SEQ ID NO: 9645 - protein, 76 aa, Zea mays
  Coding DNA Sequence Number=SeqID_3396
  Gene Ontology: Mol. function=hydrolase activity, hydrolyzing O -glycosyl compounds; Cellular component=outer membrane; Biological process=peptidoglycan turnover
  Homolog annotation: Hit_ID=Q6D8H3; Match level="QueryCoverage=100%, HitCoverage=20%, E-value=3e-24, Identity=67%"; Hit description =Membrane-bound lytic murein transglycosylase A
QVQQIQSASSGLYGRNLGTYSAIQNWLLSGADTRQLRQFGLNAYQMEGTDSYGNVQFTGYYTPVGEARYTRQGEFQ

SEQ ID NO: 9646 - protein, 159 aa, Zea mays
  misc_feature (17)..(17): Xaa can be any naturally occurring amino acid
  misc_feature (102)..(102): Xaa can be any naturally occurring amino acid
  Coding DNA Sequence Number=SeqID_3397
  Gene Ontology: Mol. function=transporter activity; Cellular component= integral to membrane; Biological process=transport
  Homolog annotation: Hit_ID=Q4J2V6; Match level="QueryCoverage=100%, HitCoverage=16%, E-value=7e-41, Identity=57%"; Hit description =Acriflavin resistance protein precursor
AGRYGITGADVITALYXQVLGQRAWVSTIFTQANQYRVVLEVAPQYQQSPASFDDVYLPTTTTGMVKLTAIASVHARTGALMHMRLNQFPAVMVSFNLNPGXLEEGQRAIAQVTQQLKLPASITLRYQGETAAFQSATGNTLWLILAALITMYVVLGIL

SEQ ID NO: 9647 - protein, 87 aa, Zea mays
  misc_feature (67)..(67): Xaa can be any naturally occurring amino acid
  Coding DNA Sequence Number=SeqID_3398
  Gene Ontology: Mol. function=metal ion binding
  Homolog annotation: Hit_ID=Q9FN44; Match level="QueryCoverage=62%, HitCoverage=30%, E-value=2e-15, Identity=64%"; Hit description =Genomic DNA, chromosome 5, P1 clone:MYJ24
  Subcellular localization annotation: CTP_CleavageSite=44; ConfidenceScore=5.04e-01
EAEVNHDNSVFTNPDLGSFKFRKKFEARAFSFLPLPINTSKPVHVNAYFELSSNRRDIWVGTDMVKXGRVRSEWKLSLLEEVVAPAN

SEQ ID NO: 9648 - protein, 103 aa, Zea mays
  Coding DNA Sequence Number=SeqID_3399
  Gene Ontology: Mol. function=transporter activity; Cellular component= integral to membrane; Biological process=cell division
  Homolog annotation: Hit_ID=A9BZ02; Match level="QueryCoverage=100%, HitCoverage=9%, E-value=4e-33, Identity=70%"; Hit description =Acriflavin resistance protein
MNPSRLFVLRPVATILLMVGVLIAGLFAYRFLSTSALPQVDYPTIQVTTLYPGASPDVMTSSVTSPLERQLGQMAGLSQMTSASSGGSSIITLKFSLDLSLDV

SEQ ID NO: 9649 - protein, 83 aa, Zea mays
  misc_feature (32)..(32): Xaa can be any naturally occurring amino acid
  Coding DNA Sequence Number=SeqID_3400
  Gene Ontology: Mol. function=protein serine/threonine kinase activity; Biological process=protein amino acid phosphorylation
  Homolog annotation: Hit_ID=A2WVH5; Match level="QueryCoverage=86%, HitCoverage=8%, E-value=4e-17, Identity=62%"; Hit description =Putative uncharacterized protein
TPGLPSVPLGPEDTATLGRGTPHQGTPLVMVXKKDPNDPSIESSTTTTTTTSISMGDQSVASMDSDGLTPSAVFSQIMNPKGR

SEQ ID NO: 9650 - protein, 249 aa, Zea mays
  Coding DNA Sequence Number=SeqID_3401
  Gene Ontology: Mol. function=protein transporter activity; Cellular component=membrane; Biological process=protein secretion
  Homolog annotation: Hit_ID=A8GBE6; Match level="QueryCoverage=82%, HitCoverage=60%, E-value=5e-55, Identity=55%"; Hit description =Secretion protein HlyD family protein precursor
  Pfam annotation: Domain name=HlyD; Domain location=4-248; Score=63.7; E_value=6.4e-16; Accession=PF00529.10; Description=HlyD family secretion protein
QVSDAKRLSAQAQLDQQQSTIAEARATLAASQASAQYAGQSAARYNQLYKSGTIAADDQQKASSTQRSAAATVRQSAAALAAAEQQVKVLEAALRQAEADVAAAQASVDQAGLNLSYTRIIAPVDGMVGQRSVRVGAWVSAGTRLLAVVPLQQTYITANYLETQLADVRPGQRVVVKIDALPGKTFTGHVDSIAPATGATFSAIAPDNATGNYTKVVQRLPVKIVLDPHQSDLAQLRVGMSAIPQIETR

SEQ ID NO: 9651 - protein, 160 aa, Zea mays
  misc_feature (116)..(116): Xaa can be any naturally occurring amino acid
  Coding DNA Sequence Number=SeqID_3402
  Gene Ontology: Mol. function=citrate transmembrane transporter activity; Cellular component=integral to membrane; Biological process=citrate transport
  Homolog annotation: Hit_ID=A1FBB4; Match level="QueryCoverage=100%, HitCoverage=34%, E-value=7e-74, Identity=90%"; Hit description =Citrate transporter precursor
  Pfam annotation: Domain name=CitMHS; Domain location=1-160; Score= -48.5; E_value=9.4e-05; Accession=PF03600.6; Description=Citrate transporter
LFAPIAALGAVLLTDPSAVAPAFTGVFMEKMVGFIKLYFPVFLLGAVFGKLIELSGFSRSIVAAAIRVLGTRQAMLVIVLVCALLTYGGVSLFVVVFAVYPFAAEMFRQSNIPKRXIPATIALGAFSFTMDALPGTPQIQNIIPSTFFNTTAWAAPWLGL

SEQ ID NO: 9652 - protein, 86 aa, Zea mays
  Coding DNA Sequence Number=SeqID_3403
MGDIHLVGPSTNPARGQIPPTHASPRLAAQSGLGPPVGRWAHCADSPGPICAPELVMRGPGATVDLQAVAGAQMAYWPVEILAGVG

SEQ ID NO: 9653 - protein, 161 aa, Zea mays
  Coding DNA Sequence Number=SeqID_3405
  Gene Ontology: Mol. function=oxidoreductase activity; Biological process=tRNA processing
  Homolog annotation: Hit_ID=A7MIU4; Match level="QueryCoverage=98%, HitCoverage=62%, E-value=1e-62, Identity=72%"; Hit description =Putative uncharacterized protein
  Pfam annotation: Domain name=MiaE; Domain location=2-156; Score =231.2; E_value=2.4e-66; Accession=PF06175.2; Description=tRNA -(MS[2]IO[6]A)-hydroxylase (MiaE)
NLSKSIIVRNELPWADEMVEKMVLLIKEELHHFYQVWEIMQARDLPYRKITASRYAKGLLREVTTHEPDTLVDKLICGAYIEARSCERFASLAPYLDAQLEKFYISLLRSEARHYQDYLTLAAQISPKDIAPRVRAIGAAEARLISEPDAELRFHSGVPAF

SEQ ID NO: 9654 - protein, 78 aa, Zea mays
  misc_feature (30)..(30): Xaa can be any naturally occurring amino acid
  Coding DNA Sequence Number=SeqID_3406
  Gene Ontology: Mol. function=transcription factor activity; Cellular component=nucleus; Biological process=regulation of transcription, DNA-dependent
  Homolog annotation: Hit_ID=A2Y761; Match level="QueryCoverage=98%, HitCoverage=19%, E-value=3e-17, Identity=59%"; Hit description =Putative uncharacterized protein
NGRLGGQIYERHQGVWLGKFTGQAEAGGAXEVAGQRFRGPEAVTNFRPLAELEPEAAVQVRFLGVRFKAEVGDKVRQD

SEQ ID NO: 9655 - protein, 137 aa, Zea mays
  Coding DNA Sequence Number=SeqID_3407
  Gene Ontology: Mol. function=siderophore-iron transmembrane transporter activity; Cellular component=cell outer membrane; Biological process=siderophore transport
  Homolog annotation: Hit_ID=Q88E62; Match level="QueryCoverage=100%, HitCoverage=17%, E-value=3e-71, Identity=96%"; Hit description=Outer membrane ferric siderophore receptor, putative
  Pfam annotation: Domain name=Plug; Domain location=6-105; Score=78.5; E_value=2.3e-20; Accession=PF07715.5; Description=TonB-dependent Receptor Plug Domain
MRGQGPSQDIPQAINVVPAQVIRDQAPRNLDDALANVSGITQGNNFGGTSDTVMKRGFGDNRDGSIMRDGMPIVQGRSLNASTERVEVLKGPASLLYGIQDPGGVINVVSKRPQLEQYNALTVRGSTYGRGKNGSGG

SEQ ID NO: 9656 - protein, 189 aa, Zea mays
  Coding DNA Sequence Number=SeqID_3408
  Gene Ontology: Mol. function=nucleotidyltransferase activity; Biological process=DNA modification
  Homolog annotation: Hit_ID=A9N3X5; Match level="QueryCoverage=97%, HitCoverage=56%, E-value=7e-70, Identity=70%"; Hit description =Putative uncharacterized protein
ACLQLFNVEQCEGLPEFVSGEGVVSVPAESPSELSAVQLNQVQQIFSSTGVGCDHRRQDRAYYRPGADRIVMPTVSQFRTEADYWSTLLHELVHATGHGSRLNREGIASSSRQFGDPVYAFEELIAETGSAFLCAELGITGDVQHESYLAGWLRALREDKRAIFRACRFAREASEYLLAPLNRNTEQAA

SEQ ID NO: 9657 - protein, 72 aa, Zea mays
  misc_feature (45)..(45): Xaa can be any naturally occurring amino acid
  Coding DNA Sequence Number=SeqID_3409
TLVGILQQSYVPRITNHYIKPLINCVAQNLEYIYLDTKFRIYIYXSLLWGLALGGAIAPTDPRTLRCYHCLR

SEQ ID NO: 9658 - protein, 75 aa, Zea mays
  Coding DNA Sequence Number=SeqID_3411
  Gene Ontology: Mol. function=heat shock protein binding; Biological process=protein folding
  Homolog annotation: Hit_ID=Q8GLE5; Match level="QueryCoverage=97%, HitCoverage=42%, E-value=8e-21, Identity=72%"; Hit description=Co -chaperone protein hscB
  Pfam annotation: Domain name=HSCB_C; Domain location=1-67; Score =55.6; E_value=1.7e-13; Accession=PF07743.4; Description=HSCB C -terminal oligomerisation domain
LREELDTIEHSAEPNPAWAVFSSGLNKLIKPRSEQMENQLDADQWSIAADPVRKLRFLDKLHQQVEQLEERLLDN

SEQ ID NO: 9659 - protein, 132 aa, Zea mays
  Coding DNA Sequence Number=SeqID_3412
  Gene Ontology: Mol. function=siderophore-iron transmembrane transporter activity; Cellular component=cell outer membrane; Biological process=siderophore transport
  Homolog annotation: Hit_ID=Q88E62; Match level="QueryCoverage=100%, HitCoverage=16%, E-value=4e-64, Identity=90%"; Hit description=Outer membrane ferric siderophore receptor, putative
  Pfam annotation: Domain name=TonB_dep_Rec; Domain location=7-131; Score=16.5; E_value=0.0033; Accession=PF00593.14; Description=TonB dependent receptor
INGQAWVPHAGIVYKVDEQLSFYGSYSESFKPNSTIAPLVGNVVLDSSVAPEEGKSWELGAKLDIPGRLTGTLALFDITKRNVLVSNFDTSTRETVYSNAGEVSSRGVELDLTGQLSERWSLIGSYAFTDAE

SEQ ID NO: 9660 - protein, 115 aa, Zea mays
  Coding DNA Sequence Number=SeqID_3413
  Gene Ontology: Mol. function=N-acetyltransferase activity; Biological process=metabolic process
  Homolog annotation: Hit_ID=A8GKV7; Match level="QueryCoverage=100%, HitCoverage=66%, E-value=1e-27, Identity=51%"; Hit description=GCN5 -related N-acetyltransferase
MSQVTVRHATPEDAAVLTRIYSQPETQAGTLHLPYQSPSLWQERLANPRPHVTMLVACIDGQVVGQLTLEVMAVARRRHCATIGMGVDQAFHRRGVGKALMAAMVDLCDNWLQVD

SEQ ID NO: 9661 - protein, 124 aa, Zea mays
  misc_feature (23)..(23): Xaa can be any naturally occurring amino acid
  Coding DNA Sequence Number=SeqID_3414
  Gene Ontology: Mol. function=nucleotide binding; Cellular component =intracellular; Biological process=small GTPase mediated signal transduction
  Homolog annotation: Hit_ID=P25519; Match level="QueryCoverage=98%, HitCoverage=28%, E-value=7e-54, Identity=86%"; Hit description=GTP -binding protein hflX
PNDAGSRPTGHIWFSQDKELEDXQEFETLVSSAGVDALQVITGSRKAPHPKYFVGEGKAVEIADAVKASGASVVLYDHALSPAQERNLERLCECRVIDRTGLILDIFAQRARTHEGKLQVELAQ

SEQ ID NO: 9662 - protein, 181 aa, Zea mays
  Coding DNA Sequence Number=SeqID_3415
  Gene Ontology: Mol. function=protein serine/threonine kinase activity; Cellular component=cell surface; Biological process =protein amino acid phosphorylation
  Homolog annotation: Hit_ID=A2Z007; Match level="QueryCoverage=97%, HitCoverage=26%, E-value=1e-75, Identity=78%"; Hit description =Putative uncharacterized protein
  Pfam annotation: Domain name=Pkinase; Domain location=2-177; Score= -66.1; E_value=0.00012; Accession=PF00069.15; Description=Protein kinase domain
  Pfam annotation: Domain name=Pkinase_Tyr; Domain location=1-177; Score=-148.9; E_value=0.0027; Accession=PF07714.7; Description =Protein tyrosine kinase
  Pfam module annotation: Pfam domain module=Pkinase::Pkinase_Tyr; Domain location=2-177::1-177
IYRYKIIIGLGSALRYLHAEWEQCVVHGDIKPSNIMLDSSLDGKLGDFGLARLVDHGVKPATTKVVLGTAGYIDPELVNTRRPSAVSDVYSFGVVLLELVTGRRPVEEPDDSDELFVLVRWVWRLYGRNAIAEAVDERLKLVGREGDEMERALVVGLWCAQPDRGDRPSIAHAMHVLQACK

SEQ ID NO: 9663 - protein, 75 aa, Zea mays
  Coding DNA Sequence Number=SeqID_3416
  Gene Ontology: Mol. function=DNA binding; Biological process =regulation of transcription
  Homolog annotation: Hit_ID=Q7Y0B7; Match level="QueryCoverage=73%, HitCoverage=15%, E-value=5e-23, Identity=94%"; Hit description =Putative Myb-like DNA-binding protein
  Pfam annotation: Domain name=Myb_DNA-binding; Domain location=27-75; Score=17.3; E_value=0.058; Accession=PF00249.21; Description=Myb -like DNA-binding domain
TPATKQDLKQTLHSVESTTIQQARKARRCWSPELHRLFVAALHQLGGPQVATPKQIREVMKVDGLTNDEVKSHLQ

SEQ ID NO: 9664 - protein, 133 aa, Zea mays
  Coding DNA Sequence Number=SeqID_3417
  Gene Ontology: Mol. function=phosphogluconate dehydratase activity; Biological process=Entner-Doudoroff pathway
  Homolog annotation: Hit_ID=Q39JL9; Match level="QueryCoverage=100%, HitCoverage=21%, E-value=1e-69, Identity=96%"; Hit description=6 -phosphogluconate dehydratase
QRIDGAQGKFPARGALSCANLAHGFAGLEGSDKFQIKAIREPNIGIVSSYNEMLSAHAPYKNFPDIIKAAARENGGVAQFAGGVPAMCDGVTQGNPGMELSLFSREAIAMGTAIALTHNMFDAALCLGICDKI

SEQ ID NO: 9665 - protein, 161 aa, Zea mays
  Coding DNA Sequence Number=SeqID_3418
MPADHLLRCLLRGQGDEDQQALSPSVSRSSESSSIGSGYGDASYPQDPYGLRHPGAWAARDTGPYKRFHVVDAASLDPNALAGDGDTRPLVRRLKFGCLAIGWRFDLERADADRGDAQLCADLLGLAAGCCGGCRGLTWRGALPSAQAGVLDQRLQWLHDE

SEQ ID NO: 9666 - protein, 74 aa, Zea mays
  Coding DNA Sequence Number=SeqID_3420
  Gene Ontology: Mol. function=unfolded protein binding; Cellular component=cytoplasm; Biological process=cellular protein metabolic process
  Homolog annotation: Hit_ID=Q10GP3; Match level="QueryCoverage=94%, HitCoverage=17%, E-value=3e-16, Identity=64%"; Hit description=T -complex protein 1, beta subunit, putative, expressed
KILSQDKEYFTELAIDVVLRLKGSTHLEYIEILKIHGESLKDSFLDEGYVFIEKIPVSATLLIKRAMIAIPMNT

SEQ ID NO: 9667 - protein, 291 aa, Zea mays
  misc_feature (1)..(6): Xaa can be any naturally occurring amino acid
  Coding DNA Sequence Number=SeqID_3421
  Subcellular localization annotation: CTP_CleavageSite=71; ConfidenceScore=5.13e-01
XXXXXXSTATSHIPRGEASARSSWWPPPPAHHGDAVVVAVAAAGVAELQRAMVPRRQRGRRRGGRPVQAPAAAAAVAPPPPPQQRRRRRAHAEGLVCAAAAPPLLLHLRRPLRLLQHHHAVSAPRRRPRNRNRGGGQDTGDDRPVAARAPAVSSLVAGPRAGGRRRRGGWRAQRDEHGRGLRAGAGGAPPAGPGEGGGGQEVRGGRQARGVHPRLRGPPTPAAPQLHLQLHPDAQAARRRRPPPAPAGCPARSALSHVFGSFGLRLGSGFRETKISFELLYIACFQQIVCI

SEQ ID NO: 9668 - protein, 228 aa, Zea mays
  misc_feature (1)..(132): Xaa can be any naturally occurring amino acid
  Coding DNA Sequence Number=SeqID_3423
XXXXXXXXXXXXXXXXXXXXXXXXXXXXXXXXXXXXXXXXXXXXXXXXXXXXXXXXXXXXXXXXXXXXXXXXXXXXXXXXXXXXXXXXXXXXXXXXXXXXXXXXXXXXXXXXXXXXXXXXXXXXXXXXXXXXFFFFFLINAMKSIHTIHYMVQYIHRKEKKKQRGTPHLVHARYPEETTNTDSRLLLRSSLASNQRGKASDPPQPNVPRSSPTPRNRELTRSPAACKS

SEQ ID NO: 9669 - protein, 147 aa, Zea mays
  misc_feature (47)..(47): Xaa can be any naturally occurring amino acid
  misc_feature (66)..(66): Xaa can be any naturally occurring amino acid
  misc_feature (74)..(75): Xaa can be any naturally occurring amino acid
  misc_feature (78)..(79): Xaa can be any naturally occurring amino acid
  Coding DNA Sequence Number=SeqID_3425
  Gene Ontology: Mol. function=isomerase activity; Cellular component =chloroplast; Biological process=response to stress
  Homolog annotation: Hit_ID=Q6RW09; Match level="QueryCoverage=100%, HitCoverage=58%, E-value=6e-59, Identity=88%"; Hit description =Allene oxide cyclase
  Pfam annotation: Domain name=Allene_ox_cyc; Domain location=60-147; Score=-20.4; E_value=0.056; Accession=PF06351.2; Description=Allene oxide cyclase
  Subcellular localization annotation: CTP_CleavageSite=48; ConfidenceScore=5.66e-01
MAAALRCPASVRVSGPAASGLAKVRQASCVVAVSGARQSRGGGVAVXRASLFSPKPAAAKDARPTXKVQEPLYXXYEXXNVVGDPASSPAYLRLSAKQTENALGDLVPFTNKVYNGSLDKRLGVTAGICVLIQHVPDRNGDRYEAIY

SEQ ID NO: 9670 - protein, 243 aa, Zea mays
  misc_feature (1)..(1): Xaa can be any naturally occurring amino acid
  Coding DNA Sequence Number=SeqID_3426
  Gene Ontology: Mol. function=protein dimerization activity; Cellular component=nucleus; Biological process=regulation of RNA metabolic process
  Homolog annotation: Hit_ID=Q2QYJ5; Match level="QueryCoverage=96%, HitCoverage=39%, E-value=4e-60, Identity=50%"; Hit description=HAT family dimerisation domain containing protein
  Pfam annotation: Domain name=hATC; Domain location=148-231; Score =124.1; E_value=4.2e-34; Accession=PF05699.5; Description=hAT family dimerisation domain
XNDALLRHAVAPMKSKFLKYWRDIPMLYAFAFILDPRAKLRGFSNILRILSGLSGTDYSLYFTCVKSELFTMFNKYDVKFGAVRQQVPPPPPITGKRKQNWGLIYGSDSNSEFSYPGSSTPNLAAGTSASALLQQAHSSVGLSSLDTELSSYLDSDTLQKFDEDFNILNWWHEHKLSYPILSILARDIISVPVSTISSESAFSLCGRIIEERRRRLAPEMVEMLLCMKDWELGEHFIFGRYLL

SEQ ID NO: 9671 - protein, 87 aa, Zea mays
  misc_feature (1)..(1): Xaa can be any naturally occurring amino acid
  Coding DNA Sequence Number=SeqID_3427
  Homolog annotation: Hit_ID=A2ZU92; Match level="QueryCoverage=97%, HitCoverage=29%, E-value=5e-31, Identity=72%"; Hit description =Putative uncharacterized protein
XYNSVMESWGLLFNWGQDGGQGIGFQIRDVRVRVLGEMAWVNMKANVDVDPLVFHVTNVYELCNGRWYMVHHHSSLMAHPAPHNMFG

SEQ ID NO: 9672 - protein, 134 aa, Zea mays
  Coding DNA Sequence Number=SeqID_3428
  Gene Ontology: Mol. function=transferase activity, transferring glycosyl groups; Biological process=metabolic process
  Homolog annotation: Hit_ID=A2WXA3; Match level="QueryCoverage=70%, HitCoverage=30%, E-value=2e-30, Identity=69%"; Hit description =Putative uncharacterized protein
MEDIHSSKPERGLDLPSLKDLEDEGFRRPALLIADAPLRLVLLPLMFDQGLNARHLTEKKISVEVPRDEEDGSFAPKDIAAALKRVLVDEECEVFGDKAKELAQLFGNDEMNDQCVRDFLKCMSEYSRQRQVAL

SEQ ID NO: 9673 - protein, 65 aa, Zea mays
  misc_feature (18)..(18): Xaa can be any naturally occurring amino acid
  Coding DNA Sequence Number=SeqID_3429
ISRNGNASIVSSLNLYHXMQHISDKSFKITRRWQMHRSLPGINTMLGLLDDSISHSGAGLMHPQD

SEQ ID NO: 9674 - protein, 188 aa, Zea mays
  Coding DNA Sequence Number=SeqID_3431
RSDPTLSLRRSNLACPSLSFSYDPFSQSNETLGGTVRFDDMLSGVKLGPRDQIQSDFFCRGDQGSDSDSSDGKRPWKHSKRGRDKKEKKRRSSRRQRRRSKRYSSEDSLGSDTDDSIGEEEEDDVSRSKRRGKDRRRRRNFSDDDDSESGESDRGRASRRGKQRRDDEDEEEETEGDGLRASEVVRRE

SEQ ID NO: 9675 - protein, 150 aa, Zea mays
  Coding DNA Sequence Number=SeqID_3433
  Gene Ontology: Mol. function=phospho-N-acetylmuramoyl-pentapeptide -transferase activity; Cellular component=endoplasmic reticulum; Biological process=polysaccharide biosynthetic process
  Homolog annotation: Hit_ID=A2YPL1; Match level="QueryCoverage=95%, HitCoverage=37%, E-value=5e-74, Identity=90%"; Hit description =Putative uncharacterized protein
KKKKKKEFSIYLVLPFLTISLALLAFNWYPSIVFVGDTYTYFAGMALAVIGILGHFSETLLLFFLPQVLNFLCSVPQLFHFVPCPRHRLPRFDPGAGLLTGTKDGNLVNIFLRLFGKCSERALCIRLLIFQALCCVFCFWLRYMLTGWYK

SEQ ID NO: 9676 - protein, 190 aa, Zea mays
  Coding DNA Sequence Number=SeqID_3434
  Gene Ontology: Mol. function=secondary active sulfate transmembrane transporter activity; Cellular component=integral to membrane; Biological process=sulfate transport
  Homolog annotation: Hit_ID=Q5VQ79; Match level="QueryCoverage=71%, HitCoverage=18%, E-value=3e-34, Identity=59%"; Hit description =Putative sulfate transporter Sultr3;4
NPVDSLSYDVEAPPPSVVGFAAGQAPPPAWPAPAPAPATHAPVTREGGAASVLELHKVTLPERRTTAKALRQRLAEVFFPDDPLHQFKNQSSARRLVLALHYFLPMLQWGSAYSPRLLRSDLGDGLTIASLAIPKARARVCPEPVSPTLVPIAFIQFLATFGTVFYGTAQNIGRQAGRPSASCRCSARNN

SEQ ID NO: 9677 - protein, 121 aa, Zea mays
  Coding DNA Sequence Number=SeqID_3435
  Gene Ontology: Cellular component=integral to membrane
  Homolog annotation: Hit_ID=Q10MX8; Match level="QueryCoverage=71%, HitCoverage=14%, E-value=1e-27, Identity=73%"; Hit description =Transmembrane protein G5p, putative, expressed
DQDRAPRGSPPVANADADQAPLLSVEHLRPGSCSRELELREFRDRYVIRSLDGAAAFAVLRSGGSIRPLSPEEAVAESDCKVSRIYRVVGTIRLLAGESPNFTNCELLRILFFFACISVLL

SEQ ID NO: 9678 - protein, 163 aa, Zea mays
  misc_feature (50)..(50): Xaa can be any naturally occurring amino acid
  misc_feature (163)..(163): Xaa can be any naturally occurring amino acid
  Coding DNA Sequence Number=SeqID_3436
  Gene Ontology: Mol. function=nickel ion binding; Cellular component =cytosol; Biological process=nitrogen compound metabolic process
  Homolog annotation: Hit_ID=A3B6V5; Match level="QueryCoverage=92%, HitCoverage=29%, E-value=2e-51, Identity=70%"; Hit description =Putative uncharacterized protein
  Pfam annotation: Domain name=cobW; Domain location=4-151; Score=62.5; E_value=1.5e-15; Accession=PF02492.9; Description=Cobalamin synthesis proteinP47K
AFSICSLHIQVTNDIFTKEDGEFLIKHGALPEERIRAVETGGCPHAVIRXDISMHLGGLEKFHQSSLKECPLCLFHADNLAANFTRELAGSIIFLIDVFGGGKIPKKGGPGITPADLLVINKTDLAPAVGADLSVMERNALCMREGGPFVFAQVKHGVGVEGX

SEQ ID NO: 9679 - protein, 180 aa, Zea mays
  misc_feature (80)..(80): Xaa can be any naturally occurring amino acid
  misc_feature (95)..(95): Xaa can be any naturally occurring amino acid
  Coding DNA Sequence Number=SeqID_3437
  Gene Ontology: Mol. function=phosphoprotein phosphatase activity; Cellular component=cytosol; Biological process=protein amino acid dephosphorylation
  Homolog annotation: Hit_ID=Q9SX52; Match level="QueryCoverage=54%, HitCoverage=31%, E-value=3e-35, Identity=78%"; Hit description =Phytochrome-associated serine/threonine protein phosphatase 1
  Subcellular localization annotation: CTP_CleavageSite=87; ConfidenceScore=5.39e-01
RSNHNLAFFSGAAPSIWSVPFWPPVSPGAEEPPIARRGFPSPSTVPPSSPIPSSQIPHTRFPPGRPRVPPWIVDLWISKXVREGQHRAEHELQVXFCEFGKEILIEKESNVQPVNSPVTVCGDIHGQYHDLMKLFATVGHVPYTNYIFMGDFVDRGFNSLEVFTILLAFKPFLKNNRKRY

SEQ ID NO: 9680 - protein, 129 aa, Zea mays
  misc_feature (13)..(13): Xaa can be any naturally occurring amino acid
  misc_feature (36)..(36): Xaa can be any naturally occurring amino acid
  misc_feature (38)..(38): Xaa can be any naturally occurring amino acid
  misc_feature (45)..(48): Xaa can be any naturally occurring amino acid
  misc_feature (63)..(63): Xaa can be any naturally occurring amino acid
  misc_feature (83)..(83): Xaa can be any naturally occurring amino acid
  Coding DNA Sequence Number=SeqID_3438
  Gene Ontology: Mol. function=protein binding; Cellular component =signalosome; Biological process=red or far red light signaling pathway
  Homolog annotation: Hit_ID=Q9FVN4; Match level="QueryCoverage=98%, HitCoverage=28%, E-value=2e-37, Identity=69%"; Hit description =RCOP11 protein
  Pfam annotation: Domain name=PCI; Domain location=19-124; Score=33.1; E_value=1e-06; Accession=PF01399.17; Description=PCI domain
KSKVIDNINFPGXFLELVPEVRELVNDFYASRYGSXLXHLEKLKXXXXLSDIHVHQHVETLYXEIRHKAIIQYALPFISVDLXAMAGAFKTSVSMCRRSWSLLITEAQIQEGIGSPTNILCARRAQQIK

SEQ ID NO: 9681 - protein, 94 aa, Zea mays
  Coding DNA Sequence Number=SeqID_3439
  Gene Ontology: Mol. function=2 iron, 2 sulfur cluster binding; Biological process=electron transport
  Homolog annotation: Hit_ID=Q6AUV1; Match level="QueryCoverage=38%, HitCoverage=2%, E-value=9e-12, Identity=88%"; Hit description =Xanthine dehydrogenase, putative
  Pfam annotation: Domain name=Fer2; Domain location=19-86; Score=21.2; E_value=0.0031; Accession=PF00111.17; Description=2Fe-2S iron-sulfur cluster binding domain
SSCPEGHARGQQRFGRENVHEFSQQRHEDSGGHALLLKFYIGLRGTKLGCGEGGCGACTVMVSCYDRITKKSLHFAINACLAPLYSVEGMHIPQ

SEQ ID NO: 9682 - protein, 267 aa, Zea mays
  misc_feature (176)..(176): Xaa can be any naturally occurring amino acid
  misc_feature (187)..(187): Xaa can be any naturally occurring amino acid
  misc_feature (235)..(235): Xaa can be any naturally occurring amino acid
  Coding DNA Sequence Number=SeqID_3440
  Homolog annotation: Hit_ID=Q6ZCG3; Match level="QueryCoverage=99%, HitCoverage=99%, E-value=1e-108, Identity=81%"; Hit description =Putative uncharacterized protein P0486F07.20
MAAAQPKPAKRLGGMAEALAIAADLGFPASTTQEDRTSSDKSDDLVKVLRELTVVQRNIANLQVELQGRKDDKNIAHLTHVSEMEKKCESLARMTAILKDVIQNKDRIIARLQQPYSLDCIPVEAEYQKQFSELLLKAASDYGALTASVGDFQWSQNFRESPAVWGGKGGDRFPAXALASGTRFFEXAMSARRESFSPLQKLRVGRSSRPITPSASSADSKVGPPPQWRGGSNPXSWKQMEATTLESSGIDPMNQRRWSWPSIKRPP

SEQ ID NO: 9683 - protein, 187 aa, Zea mays
  misc_feature (1)..(2): Xaa can be any naturally occurring amino acid
  Coding DNA Sequence Number=SeqID_3441
XXVQDTCVQQGHSHRPHSLSSSWECTHPSHGGSSLPIFPQPTFPIDAAAPVSCTLVAPAPSHGPVRPPVSYLPTPYLPHDTFPPSLSSQPWTPLAVSSLQPSPSPSPSMLSSRPGLHQQLAQHRAPSSPAWRPASVARPPRPAASSSFPLAMNVVDPLLQFLHVVWSSTARVTCSWLWETSEPLLTT

SEQ ID NO: 9684 - protein, 113 aa, Zea mays
  Coding DNA Sequence Number=SeqID_3443
  Gene Ontology: Mol. function=protein disulfide oxidoreductase activity; Cellular component=cytoplasm; Biological process=cell redox homeostasis
  Homolog annotation: Hit_ID=Q4W1F6; Match level="QueryCoverage=95%, HitCoverage=88%, E-value=9e-38, Identity=73%"; Hit description =Thioredoxin h2 protein
  Pfam annotation: Domain name=Thioredoxin; Domain location=3-103; Score=87.6; E_value=3.9e-23; Accession=PF00085.10; Description =Thioredoxin
ASPTKGEFDAPMTKAQETGKLVVIDFPPPWCGPCRAIAPLFVEPPQKFPQVVFLKVDVAQMKEVPPAFEVEGMPPFPFVKNGKTVPPLVGARKEELLAQIEKHVAPAPGFGFA

SEQ ID NO: 9685 - protein, 163 aa, Zea mays
  Coding DNA Sequence Number=SeqID_3444
  Gene Ontology: Mol. function=oxidoreductase activity, acting on the CH-OH group of donors, NAD or NADP as acceptor; Cellular component =glycerol-3-phosphate dehydrogenase complex; Biological process =glycerol-3-phosphate catabolic process
  Homolog annotation: Hit_ID=Q8S2G5; Match level="QueryCoverage=52%, HitCoverage=18%, E-value=4e-37, Identity=84%"; Hit description =Glycerol-3-phosphate dehydrogenase-like protein
MDGSSVDARATTLRAGGTDGGQIYVLNDTIRKKGRPGLQPRQPPPRSAPDAHDMVLIFNALMEGMALFLKCIWLKPGVPTENILYLGGPNIASEIYNKEYANARICGSNKWRKPLAKFLRQPHFIVWDNSDLVTHEVMGGLKNVYAIGAGNTNFCTNRIVSST

SEQ ID NO: 9686 - protein, 166 aa, Zea mays
  misc_feature (49)..(49): Xaa can be any naturally occurring amino acid
  Coding DNA Sequence Number=SeqID_3445
  Gene Ontology: Mol. function=protein binding
  Homolog annotation: Hit_ID=A2Z8E5; Match level="QueryCoverage=71%, HitCoverage=28%, E-value=3e-34, Identity=60%"; Hit description =Putative uncharacterized protein
  Pfam annotation: Domain name=LRR_1; Domain location=25-47; Score =15.7; E_value=0.17; Accession=PF00560.23; Description=Leucine Rich Repeat
  Pfam annotation: Domain name=LRR_1; Domain location=49-71; Score =15.5; E_value=0.21; Accession=PF00560.23; Description=Leucine Rich Repeat
  Pfam module annotation: Pfam domain module=LRR_1::LRR_1; Domain location=25-47::49-71
APTVDIGNNRFYGDIPRWIGTFVPALKILRLSSNNFSGQIPPELSQLSXLQLLDLAHNGLTGLIPRELGDLASMKHPKINSNTGSLDGSIYQDRIDIIWKGQELTFQRILELMTGIDLEGAGAHVLEDTRADEDSGSHQVTPPPHDDFADRCLNTSGGATNNNPVF

SEQ ID NO: 9687 - protein, 196 aa, Zea mays
  Coding DNA Sequence Number=SeqID_3446
  Gene Ontology: Mol. function=catalytic activity; Cellular component =cytoplasm; Biological process=fructose 2,6-bisphosphate metabolic process
  Homolog annotation: Hit_ID=Q0UCB4; Match level="QueryCoverage=95%, HitCoverage=52%, E-value=3e-92, Identity=83%"; Hit description =Putative uncharacterized protein
  Pfam annotation: Domain name=PGAM; Domain location=1-97; Score=-10.5; E_value=0.016; Accession=PF00300.12; Description=Phosphoglycerate mutase family
GRVGGRVGLASMGYRVRQRSQMSQMNPGVCEKMSEAKIREEFPDEVTKHEADPYHHRYPRAESYHDLAVRMEPIILELEREENDLLIIAHESVLRVLYGYLMACNAADIPKLEFPRDEIIEIIPSSYNNVAKRIKIPDLPESMVPGSPEDIKIPVPPSGAVSPLSGMGTPQAGSGTATPQHGIQPLNLKSHINPSS

SEQ ID NO: 9688 - protein, 239 aa, Zea mays
  Coding DNA Sequence Number=SeqID_3447
  Gene Ontology: Mol. function=structural constituent of ribosome; Cellular component=intracellular; Biological process=translation
  Homolog annotation: Hit_ID=Q0UL29; Match level="QueryCoverage=100%, HitCoverage=100%, E-value=1e-123, Identity=89%"; Hit description =Putative uncharacterized protein
  Pfam annotation: Domain name=Ribosomal_S6e; Domain location=1-127; Score=294.4; E_value=2.3e-85; Accession=PF01092.9; Description =Ribosomal protein S6e
MKLNISYPNNGTQKLIEIEDERKLRVFVDRRMGQEVPGDSVGDEFKGYIFRITGGNDKQGFPMKQGVMHPTRVRLLLGEGHSCYRPRRDGERKRKSVRGCIVALDLSVLALSIVKKGDAEIPGVTDVVHPKRLGPKRATKLRRFFGLSKEDDVRKFVIRREVQPKKEGAKPYTKAPKIQRLVTPQRLQHKRHRVALKRRRAEASKDAANEYAQILHKRINEAKSAHDEAKKRRASSMKH

SEQ ID NO: 9689 - protein, 143 aa, Zea mays
  misc_feature (101)..(101): Xaa can be any naturally occurring amino acid
  misc_feature (134)..(134): Xaa can be any naturally occurring amino acid
  misc_feature (143)..(143): Xaa can be any naturally occurring amino acid
  Coding DNA Sequence Number=SeqID_3448
  Gene Ontology: Mol. function=oxidoreductase activity, acting on paired donors, with oxidation of a pair of donors resulting in the reduction of molecular oxygen to two molecules of water; Cellular component=membrane; ...
  Gene Ontology: Cellular component=Biological process=lipid metabolic process
  Homolog annotation: Hit_ID=Q1T6Y2; Match level="QueryCoverage=98%, HitCoverage=36%, E-value=1e-60, Identity=84%"; Hit description=Delta- 12 fatty acid desaturase
MGAGGRMTEKEREKQEQLARATGGAEMQRSPVEKPPFTLGQIKKAIPPHCFERSVLKSFSDVVHYLVIAVELLYFALAIIPVLPSPLRYCRWPLYWIAQGXVCTDVWVIAHECGHHTVLDYSLLYYVNLLWLHXSAFMVPYLX

SEQ ID NO: 9690 - protein, 202 aa, Zea mays
  Coding DNA Sequence Number=SeqID_3449
  Gene Ontology: Mol. function=protein binding; Cellular component =ribonucleoprotein complex; Biological process=translation
  Homolog annotation: Hit_ID=Q0TY34; Match level="QueryCoverage=100%, HitCoverage=100%, E-value=1e-100, Identity=89%"; Hit description =Ribosomal protein S8
  Pfam annotation: Domain name=Ribosomal_S8e; Domain location=1-188; Score=345.0; E_value=1.3e-100; Accession=PF01201.12; Description =Ribosomal protein S8e
  Subcellular localization annotation: CTP_CleavageSite=25; ConfidenceScore=5.09e-01
MGISRDSRHKRSASGAKRAYYRKKRAFEKGRQPANTRIGTKRIHLVRTRGGNRKFRALRLESGNFSWGSEGIAKKTRVIGVVYHPSNNELVRTNTLTRSAIVQIDAAPFRQWYEAHYGSSLGRRRQAKAGEKEEDKKKSNSVTKKQAERLKTSGKIENAVEKQFEAGRLYAAVSSRPGQSGRCDGYVLEGEELAFYQRLLRK

SEQ ID NO: 9691 - protein, 136 aa, Zea mays
  Coding DNA Sequence Number=SeqID_341
RVLLHLSWPWGHARRSRLIFLLRTVEREREGSRARRRRWRAEGRDSTRLGSSSGGGTSGGGTLWRGTSCATPHPGSASPSSPSGSTSSARPPTTASTAPPATTTTRSPAGSVTRSRSWSQLYQALVLVDVFTVLSS

SEQ ID NO: 9692 - protein, 296 aa, Zea mays
  Coding DNA Sequence Number=SeqID_342
  Gene Ontology: Mol. function=ARF guanyl-nucleotide exchange factor activity; Cellular component=intracellular; Biological process =regulation of ARF protein signal transduction
  Homolog annotation: Hit_ID=A5BJQ1; Match level="QueryCoverage=80%, HitCoverage=16%, E-value=9e-32, Identity=36%"; Hit description =Putative uncharacterized protein
MGRPRMLTAAGGIDPIAEEPHHARSPADGGLGPDPAALACAISAEASTVLAVMRRGLRHPRATAADDAAAEHPLVASLRGLRRLVFSPSPSAAAALPAAALRPFLDAVRSEDAGAAATSASLAALHEVMSLTGPALPGAALREVVDAVASCRFEAGTEPAAEEAVLMRMLQALLACLRAPAAPALGDQHVCTAVNTCFRVVHQAAAKGELLQRFSRHVMHELIRCIFARLPQIGGADGVDGAVKPRGKRVLAAAINSHTSCAELTNASQPCISFLTNDFTTGYYKTLVATTHSGIL

SEQ ID NO: 9693 - protein, 168 aa, Zea mays
  Coding DNA Sequence Number=SeqID_343
  Subcellular localization annotation: CTP_CleavageSite=21; ConfidenceScore=5.35e-01
AGTILNSSSPPARPPHLPSCRRMLQSAEPPSRPIDCTVASPPATTRQLVTQHRQRAKAAPNHRRLVVGGPIYSAGGCRSTHHFAGRSLPASVSSASADFADACRCLLLVEARHRRSLLPSYAGGRFASPTVLRRCCSLQPSQRGEPASVEAFQRRSIASSVRRHTQWD

SEQ ID NO: 9694 - protein, 70 aa, Zea mays
  Coding DNA Sequence Number=SeqID_345
FQYLLAIAAMRGDRGKAVAGRRHELWVCASLRIRAPSSADLLHWRSEVTCHLKSKLVPEISSPRSRTGTA

SEQ ID NO: 9695 - protein, 492 aa, Zea mays
  misc_feature (112)..(112): Xaa can be any naturally occurring amino acid
  misc_feature (455)..(455): Xaa can be any naturally occurring amino acid
  Coding DNA Sequence Number=SeqID_347
  Gene Ontology: Mol. function=transferase activity, transferring glycosyl groups; Cellular component=cytoplasm; Biological process =metabolic process
  Homolog annotation: Hit_ID=A2X6F5; Match level="QueryCoverage=98%, HitCoverage=56%, E-value=0.0, Identity=67%"; Hit description =Putative uncharacterized protein
  Pfam annotation: Domain name=UDPGT; Domain location=11-488; Score= -30.8; E_value=4.7e-09; Accession=PF00201.9; Description=UDP -glucoronosyl and UDP-glucosyl transferase
  Subcellular localization annotation: CTP_CleavageSite=35; ConfidenceScore=5.02e-01
VPADAAGKPHAVLVPFPAQGHVTPMLKLAKILHCRGFHVTFVNSEYNRRRLLRSRGADALDGLPGFRFATIPDGLPPSDTDATQDVPSLCRSTEETCLPHFRALLQCLNASXLSPDVPLVTCVVGDDIMGFTLDAAREIGVPCALFWTASTCGYMGYRYYRTLIDKGIFPLKEEQLTNGFLDTPVEFAPPGMSKHMRLKDFPSFMRSTDPYEFMVHYAVRVTDHTAGADAVLLNTFDELEQEALDAMRAVISSAASINTIGPLTLLAEQIVPRGSQLDSLGSNLWKEDASCFRWLDGRKPRSVVFVNYGSVTVMTSAELVEFAWGLANSGHDFLWIIRPDLVSGDAAVLPPEFQEAIEGRGLLANWCAQDAVLRHEAVGVFLTHSGWNSTLESLCAGVPMLCWPFFAEQQTNCRYTCAEWGVEIGHDVRREAVEEKIREAMGGEKGKEMRRRLAXAVEWRETAVRATRPGGRSYANLEKLVTDVLLSGGKNY

SEQ ID NO: 9696 - protein, 118 aa, Zea mays
  Coding DNA Sequence Number=SeqID_348
SCSLPARFCHSTQTRRCRTRRKSEGKSQIGWGKAVASWPRVEPLLEESSISCRKFSSEKPTGSALIAHQSITSVVAPHLTMVGPLGPRCKRRSGGSRGATQRGVPFNLGGISQLTFWR

SEQ ID NO: 9697 - protein, 172 aa, Zea mays
  Coding DNA Sequence Number=SeqID_350
INRSQENLAARTAPTLPASNHHQRLTIGILGTYVARRMEQPAAGGVENAFFQTKEALAHLKQTATPGSCAGSGGATNESLICSAPPPGSFCVRPVHFWFFFLPSRSSTSPNQLPLGGLLGQLGLEAAHPACPLLFIFFNKVKTQNGQQMQQSDDGDRRRTAIEKQSIVEIEW

SEQ ID NO: 9698 - protein, 146 aa, Zea mays
  misc_feature (93)..(93): Xaa can be any naturally occurring amino acid
  Coding DNA Sequence Number=SeqID_352
  Gene Ontology: Mol. function=protein serine/threonine kinase activity; Biological process=protein amino acid phosphorylation
  Homolog annotation: Hit_ID=A2ZU54; Match level="QueryCoverage=95%, HitCoverage=20%, E-value=6e-61, Identity=80%"; Hit description =Putative uncharacterized protein
MALEVLPEESNRCVRGCCRSATIPLDLRSASFSLLAPIARGSESTVYEALLGGERAAAKKPVLSTAEDLDKFHYQLQLLCKLDHPGLAKLIAXHAHPPAYLMFFDFFEPPNLAEKIHVEEWIPSIQQVVTMASDLGLCLLHILCYS

SEQ ID NO: 9699 - protein, 197 aa, Zea mays
  Coding DNA Sequence Number=SeqID_353
  Gene Ontology: Mol. function=metal ion binding; Cellular component =integral to membrane; Biological process=ubiquitin cycle
  Homolog annotation: Hit_ID=A3C0Z8; Match level="QueryCoverage=84%, HitCoverage=73%, E-value=3e-42, Identity=56%"; Hit description =Putative uncharacterized protein
  Pfam annotation: Domain name=PHD; Domain location=128-174; Score= -5.8; E_value=0.064; Accession=PF00628.19; Description=PHD-finger
  Pfam annotation: Domain name=zf-C3HC4; Domain location=129-171; Score= 41.5; E_value=3e-09; Accession=PF00097.15; Description=Zinc finger, C3HC4 type (RING finger)
  Pfam module annotation: Pfam domain module=PHD::zf-C3HC4; Domain location=128-174::129-171
  Subcellular localization annotation: CTP_CleavageSite=31; ConfidenceScore=5.21e-01
SDRSPCAARGSSSPGRRSRWPSDPSLDAPQRAQLERAIGATTTVLFVATVSYVALSAIFSCLCTGGGSSQRRQQPDGSDTGPQRPSAAAEETKRALEEIPVVVVAAQVTRDPAGSGGGAEDGSEEPGECAVCLAEYAGGEEVRVLPACRHGFHRACVDRWLLTRAPTCPVCRAPVAAHAEPPDAKDRSTGDVDAALP

SEQ ID NO: 9700 - protein, 93 aa, Zea mays
  Coding DNA Sequence Number=SeqID_354
PNQDPTGFTMSMLYIIKTHLGLPYRVMSSGNPQIKIMVNRVRSPPFVGAVIPIYMNIILYTQKIGKWLLDCNSQIIRSVSPSVHCPPEARTAH

SEQ ID NO: 9701 - protein, 157 aa, Zea mays
  Coding DNA Sequence Number=SeqID_356
RPGNGDRSVIEGPRGDTLDRALAARSRETLPIVVNWLPEFLHNRAPNSPVGGRRHVVITDKQVTEESGAQLVEETEQELAEGTISWRSPKELQVKTLSSSWLVKVVHVATTAQEKMKSWRRTSRSSKSTMSSRRGLAANPQSAACEGRVYLRFISAH

SEQ ID NO: 9702 - protein, 249 aa, Zea mays
  misc_feature (16)..(16): Xaa can be any naturally occurring amino acid
  misc_feature (56)..(56): Xaa can be any naturally occurring amino acid
  misc_feature (86)..(86): Xaa can be any naturally occurring amino acid
  misc_feature (99)..(99): Xaa can be any naturally occurring amino acid
  misc_feature (155)..(155): Xaa can be any naturally occurring amino acid
  Coding DNA Sequence Number=SeqID_3450
  Gene Ontology: Mol. function=protein binding; Cellular component=SCF ubiquitin ligase complex
  Homolog annotation: Hit_ID=A2ZD70; Match level="QueryCoverage=91%, HitCoverage=44%, E-value=3e-48, Identity=45%"; Hit description =Putative uncharacterized protein
TGMFPLPMVQRERQLXNRMKTWEGENCPEAYKTGCKGDHEAQLTPAEDDIDCKHPXPTRGKDEFTKAELAINEDPDTKKSMCTYGXIAGSTYHDHCVNXRIGTPLEQRCQETKDFYQQDLEVSHGRKHIGVRTLWFHPKTYLIEWSNGELYVGTXYNLPIGGMLPCVPKALINPAGNDLAQEGLLLWLEEHLRRLQSGMIKTRMLMASRYISLYPEAPPSCSSAVTNGIKNILGGLGKNYVHLLNSHVS

SEQ ID NO: 9703 - protein, 53 aa, Zea mays
  Coding DNA Sequence Number=SeqID_3451
  Homolog annotation: Hit_ID=Q9SLX6; Match level="QueryCoverage=90%, HitCoverage=17%, E-value=3e-10, Identity=60%"; Hit description=TRAB1
QKLMERNAELQKTQEHMMEMQHNQVPVLVSNPYAQKKRCLPRTLTGPWSLSWC

SEQ ID NO: 9704 - protein, 129 aa, Zea mays
  Coding DNA Sequence Number=SeqID_3452
  Gene Ontology: Mol. function=catalytic activity
  Homolog annotation: Hit_ID=Q5TKP0; Match level="QueryCoverage=77%, HitCoverage=25%, E-value=2e-45, Identity=87%"; Hit description =Putative uncharacterized protein OJ1362_G11.17
MHAATYSLKFHLYYSDSARGVFFQEYVKGISSTGMQSNCGFEGQINACWTHNMTTKELDTIRSAGFLVSVIHGRYDIIAQLCHAKRLAESLLPVARMVELHGAHLVSHERPDEVKGGPLIKQQHVPLKH

SEQ ID NO: 9705 - protein, 47 aa, Zea mays
  Coding DNA Sequence Number=SeqID_3453
YESEFYLVPYHYGISSWSNLIECQINVLRLKNIGFCKKAGFDRAVVD

SEQ ID NO: 9706 - protein, 146 aa, Zea mays
  Coding DNA Sequence Number=SeqID_3455
  Gene Ontology: Mol. function=hydrolase activity, acting on carbon -nitrogen (but not peptide) bonds
  Homolog annotation: Hit_ID=A2WW59; Match level="QueryCoverage=57%, HitCoverage=15%, E-value=8e-15, Identity=51%"; Hit description =Putative uncharacterized protein
MGPPPEKRRTLVLVNLASIMERADEALLPAVYPESGAPRCTPRPSRIGALTYVPVHRAGRLPPGVALDGDTAQPLPRPRADGLPRGLVPHLSLQMELMLPATIDDFFIEHAAALSRGTTMHIDFVILVCGNLTAGLKSYNHTAAKA

SEQ ID NO: 9707 - protein, 78 aa, Zea mays
  Coding DNA Sequence Number=SeqID_3456
QMGLAGQILKLGGRGITNGRGKHLHPFGQTHIYQTFFPVTNTGNGEAFGNSGPLGIWISPLVWSRMALLYIRAEVDFV

SEQ ID NO: 9708 - protein, 255 aa, Zea mays
  misc_feature (88)..(255): Xaa can be any naturally occurring amino acid
  Coding DNA Sequence Number=SeqID_3458
LAFVPRPCSFCHYLALHTLIQIPLSSSTSGLSLICAVARILHPHFSSFPLFTHSYTLHRGYAYNIRRISSYLYMRALAHRSPPPKNLXXXXXXXXXXXXXXXXXXXXXXXXXXXXXXXXXXXXXXXXXXXXXXXXXXXXXXXXXXXXXXXXXXXXXXXXXXXXXXXXXXXXXXXXXXXXXXXXXXXXXXXXXXXXXXXXXXXXXXXXXXXXXXXXXXXXXXXXXXXXXXXXXXXXXXXXXXXXXXXXXXXXXXXX

SEQ ID NO: 9709 - protein, 103 aa, Zea mays
  Coding DNA Sequence Number=SeqID_3460
  Gene Ontology: Mol. function=serine carboxypeptidase activity; Cellular component=extracellular region; Biological process =proteolysis
  Homolog annotation: Hit_ID=Q10KF4; Match level="QueryCoverage=89%, HitCoverage=18%, E-value=1e-26, Identity=63%"; Hit description =Serine carboxypeptidase II-3, putative, expressed
YVSSEFGSRKLIPSGPRIWLHRGDLDAVCSFISTQYVLDNVGLPIEAAWRAWHVDNEGAGYAIGYKGLVFATARGAGHMEPYYQPRRALALFSSFLEGELPPR

SEQ ID NO: 9710 - protein, 73 aa, Zea mays
  Coding DNA Sequence Number=SeqID_3461
  Gene Ontology: Mol. function=small conjugating protein ligase activity; Biological process=regulation of protein metabolic process
  Homolog annotation: Hit_ID=Q5RLI8; Match level="QueryCoverage=86%, HitCoverage=12%, E-value=2e-20, Identity=77%"; Hit description =Ubiquitin-conjugating enzyme E2
MATRASKNCLCAGSSSFDDPDVVEVSPATAAAAGWASGHHKRKRSQLVPQEGIAIDHDDPDGVYGDPIPQNRG

SEQ ID NO: 9711 - protein, 112 aa, Zea mays
  misc_feature (39)..(39): Xaa can be any naturally occurring amino acid
  Coding DNA Sequence Number=SeqID_3462
  Homolog annotation: Hit_ID=A2YN84; Match level="QueryCoverage=99%, HitCoverage=13%, E-value=5e-28, Identity=56%"; Hit description =Putative uncharacterized protein
  Pfam annotation: Domain name=PPR; Domain location=63-97; Score=16.9; E_value=0.076; Accession=PF01535.11; Description=PPR repeat
GKKGQMKEAQGLFSKIKGSGVKPDIVTYHIFIKSYVAQXMFAQEAINLCEVKVSIHCTRLQLRTFNSILQGYSRHGRMVEAKSFLSNLPKIYPGISKQEKQRLSELLAKHTS

SEQ ID NO: 9712 - protein, 186 aa, Zea mays
  misc_feature (185)..(185): Xaa can be any naturally occurring amino acid
  Coding DNA Sequence Number=SeqID_3463
SSLTFHTPSRPYVACRILRQPASSPADDGRKNSGPAARRRAGDHLRHRGGDPSSHCGGGGGRGGRGEVWRLLSVRRRRLPGAVPVAAPAAVLLLQPSPTRDLPRGVLVVLHAAAAGRVHPDRERAAGQGPAVPAGPRVHPGRRAGPRRAARGRRCARGGVGVRMGPLVISMGLTLTSPSELDIRXQ

SEQ ID NO: 9713 - protein, 93 aa, Zea mays
  misc_feature (14)..(14): Xaa can be any naturally occurring amino acid
  misc_feature (24)..(24): Xaa can be any naturally occurring amino acid
  misc_feature (35)..(35): Xaa can be any naturally occurring amino acid
  misc_feature (54)..(54): Xaa can be any naturally occurring amino acid
  Coding DNA Sequence Number=SeqID_3464
  Gene Ontology: Mol. function=structural constituent of ribosome; Cellular component=ribonucleoprotein complex; Biological process =translation
  Homolog annotation: Hit_ID=Q0H634; Match level="QueryCoverage=97%, HitCoverage=42%, E-value=4e-28, Identity=71%"; Hit description =Putative ribosomal protein
  Pfam annotation: Domain name=Ribosomal_S5_C; Domain location=3-59; Score=17.2; E_value=8.1e-05; Accession=PF03719.5; Description =Ribosomal protein S5, C-terminal domain
SSSGIVPARVPNKXLQFAGIDDAXTLSRGYTKTLXNLAKATYHWLEKTYSFLTXPEYWTQTKPSMAPFQQYTDLLAKPTKGLVLQAPTVTLDA

SEQ ID NO: 9714 - protein, 64 aa, Zea mays
  Coding DNA Sequence Number=SeqID_3465
  Gene Ontology: Mol. function=protein transporter activity; Cellular component=clathrin adaptor complex; Biological process=intracellular protein transport
  Homolog annotation: Hit_ID=A2Y9S0; Match level="QueryCoverage=82%, HitCoverage=6%, E-value=1e-21, Identity=98%"; Hit description =Putative uncharacterized protein
VNVAEQVETSFQVSTKTESNKNAGNAILYECVETIMGIEATSGLRVLAINILGRFLSNRDNNIR

SEQ ID NO: 9715 - protein, 98 aa, Zea mays
  misc_feature (8)..(8): Xaa can be any naturally occurring amino acid
  Coding DNA Sequence Number=SeqID_3466
FDLVFLIXRAPVVINYGRTYIYIHYAQEEGALCIREEWGTDLWVGGRGVSVCLSVLYMAYRSPMQRGRALALRWHSFGTWIKNKFHFILGAWTRGVHP

SEQ ID NO: 9716 - protein, 355 aa, Zea mays
  misc_feature (1)..(1): Xaa can be any naturally occurring amino acid
  misc_feature (325)..(355): Xaa can be any naturally occurring amino acid
  Coding DNA Sequence Number=SeqID_3468
XWHADAAGRRRRPVDGEEPAEEPQQERPPSRRPAAAPAPSAAVAGAGAAELARPAGARRRAQHGGRAPVPAPLRGRRRRRLLAVGLVVGARRRRVVTEVPVVVVVVVVVSQAPRRLGVGVGAAGVLGGGLGAAGLGLGTCRRRTTRSSLKLSHSLSILSASASAAARCLSSAAAARRSGGGPAWGLTTALPADSGAGAGAVATGMVVSVLSHSRSILSSSSSSVTGGDDGGAAVVVVVLGVEPANGHRGEVVPARVGLGGGGSWSRCGTGSSSSGRPSGAVGPRAAATVGKVKSSSSMALRCAVVFARALRFGLLASSAGCCSLXXXXXXXXXXXXXXXXXXXXXXXXXXXXXXX

SEQ ID NO: 9717 - protein, 163 aa, Zea mays
  misc_feature (21)..(21): Xaa can be any naturally occurring amino acid
  misc_feature (25)..(27): Xaa can be any naturally occurring amino acid
  misc_feature (30)..(30): Xaa can be any naturally occurring amino acid
  misc_feature (34)..(35): Xaa can be any naturally occurring amino acid
  misc_feature (37)..(37): Xaa can be any naturally occurring amino acid
  misc_feature (41)..(42): Xaa can be any naturally occurring amino acid
  misc_feature (45)..(45): Xaa can be any naturally occurring amino acid
  misc_feature (48)..(48): Xaa can be any naturally occurring amino acid
  misc_feature (52)..(52): Xaa can be any naturally occurring amino acid
  misc_feature (58)..(58): Xaa can be any naturally occurring amino acid
  misc_feature (65)..(65): Xaa can be any naturally occurring amino acid
  misc_feature (70)..(70): Xaa can be any naturally occurring amino acid
  misc_feature (72)..(72): Xaa can be any naturally occurring amino acid
  misc_feature (78)..(79): Xaa can be any naturally occurring amino acid
  misc_feature (81)..(81): Xaa can be any naturally occurring amino acid
  misc_feature (89)..(89): Xaa can be any naturally occurring amino acid
  misc_feature (93)..(93): Xaa can be any naturally occurring amino acid
  misc_feature (102)..(102): Xaa can be any naturally occurring amino acid
  misc_feature (106)..(106): Xaa can be any naturally occurring amino acid
  misc_feature (118)..(118): Xaa can be any naturally occurring amino acid
  misc_feature (121)..(121): Xaa can be any naturally occurring amino acid
  misc_feature (141)..(142): Xaa can be any naturally occurring amino acid
  misc_feature (144)..(144): Xaa can be any naturally occurring amino acid
  misc_feature (149)..(149): Xaa can be any naturally occurring amino acid
  misc_feature (155)..(155): Xaa can be any naturally occurring amino acid
  misc_feature (158)..(158): Xaa can be any naturally occurring amino acid
  misc_feature (160)..(160): Xaa can be any naturally occurring amino acid
  Coding DNA Sequence Number=SeqID_3470
  Gene Ontology: Mol. function=serine-type endopeptidase activity; Cellular component=intracellular; Biological process=protein modification process
  Homolog annotation: Hit_ID=Q0WRN6; Match level="QueryCoverage=99%, HitCoverage=96%, E-value=2e-16, Identity=42%"; Hit description =Polyubiquitin 4 UBQ4
  Pfam annotation: Domain name=ubiquitin; Domain location=28-96; Score =25.2; E_value=0.00024; Accession=PF00240.13; Description=Ubiquitin family
FVRSAHTHNQISPKTRRHLRXKKQXXXKTXTGKXXTXEGEXXDTXDNXKAKXQDKEGXPPDQQRXRGGGXQXEDGRTXXDXNSQRESTXHQGXRPRGGRQNXGKTXTGKTNTREGEPXDRXDNDKAKNQDKEGKPPGPGAXXPXQGRTXEDGRTXGDXDXQKE

SEQ ID NO: 9718 - protein, 98 aa, Zea mays
  Coding DNA Sequence Number=SeqID_3471
  Subcellular localization annotation: CTP_CleavageSite=51; ConfidenceScore=5.22e-01
PAPLLLPLGRRPPCPPPHPSIVAATKTLAAPPIPSSLGATPCRSDHRLLVRISNRFGGGKKGGRNRGEPKVVDFRIDLRDFVRTSVKAPDLCFGKEGM

SEQ ID NO: 9719 - protein, 80 aa, Zea mays
  Coding DNA Sequence Number=SeqID_3473
SWPHSLPCRRNLFIQNIFFLKCSLKLRLKNQKCEDCFVLDILPCLVLLPSPRYCNDYTICWLAKKKKKKKKKSPLRCYHC

SEQ ID NO: 9720 - protein, 390 aa, Zea mays
  misc_feature (187)..(187): Xaa can be any naturally occurring amino acid
  misc_feature (213)..(213): Xaa can be any naturally occurring amino acid
  Coding DNA Sequence Number=SeqID_3475
  Gene Ontology: Mol. function=methionine adenosyltransferase activity; Cellular component=cytosol; Biological process=one-carbon compound metabolic process
  Homolog annotation: Hit_ID=Q2U2Q7; Match level="QueryCoverage=97%, HitCoverage=97%, E-value=1e-166, Identity=76%"; Hit description=S -adenosylmethionine synthetase
  Pfam annotation: Domain name=S-AdoMet_synt_C; Domain location=247 -384; Score=312.3; E_value=8.9e-91; Accession=PF02773.6; Description =S-adenosylmethionine synthetase, C-te
  Pfam annotation: Domain name=S-AdoMet_synt_M; Domain location=123 -245; Score=309.0; E_value=8.6e-90; Accession=PF02772.6; Description =S-adenosylmethionine synthetase, cent
  Pfam annotation: Domain name=S-AdoMet_synt_N; Domain location=11-110; Score=229.5; E_value=7.5e-66; Accession=PF00438.10; Description=S -adenosylmethionine synthetase, N-te
  Pfam module annotation: Pfam domain module=S-AdoMet_synt_C::S-AdoMet _synt_M::S-AdoMet_synt_N; Domain location=247-384::123-245::11-110
MTVPNGSAKGNTFLFTSESVGEGHPDKICDQVSDAILDACLKEDPLSKVACETAAKTGMIMVFGEITTKAHLDYQKIIRNAIKDIGYDSSEKGFDYKTCNVLVAIEQQSPDIAQGLHYEEALEKLGAGDQGIMFGYATDETPELLPLTVLLSHKLNAAMTSARKDGSLPWLRPDTKTQVTIEYAHDXGAVIPLRVDTVVVSAQHSEDITTEKXREEIKEKIIKKAIPANMLDDKTVYHIQPSGLFIIGGPQGDAGLTGRKIIVDTYGGWGAHGGGAFSGKDYSKVDRSAAYLARWIAKSLVNAKLARRALVQLSYAIGVSEPLSLFVETYGTSEKSSDELVEIIHKNFDLRPGVIVKELNLIDPIYFQTAKNGHFTNQSFTWEKPKELKF

SEQ ID NO: 9721 - protein, 142 aa, Zea mays
  misc_feature (75)..(75): Xaa can be any naturally occurring amino acid
  misc_feature (82)..(82): Xaa can be any naturally occurring amino acid
  Coding DNA Sequence Number=SeqID_3476
  Subcellular localization annotation: CTP_CleavageSite=38; ConfidenceScore=5.30e-01
SVAVDCSSVPPHSLLRFLAARFLLPDPPLASRFMAMWRADARQVVDRTLGSWARRALSGSVINPGAASSWGGGAXLLFCGAXVLAWSPLLPIRAPPVLWLPGSVGSQGPAGAWPRPVGLGSLSPAALLLGLFFLGVGFLCLP

SEQ ID NO: 9722 - protein, 112 aa, Zea mays
  misc_feature (50)..(51): Xaa can be any naturally occurring amino acid
  Coding DNA Sequence Number=SeqID_3478
  Subcellular localization annotation: CTP_CleavageSite=96; ConfidenceScore=5.45e-01
MAAAAVTSNGGAVAANGPAPAAGSVYSEVQTNRLLHTLPLPSVLRSNFSXXDGPASSAAGNPDEIAGPSTGAGPRYSVIKTRPSLRPDLYSFGSASLDAGSPGSAYSAVSMV

SEQ ID NO: 9723 - protein, 72 aa, Zea mays
  misc_feature (41)..(41): Xaa can be any naturally occurring amino acid
  Coding DNA Sequence Number=SeqID_3479
  Gene Ontology: Mol. function=hydrolase activity, hydrolyzing O -glycosyl compounds; Biological process=carbohydrate metabolic process
  Homolog annotation: Hit_ID=O81638; Match level="QueryCoverage=87%, HitCoverage=6%, E-value=3e-13, Identity=65%"; Hit description =Pullulanase-type starch debranching enzyme
LPLLQVIRPTKTINYAYARDNETLFDIISVKVWMNLSIDKXCRINNLSTSMIALSHVLMKFTAGQQTPGSKV

SEQ ID NO: 9724 - protein, 176 aa, Zea mays
  misc_feature (133)..(176): Xaa can be any naturally occurring amino acid
  Coding DNA Sequence Number=SeqID_3480
LLVRQHFLQSLFLRSNDIYLHINPHWQRPHFATIIIDFKCRTIGCQKKNHSKRQPSIFSPMLPGARPQLFGLRLRGEKDPFYSLLITGLANADKGLGNGVDKRHRNELLDHIQVITKPAIRRVPLTGGAQAYXXXXXXXXXXXXXXXXXXXXXXXXXXXXXXXXXXXXXXXXXXXX

SEQ ID NO: 9725 - protein, 84 aa, Zea mays
  Coding DNA Sequence Number=SeqID_3482
  Gene Ontology: Mol. function=oxidoreductase activity, acting on NADH or NADPH; Cellular component=mitochondrial respiratory chain; Biological process=electron transport
  Homolog annotation: Hit_ID=Q7XZW1; Match level="QueryCoverage=98%, HitCoverage=37%, E-value=1e-33, Identity=83%"; Hit description =Putative NADH dehydrogenase
  Pfam annotation: Domain name=Fer4; Domain location=47-70; Score=38.5; E_value=2.4e-08; Accession=PF00037.17; Description=4Fe-4S binding domain
GSVILRAHPRGSARLGNCLLFEQICPAQAITIEAEEREDGSRRTTRYDIDMTKCIYCGFCQEACPVDAIVEGPNFEFATETHEV

SEQ ID NO: 9726 - protein, 98 aa, Zea mays
  Coding DNA Sequence Number=SeqID_3483
  Subcellular localization annotation: CTP_CleavageSite=27; ConfidenceScore=5.37e-01
ARGLSGGARRRRGCRRRSSSPPRSRCRQAARPGSTPRPMRWTRHDGESALRGMRPTRWSTVKADPRHDACRSTGQQAGGFFSSPSSFAVWNHRGYCRI

SEQ ID NO: 9727 - protein, 229 aa, Zea mays
  misc_feature (123)..(123): Xaa can be any naturally occurring amino acid
  misc_feature (155)..(155): Xaa can be any naturally occurring amino acid
  misc_feature (168)..(168): Xaa can be any naturally occurring amino acid
  Coding DNA Sequence Number=SeqID_3485
  Gene Ontology: Mol. function=microtubule motor activity; Cellular component=microtubule associated complex; Biological process =microtubule-based movement
  Homolog annotation: Hit_ID=A3BXJ1; Match level="QueryCoverage=99%, HitCoverage=18%, E-value=5e-57, Identity=55%"; Hit description =Putative uncharacterized protein
  Pfam annotation: Domain name=Kinesin; Domain location=78-228; Score= -96.5; E_value=7.2e-09; Accession=PF00225.13; Description=Kinesin motor domain
MKKETMEGHVPLPLPLLPDGETAVGYSKDAASSSSAALSPLQEEISSLRSRQRRVDRRRREALDRLVDLKGSVRVFCRVRPLAHTNSLHAQSSPVTVEQERITVKAAGIKREFGADRVFGQEXTQEDVFEEVKPILRSALDGHNVCILAYAQTGXTGKTYTMVGRNRXNKLGVVPRAIQELFSRASEDGSCAYSFSMSMLEVYLGSLRDLLAAPRHPLFRRTECKAAAW

SEQ ID NO: 9728 - protein, 122 aa, Zea mays
  Coding DNA Sequence Number=SeqID_3486
  Subcellular localization annotation: CTP_CleavageSite=56; ConfidenceScore=5.52e-01
RQFPDACCRSQSDPFEFNSSATRFLPLTIRFRPRFSRFGIFQVWFRVEKMSRFEIRSSLHESFVSIRIQNHSRAGLEFPLPLLPGTNPGLLPSGSNLGPPAHHWRVATEEAERSDVAAQPRR

SEQ ID NO: 9729 - protein, 240 aa, Zea mays
  misc_feature (2)..(3): Xaa can be any naturally occurring amino acid
  misc_feature (16)..(16): Xaa can be any naturally occurring amino acid
  misc_feature (22)..(23): Xaa can be any naturally occurring amino acid
  misc_feature (27)..(27): Xaa can be any naturally occurring amino acid
  misc_feature (44)..(44): Xaa can be any naturally occurring amino acid
  misc_feature (49)..(50): Xaa can be any naturally occurring amino acid
  misc_feature (53)..(53): Xaa can be any naturally occurring amino acid
  misc_feature (58)..(58): Xaa can be any naturally occurring amino acid
  misc_feature (65)..(65): Xaa can be any naturally occurring amino acid
  misc_feature (78)..(78): Xaa can be any naturally occurring amino acid
  misc_feature (84)..(84): Xaa can be any naturally occurring amino acid
  misc_feature (91)..(91): Xaa can be any naturally occurring amino acid
  misc_feature (98)..(98): Xaa can be any naturally occurring amino acid
  misc_feature (116)..(116): Xaa can be any naturally occurring amino acid
  misc_feature (119)..(120): Xaa can be any naturally occurring amino acid
  misc_feature (124)..(124): Xaa can be any naturally occurring amino acid
  misc_feature (127)..(128): Xaa can be any naturally occurring amino acid
  misc_feature (134)..(134): Xaa can be any naturally occurring amino acid
  misc_feature (139)..(139): Xaa can be any naturally occurring amino acid
  misc_feature (141)..(141): Xaa can be any naturally occurring amino acid
  misc_feature (143)..(143): Xaa can be any naturally occurring amino acid
  misc_feature (149)..(240): Xaa can be any naturally occurring amino acid
  Coding DNA Sequence Number=SeqID_3488
SXXPLHNYYREHRCLXVSRHRXXSCVXQGQRDLGCCSCPGPAHXPSAAXXYLXPPSAXARLALRXAAAGRGCRTTPYXSPGYRXQRAPPAXGLVGKHXLLQRLALCGEDRKGVRRXGLXXGASXELXXHWAQEXGPADXLXDXRRDPNXXXXXXXXXXXXXXXXXXXXXXXXXXXXXXXXXXXXXXXXXXXXXXXXXXXXXXXXXXXXXXXXXXXXXXXXXXXXXXXXXXXXXXXXXXXX

SEQ ID NO: 9730 - protein, 173 aa, Zea mays
  misc_feature (101)..(101): Xaa can be any naturally occurring amino acid
  misc_feature (113)..(113): Xaa can be any naturally occurring amino acid
  misc_feature (147)..(147): Xaa can be any naturally occurring amino acid
  Coding DNA Sequence Number=SeqID_3490
  Gene Ontology: Mol. function=glyceraldehyde-3-phosphate dehydrogenase (phosphorylating) activity; Cellular component=cytoplasm; Biological process=glucose metabolic process
  Homolog annotation: Hit_ID=P08735; Match level="QueryCoverage=100%, HitCoverage=51%, E-value=3e-53, Identity=64%"; Hit description =Glyceraldehyde-3-phosphate dehydrogenase, cytosolic 1
  Pfam annotation: Domain name=Gp_dh_N; Domain location=3-143; Score =68.6; E_value=2e-17; Accession=PF00044.14; Description =Glyceraldehyde 3-phosphate dehydrogen
RNGRFAARASFYREDVDVVAANDPFMTTDYLIYMLKDDTVRGHCKHGDITLKDCKTLLFRDKMGTAFGIRNSEEIPCGDDGANYLLETTGVFTDKDDAGAXLEGVAKKVVISXAPSKDAPMLVAGGNEDKDTSHVHIVSHANCTTGXLLALLTAIHDNFRIVHGLMTTVRGLT

SEQ ID NO: 9731 - protein, 56 aa, Zea mays
  Coding DNA Sequence Number=SeqID_3491
GASAHASAFASDAADGTVGGCFHQATIDVIYWSLPALLRLVTCGRITVVLSGCSNA

SEQ ID NO: 9732 - protein, 182 aa, Zea mays
  misc_feature (1)..(5): Xaa can be any naturally occurring amino acid
  misc_feature (173)..(173): Xaa can be any naturally occurring amino acid
  Coding DNA Sequence Number=SeqID_3493
XXXXXRDTTVTHTRREPRASYLARDGDVRFQDDGGRRPASPGPGRVDRRGKEHQDDDHDDGGGGEEGRRGGAAADLPALRPPRRRRVPGVRWPPRHLVGRQQHSSVQHAGQRQQQPPRRVVPPPPQRQHRQHAPLQRCLHKLNRFRRHARFPPRRLRSRGGGRERALKSVRGXDTLLIQLVP

SEQ ID NO: 9733 - protein, 57 aa, Zea mays
  Coding DNA Sequence Number=SeqID_3495
  Gene Ontology: Biological process=regulation of transcription
  Homolog annotation: Hit_ID=A7P8Q2; Match level="QueryCoverage=100%, HitCoverage=6%, E-value=5e-14, Identity=67%"; Hit description =Chromosome chr3 scaffold_8, whole genome shotgun sequence
  Pfam annotation: Domain name=RWP-RK; Domain location=17-57; Score =48.2; E_value=3e-11; Accession=PF02042.6; Description=RWP-RK domain
QHRHGARLPDGGRRTKGEKTVSLEELQRYFSGSLKDAAKSLVCPTTMKRICRQHGIS

SEQ ID NO: 9734 - protein, 87 aa, Zea mays
  misc_feature (8)..(9): Xaa can be any naturally occurring amino acid
  Coding DNA Sequence Number=SeqID_3496
LVPRAGRXXFQKKKKKKKEHLLLHPRITLLPLLRPVARQFRQLPNTVGAPKHPLGLVLQQLFGNKHFPRPCRVVSSALLLNIITHLI

SEQ ID NO: 9735 - protein, 436 aa, Zea mays
  misc_feature (179)..(179): Xaa can be any naturally occurring amino acid
  misc_feature (208)..(208): Xaa can be any naturally occurring amino acid
  misc_feature (244)..(244): Xaa can be any naturally occurring amino acid
  Coding DNA Sequence Number=SeqID_3498
  Gene Ontology: Mol. function=protein binding; Cellular component =extracellular region; Biological process=protein amino acid phosphorylation
  Homolog annotation: Hit_ID=A2X775; Match level="QueryCoverage=98%, HitCoverage=99%, E-value=1e-135, Identity=60%"; Hit description =Putative uncharacterized protein
  Pfam annotation: Domain name=LRR_1; Domain location=215-237; Score =5.4; E_value=31; Accession=PF00560.23; Description=Leucine Rich Repeat
  Pfam annotation: Domain name=LRR_1; Domain location=264-286; Score =5.6; E_value=28; Accession=PF00560.23; Description=Leucine Rich Repeat
  Pfam annotation: Domain name=LRR_1; Domain location=288-310; Score =4.1; E_value=54; Accession=PF00560.23; Description=Leucine Rich Repeat
  Pfam annotation: Domain name=LRR_1; Domain location=312-334; Score =10.5; E_value=3.4; Accession=PF00560.23; Description=Leucine Rich Repeat
  Pfam annotation: Domain name=LRR_1; Domain location=340-361; Score =8.4; E_value=8.4; Accession=PF00560.23; Description=Leucine Rich Repeat
  Pfam module annotation: Pfam domain module=LRR_1::LRR_1::LRR_1::LRR _1::LRR_1; Domain location=215-237::264-286::288-310::312-334::340-361
MTCSRSIMDNHLMSSFTILLLSSFAATVAYPARTELLPYQMKNPQPKDFPTEQLYRAYFVIQRFKSTITSDPKNVTATWIGHDLCGETTYVGFYCGSPAGGDKLTVTGVILNGYSLHAPTLEGFVDQLPDLALFHAASNNFDGNIPQLTGLGYMYELSVAAKDLPPLQTSDIDGIVGGXRSAAHGKFFHCISADFDFSFNVGTDKGHXNFLGLRMPRALLLNHNNLSGPLPSNLGSSKLSYLAXLANNKLTGPIPPSISNLEDSLFEVLLLNNQLSGCLPHELGMLTKAAVIDAGMNQLTGPIPSSFSCLSSVEQLNLAGNRLYGQVPDALCKLAGPAGRLANLTLSGNYFTSPGPACAALIKNGVLDVKNNCIPGLPNQRRPPECAGFQSQPKTCPATSAQVTCPPPPASRNPAAPGERKVKDFSSYVTYATLHD

SEQ ID NO: 9736 - protein, 67 aa, Zea mays
  Coding DNA Sequence Number=SeqID_3499
LRNKLHTGQHVLRTSKPWRGGRTAGAATSTGEWRAMNWRGLQRPADFRITTQSSEPWLDSRQGGELH

SEQ ID NO: 9737 - protein, 246 aa, Zea mays
  misc_feature (221)..(221): Xaa can be any naturally occurring amino acid
  Coding DNA Sequence Number=SeqID_3501
  Gene Ontology: Mol. function=structural constituent of ribosome; Cellular component=ribonucleoprotein complex; Biological process =translation
  Homolog annotation: Hit_ID=Q5K9E3; Match level="QueryCoverage=100%, HitCoverage=62%, E-value=9e-89, Identity=68%"; Hit description=Large subunit ribosomal protein L3, putative
  Pfam annotation: Domain name=Ribosomal_L3; Domain location=50-246; Score=292.4; E_value=8.8e-85; Accession=PF00297.12; Description =Ribosomal protein L3
MSHRKYEHPRCGSLGFLPRKRAARHRGKAKAFPKDDPKAPVHLTAFLGYKAGMTHVVRDLDRPGSKMHKKEVVESATVIETPPMVVVGVVGYVETPRGLRSLTTVWAEHLSDEVKRRFYRNWYRSKKKAFTKYAKKHAESGPKSSIARELERISKYCTVVRVLAHTQIRKTGLEQKKAHLMEIQVNGGSIADKVEFAKSHFEKTVDVASVFEQDENIDVIXGVTTGRGFEGVTHRWGNKKLPRKTH

SEQ ID NO: 9738 - protein, 111 aa, Zea mays
  misc_feature (76)..(76): Xaa can be any naturally occurring amino acid
  Coding DNA Sequence Number=SeqID_3502
  Homolog annotation: Hit_ID=A7PHC4; Match level="QueryCoverage=65%, HitCoverage=91%, E-value=2e-28, Identity=83%"; Hit description =Chromosome chr17 scaffold_16, whole genome shotgun sequence
HLSSVVAAEVPAAAVDGRPAEAGGLPAAQRLDTLPRVQQARVRVQDTIITAWTIRQPTRNRNDPIARAELYQLSYXPPRAKWSMHERVRCFFYSFPWRSWAILDLNQRPRP

SEQ ID NO: 9739 - protein, 77 aa, Zea mays
  Coding DNA Sequence Number=SeqID_3503
  Subcellular localization annotation: CTP_CleavageSite=50; ConfidenceScore=5.68e-01
LCGRSRPAGAKGAPSRHFLPHHVFPLPRSSSPYCACLCSSAMPPCGCSLVVSHSRSRRSVRHRHPAPFTVHWSSVTP

SEQ ID NO: 9740 - protein, 49 aa, Zea mays
  Coding DNA Sequence Number=SeqID_3505
GIPFYSNLLLWAVGSLVGEAVVWLTNIFPFRGDGRQLCISLLNFSMFYE

SEQ ID NO: 9741 - protein, 230 aa, Zea mays
  misc_feature (1)..(128): Xaa can be any naturally occurring amino acid
  Coding DNA Sequence Number=SeqID_3507
  Gene Ontology: Mol. function=small conjugating protein ligase activity; Cellular component=nucleus; Biological process=regulation of protein metabolic process
  Homolog annotation: Hit_ID=A2YII6; Match level="QueryCoverage=30%, HitCoverage=39%, E-value=6e-31, Identity=95%"; Hit description =Ubiquitin carrier protein
  Pfam annotation: Domain name=UQ_con; Domain location=127-223; Score =32.7; E_value=1.4e-07; Accession=PF00179.16; Description=Ubiquitin -conjugating enzyme
XXXXXXXXXXXXXXXXXXXXXXXXXXXXXXXXXXXXXXXXXXXXXXXXXXXXXXXXXXXXXXXXXXXXXXXXXXXXXXXXXXXXXXXXXXXXXXXXXXXXXXXXXXXXXXXXXXXXXXXXXXXXXXXXARSSLPCCLQTITGAYLQLSDLFLGWFIQIYMHDGSVCLDILQNQRSPIYDVAAMLTSIQSLLCDPNPNSPANSEAARLFSENKREYNRKVREIVEQSWTAD

SEQ ID NO: 9742 - protein, 157 aa, Zea mays
  Coding DNA Sequence Number=SeqID_3508
  Gene Ontology: Mol. function=manganese ion binding; Cellular component=integral to membrane; Biological process=photosynthesis
  Homolog annotation: Hit_ID=A9PJP0; Match level="QueryCoverage=21%, HitCoverage=17%, E-value=9e-09, Identity=88%"; Hit description =Putative uncharacterized protein
  Pfam annotation: Domain name=PsbY; Domain location=79-113; Score =15.7; E_value=0.00064; Accession=PF06298.2; Description=Photosystem II protein Y (PsbY)
  Subcellular localization annotation: CTP_CleavageSite=71; ConfidenceScore=5.82e-01
MATIATMALLKPAAKAAARSAPSTSSGSVSLRVPGQAAKKAAVSASASSTLAGAFFAALASSPDAALADVVAAADAGGDSRGQLLLVVVAPAIGWVLYNILQPALNQLNRMRSSQAVAAGLGLGAAASAGMGMEAPPDSSAAAGHDLAMTAGPSAPD

SEQ ID NO: 9743 - protein, 171 aa, Zea mays
  Coding DNA Sequence Number=SeqID_3509
  Gene Ontology: Mol. function=diaminopimelate decarboxylase activity; Cellular component=chloroplast; Biological process=lysine biosynthetic process via diaminopimelate
  Homolog annotation: Hit_ID=Q6ZG77; Match level="QueryCoverage=57%, HitCoverage=20%, E-value=4e-42, Identity=84%"; Hit description =Probable diaminopimelate decarboxylase, chloroplast precursor
  Subcellular localization annotation: CTP_CleavageSite=11; ConfidenceScore=5.14e-01
SFPRRHARSVCASVSMASPSPSPQPTAAGVPKHCFRRGADGYLYCEGVRVEDAMAAAERSPFYLYSKLQILRNFAAYRDALQGLRSIVGYAVKANNNLPVLRVLRELGCGVVLVSGSELRLALQAGFDRRLPPWSLFLRLYLAYPVQQQSSESSPSNFVLFLFFPFVWSAL

SEQ ID NO: 9744 - protein, 133 aa, Zea mays
  Coding DNA Sequence Number=SeqID_3510
  Gene Ontology: Mol. function=transferase activity; Cellular component= endoplasmic reticulum; Biological process=lipid metabolic process
  Homolog annotation: Hit_ID=Q10E40; Match level="QueryCoverage=90%, HitCoverage=81%, E-value=3e-40, Identity=64%"; Hit description=MAPEG family protein, expressed
  Pfam annotation: Domain name=MAPEG; Domain location=1-113; Score =45.6; E_value=1.7e-10; Accession=PF01124.9; Description=MAPEG family
MGFPVGKAPKNYKVFFPPMFALESENKDAQLFNWVQRGPPNSLKWMPVFFVKLLLGGFQHPTIPPGLGGIYIVARFFFFKGYPPGVSGNRFKIGGVHYLALLGLIICPASFGINLLIREMLLTLGLYVSPRLG

SEQ ID NO: 9745 - protein, 57 aa, Zea mays
  Coding DNA Sequence Number=SeqID_3511
CLPWRESDYLACWTCRGRSRPIPPGMMLFAQWKPSMLSLPGLFKEPELFFCGTVLSH

SEQ ID NO: 9746 - protein, 112 aa, Zea mays
  Coding DNA Sequence Number=SeqID_3513
  Subcellular localization annotation: CTP_CleavageSite=50; ConfidenceScore=5.50e-01
NQQPPLKASTSKLRTDRPQPSGKPTADVPPRQPERKRGRIMTIAHRRAPRSRRRGHRSAGLPPRPPPPAPQPTPTHPYQQVPVTGAPRRLPQEQVQDQGWQHTMSSKLSRWI

SEQ ID NO: 9747 - protein, 165 aa, Zea mays
  misc_feature (93)..(93): Xaa can be any naturally occurring amino acid
  misc_feature (109)..(109): Xaa can be any naturally occurring amino acid
  misc_feature (123)..(123): Xaa can be any naturally occurring amino acid
  Coding DNA Sequence Number=SeqID_3514
  Gene Ontology: Mol. function=metal ion binding; Cellular component =plasma membrane; Biological process=cytokinin metabolic process
  Homolog annotation: Hit_ID=Q69V56; Match level="QueryCoverage=100%, HitCoverage=37%, E-value=5e-59, Identity=70%"; Hit description =Putative copine I
  Subcellular localization annotation: CTP_CleavageSite=41; ConfidenceScore=5.39e-01
MGQKDSKPSHGYGCAAYDYGSASSGYTSRNTGNSSSSYSVRYAPSSENSVQPETHARLQRKYSKIGDDYRSLSQVTEALAQAGLESSNLIVGXDFTKSNEWTGKISFNXRRCLHGFGNTPDPXEQAVSMGGRTLSAFDEDNLIPCFGFGDASTHDQEVFSFYPEN

SEQ ID NO: 9748 - protein, 222 aa, Zea mays
  misc_feature (98)..(98): Xaa can be any naturally occurring amino acid
  Coding DNA Sequence Number=SeqID_3515
  Gene Ontology: Mol. function=endoribonuclease activity; Cellular component=extracellular region; Biological process=response to stress
  Homolog annotation: Hit_ID=Q6R326; Match level="QueryCoverage=88%, HitCoverage=89%, E-value=2e-62, Identity=57%"; Hit description=S -like RNase
  Pfam annotation: Domain name=Ribonuclease_T2; Domain location=28-210; Score=110.6; E_value=4.8e-30; Accession=PF00445.9; Description =Ribonuclease T2 family
MAAAGRLSLPLVLLVVLAVAGRAAAQDYDFFYLVLQWPGAYCDTKQSCCYPKSGKPAADFGIHGLWPNRDDGTYPQNCSPDNAFNPSKVHHLHTRILXPFPSFSRAAPHVFDHAAAACSGFHPRAKCQHSPLGPPDQLGVLGALPPPGVKPDGGFYPLSQIKGPIPQGPGFEPYVEGNPDEAGNNQLYQLYFWVDPPGDNFVDCPVPPNGRPCGNRIHPPPF

SEQ ID NO: 9749 - protein, 91 aa, Zea mays
  misc_feature (1)..(17): Xaa can be any naturally occurring amino acid
  Coding DNA Sequence Number=SeqID_3516
XXXXXXXXXXXXXXXXXGRHCVDIFSCVNWYRRSSTPPDPANLRQSQPSTLATHPVHSGHKQQVFFFLFVCALRRTGGWWPSTGGEEDAPW

SEQ ID NO: 9750 - protein, 131 aa, Zea mays
  misc_feature (84)..(84): Xaa can be any naturally occurring amino acid
  misc_feature (103)..(103): Xaa can be any naturally occurring amino acid
  Coding DNA Sequence Number=SeqID_3518
  Gene Ontology: Mol. function=dihydrofolate reductase activity; Biological process=one-carbon compound metabolic process
  Homolog annotation: Hit_ID=O81395; Match level="QueryCoverage=45%, HitCoverage=11%, E-value=4e-17, Identity=75%"; Hit description =Bifunctional dihydrofolate reductase-thymidylate synthase (DHFR-TS) [Includes: ...
  Homolog annotation: Hit description=Dihydrofolate reductase (EC 1.5.1.3); Thymidylate synthase (EC 2.1.1.45)]
  Subcellular localization annotation: CTP_CleavageSite=23; ConfidenceScore=5.16e-01
MLGLSTGSGGSRLSPVAWRPRLRASAHRAGTLCGECFQRCVRGGGSIRKPQMLCLSAKSRPYQFREAGQRAMAGGLANGESQGXRPHRSYQGAGAGAPDMGIXKDGVLPWKLPGDLKFFKEVTLTTSEPGK

SEQ ID NO: 9751 - protein, 59 aa, Zea mays
  Coding DNA Sequence Number=SeqID_3519
GVAGLYEACSVIISELLPEGVKIQAEVVTEEESTPVAADQVEEPSNWCLIEGSSTSSLQ

SEQ ID NO: 9752 - protein, 246 aa, Zea mays
  misc_feature (2)..(2): Xaa can be any naturally occurring amino acid
  misc_feature (10)..(10): Xaa can be any naturally occurring amino acid
  misc_feature (13)..(13): Xaa can be any naturally occurring amino acid
  misc_feature (15)..(16): Xaa can be any naturally occurring amino acid
  misc_feature (19)..(19): Xaa can be any naturally occurring amino acid
  misc_feature (21)..(21): Xaa can be any naturally occurring amino acid
  misc_feature (151)..(151): Xaa can be any naturally occurring amino acid
  misc_feature (188)..(188): Xaa can be any naturally occurring amino acid
  misc_feature (226)..(226): Xaa can be any naturally occurring amino acid
  Coding DNA Sequence Number=SeqID_3521
  Gene Ontology: Mol. function=nucleoside-triphosphatase activity; Cellular component=protein complex; Biological process=protein catabolic process
  Homolog annotation: Hit_ID=Q8W422; Match level="QueryCoverage=100%, HitCoverage=54%, E-value=2e-83, Identity=69%"; Hit description=26S proteasome regulatory particle triple-A ATPase subunit2b
  Pfam annotation: Domain name=AAA; Domain location=26-214; Score =172.5; E_value=1.1e-48; Accession=PF00004.19; Description=ATPase family associated with various cellular activities (AAA)
EXKEAGEPPXTQXEXXEDXGXRPPKGFFFFGEPGTGEGGGAKAVANSTSATFLRVVGSELIQKYLGDGPKLVRGLFRVADDLSPSIVFIDEIDPVGTQRSDARSGGEREIHRTMLQLLNQLDGFDSRGHVRVVLAADRIGSLDPALLRPGXRIAFFILFPLPDVKTSFCIFQIHTSKMTLVDDVNLVXFIMSKDHFSGGDIKVFCSEGGLPALRDRRMEVLHKVFXKALAKVLFKRKEGAPDGLYM

SEQ ID NO: 9753 - protein, 135 aa, Zea mays
  misc_feature (26)..(26): Xaa can be any naturally occurring amino acid
  misc_feature (135)..(135): Xaa can be any naturally occurring amino acid
  Coding DNA Sequence Number=SeqID_3522
  Gene Ontology: Mol. function=nucleotide binding; Cellular component =protein complex; Biological process=protein polymerization
  Homolog annotation: Hit_ID=Q9LKX6; Match level="QueryCoverage=83%, HitCoverage=27%, E-value=2e-37, Identity=72%"; Hit description=FtsZ1
  Pfam annotation: Domain name=Tubulin; Domain location=9-135; Score =64.6; E_value=3.4e-16; Accession=PF00091.15; Description=TubulinFtsZ family, GTPase domain
RLEWRLAECINKIINRMIGIILQGIXEFYAINTDSQALINSQAHYPVQIGEQLTRGLGAGGNPILGEQAAEESRETIATALRDSDLVFITAGMGGGTGSGAAPVVAQISKEAGYLTVGVVTYPFSFEGRKRSVQX

SEQ ID NO: 9754 - protein, 173 aa, Zea mays
  misc_feature (107)..(107): Xaa can be any naturally occurring amino acid
  misc_feature (118)..(118): Xaa can be any naturally occurring amino acid
  Coding DNA Sequence Number=SeqID_3523
  Homolog annotation: Hit_ID=A2Y780; Match level="QueryCoverage=91%, HitCoverage=22%, E-value=4e-29, Identity=47%"; Hit description =Putative uncharacterized protein
EPSDRWLKRLQLGVPDPDVPGSKRPKVGDSPPPPRQRSRWFDVALPCNRAGSDTGAIDRGKEEQSLDGGGKVQGRAPPIPEKSVSRWIGRWCQGGTPVFREGPGHQXKAATPTLLAGXSEELEGQFFPSPAAMAMMGRAMPKLRPCEQQQKGPFVVWKIDWPFWVSYTCFFKN

SEQ ID NO: 9755 - protein, 314 aa, Zea mays
  misc_feature (270)..(270): Xaa can be any naturally occurring amino acid
  Coding DNA Sequence Number=SeqID_3524
  Gene Ontology: Mol. function=chlorophyllase activity; Cellular component=chloroplast; Biological process=chlorophyll catabolic process
  Homolog annotation: Hit_ID=A7PUF4; Match level="QueryCoverage=93%, HitCoverage=92%, E-value=2e-74, Identity=51%"; Hit description =Chromosome chr7 scaffold_31, whole genome shotgun sequence
  Pfam annotation: Domain name=Chlorophyllase; Domain location=16-314; Score=445.4; E_value=7.7e-131; Accession=PF07224.2; Description =Chlorophyllase
MAAPVQTTATTPQVPAAAVVTSVFQPGKLAVEVITVDHDAQPTPPIPILIAAPKDAGTYPVAMLLHGFFLQNRYYEQLLKHVASFGFIMVAPQFHTSLISNSDNNDIAAAAKATDWLPEGLPSVLPTGVEADLSKLVLAGHSRGGHTAFSLALGYAKISSSLSFSALIGLDPVAGTGKNSQLPPAILTYAPSSFDIAMPVLVIGTGLGDERENVLFPPCAPVDVNHTEFYRECRAPCYHLVTKNYGHLDMLDDDAPKLVTCLCKEGNSCXDVMRRTVAGIMVAFLKAVMGEEDGDLKAILTDPGLAPTTLDPVE

SEQ ID NO: 9756 - protein, 98 aa, Zea mays
  Coding DNA Sequence Number=SeqID_3525
  Homolog annotation: Hit_ID=A7PAR0; Match level="QueryCoverage=69%, HitCoverage=8%, E-value=8e-15, Identity=57%"; Hit description =Chromosome chr14 scaffold_9, whole genome shotgun sequence
  Subcellular localization annotation: CTP_CleavageSite=24; ConfidenceScore=5.27e-01
SASSTANDIGNCQSSNGGATYGLADNKVSQTFVEVEVGNLMRKTSTSKGINPTWNSTFNMVLHGETGIAKFLLYELDSGGVKFNYLTSCEIKDTDAVM

SEQ ID NO: 9757 - protein, 96 aa, Zea mays
  Coding DNA Sequence Number=SeqID_3526
PNCQASPNKSNCESSHMSKNNTGIKYEAYLVAILGDSARRYRSHRPTYTNTHCTGLCPFYYAVRPLQLLVLSTPVRGKMSTIGLAIPLCRYESYIK

SEQ ID NO: 9758 - protein, 60 aa, Zea mays
  Coding DNA Sequence Number=SeqID_3528
SEFGSSVRLPCFLVMHTESKTEGKKPTTSLHRVLIADTVCLLLSFNSTLQGLEVELGSGN

SEQ ID NO: 9759 - protein, 126 aa, Zea mays
  Coding DNA Sequence Number=SeqID_3530
LGWVVAVVGAGRLVVVHLHVHPRRRPARVFHHRRRDRRRVLTETANCQYMRVAELHIRRRVQLVAPQAQASCDRHGIVSTQDQERNQRGSVEVTDGHAWQRLTWRGDVAADRPQQQPKPKQAAGQH

SEQ ID NO: 9760 - protein, 81 aa, Zea mays
  Coding DNA Sequence Number=SeqID_3531
LRERQLFRKSLSLNTLKRDLILNVQPGKRPSPPNLFENIPGLLNPTRPGSLVQAKKQGHTSWAGWENGTHELPGGRPSPDT

SEQ ID NO: 9761 - protein, 97 aa, Zea mays
  Coding DNA Sequence Number=SeqID_3533
  Subcellular localization annotation: CTP_CleavageSite=57; ConfidenceScore=5.21e-01
PPMRRTNSRKGRAPLVVIRMASPLLSTKTALAPTSNDLRIYPPLTKSTGHSYSLLFSSSSPSKSVTGFTSFGALAFGAEDKLQPFLEALGAGLINDR

SEQ ID NO: 9762 - protein, 283 aa, Zea mays
  misc_feature (87)..(283): Xaa can be any naturally occurring amino acid
  Coding DNA Sequence Number=SeqID_3534
IVAFNVLPQALQNILRIQIHGVVNGLSSCGRRQECIDSNPVYSHSSYNLQRTARSLAGDEETALLMSLPGGPRGTPAQFDILSSPVXXXXXXXXXXXXXXXXXXXXXXXXXXXXXXXXXXXXXXXXXXXXXXXXXXXXXXXXXXXXXXXXXXXXXXXXXXXXXXXXXXXXXXXXXXXXXXXXXXXXXXXXXXXXXXXXXXXXXXXXXXXXXXXXXXXXXXXXXXXXXXXXXXXXXXXXXXXXXXXXXXXXXXXXXXXXXXXXXXXXXXXXXXXXXXXXXXXXX

SEQ ID NO: 9763 - protein, 149 aa, Zea mays
  misc_feature (69)..(69): Xaa can be any naturally occurring amino acid
  misc_feature (83)..(83): Xaa can be any naturally occurring amino acid
  misc_feature (142)..(142): Xaa can be any naturally occurring amino acid
  Coding DNA Sequence Number=SeqID_3535
  Gene Ontology: Mol. function=chorismate mutase activity; Cellular component=chloroplast; Biological process=aromatic amino acid family biosynthetic process
  Homolog annotation: Hit_ID=A2X1M3; Match level="QueryCoverage=99%, HitCoverage=60%, E-value=3e-43, Identity=61%"; Hit description =Putative uncharacterized protein
VTVNDALWKMPFDELLPLFTVDGDDGSYAQTDALDLARLQGLSQRIHIGKYVAEATSKTLLRIYTPLIXHKDSNSLMDMLTFXLLEQKVKKTAQKKATTLGQNVTLDDNATAGDSECKVDPKVLSKLYDQRVMPLTKDDQVXYLLRRLY

SEQ ID NO: 9764 - protein, 149 aa, Zea mays
  misc_feature (35)..(35): Xaa can be any naturally occurring amino acid
  misc_feature (50)..(50): Xaa can be any naturally occurring amino acid
  misc_feature (59)..(59): Xaa can be any naturally occurring amino acid
  misc_feature (69)..(69): Xaa can be any naturally occurring amino acid
  misc_feature (114)..(114): Xaa can be any naturally occurring amino acid
  Coding DNA Sequence Number=SeqID_3536
  Homolog annotation: Hit_ID=Q337D0; Match level="QueryCoverage=93%, HitCoverage=94%, E-value=1e-44, Identity=73%"; Hit description =Expressed protein
MEVFGKSVIAEPSNVIFLSAILNTGKIKSLSHKCXTKRCQNENIFGIMYXRCKLTETTXHICDKNCNQXRILYDNHYSLCRVSGQFFPLSPLEQQAVRDIRRKHECDSNHARPXARTLGALLYPYSFERPHSPVSPILSQGEKYCLSLC

SEQ ID NO: 9765 - protein, 95 aa, Zea mays
  Coding DNA Sequence Number=SeqID_3537
  Gene Ontology: Mol. function=voltage-gated potassium channel activity; Cellular component=integral to membrane; Biological process=potassium ion transport
  Homolog annotation: Hit_ID=O04242; Match level="QueryCoverage=47%, HitCoverage=5%, E-value=2e-13, Identity=86%"; Hit description =Potassium channel
SEVVPQKLLRKRVSFQNSLFGVISSSHAHQDTGRLLSKGLAPTAGPNLAVIDFPSSWVDISGLPCRTGMDTSAGVSSVPAYPSGRMGRLLGLRAK

SEQ ID NO: 9766 - protein, 115 aa, Zea mays
  Coding DNA Sequence Number=SeqID_3538
  Homolog annotation: Hit_ID=A3BNK8; Match level="QueryCoverage=53%, HitCoverage=14%, E-value=9e-27, Identity=82%"; Hit description =Putative uncharacterized protein
MAALSYHSWTRPCSLLQRYDHNWFASLISASARGCPASEPRVFPDGLFPAGGKSDIDGIFPPPYFEWMQFIKEFTEYTHLDQSVSYLCDYMEKNGPFDGLLGFCHVKMETRSHFY

SEQ ID NO: 9767 - protein, 69 aa, Zea mays
  Coding DNA Sequence Number=SeqID_3539
  Gene Ontology: Cellular component=protein complex
  Homolog annotation: Hit_ID=O82143; Match level="QueryCoverage=78%, HitCoverage=13%, E-value=3e-10, Identity=62%"; Hit description=OsS5a
AAVTDSAMAQAGAVDPDLVLALQMSVQDANMSSDTDMSKVFEDRTFVSSNIKTICIILKLMAYRYILAA

SEQ ID NO: 9768 - protein, 121 aa, Zea mays
  Coding DNA Sequence Number=SeqID_3540
  Homolog annotation: Hit_ID=Q6AVP4; Match level="QueryCoverage=90%, HitCoverage=47%, E-value=6e-29, Identity=64%"; Hit description =Putative Vacuolar sorting protein
NPPQLHSNLKFVQLFRRETKLISEVEYYLTNLISAEMFIIDVSAHSPSMEEREFQKHMESTRLATQVSIASPSSSQGLPTSARANQEETYMAGTDEGYPWSSLMLQDQYRCVSLLVVSEWG

SEQ ID NO: 9769 - protein, 62 aa, Zea mays
  misc_feature (26)..(26): Xaa can be any naturally occurring amino acid
  Coding DNA Sequence Number=SeqID_3541
  Gene Ontology: Mol. function=sterol 14-demethylase activity; Cellular component=integral to membrane; Biological process=steroid biosynthetic process
  Homolog annotation: Hit_ID=P93596; Match level="QueryCoverage=100%, HitCoverage=13%, E-value=4e-27, Identity=91%"; Hit description =Cytochrome P450 51
RHGCLGEPFAYLQIKAIWTPLLRNFXFELVSPFPKNDWNPMVVGIKGEVMVNYKRRKLSVDN

SEQ ID NO: 9770 - protein, 210 aa, Zea mays
  misc_feature (14)..(14): Xaa can be any naturally occurring amino acid
  Coding DNA Sequence Number=SeqID_3542
  Gene Ontology: Mol. function=branched-chain-amino-acid transaminase activity; Cellular component=chloroplast; Biological process =branched chain family amino acid metabolic process
  Homolog annotation: Hit_ID=Q10L48; Match level="QueryCoverage=99%, HitCoverage=45%, E-value=1e-102, Identity=88%"; Hit description =Branched-chain amino acid aminotransferase, putative, expressed
  Pfam annotation: Domain name=Aminotran_4; Domain location=1-194; Score=18.3; E_value=1.2e-10; Accession=PF01063.9; Description =Aminotransferase class IV
NAHIRLTLTRGKKXTSGMSPGFNLYGCALIVLAEWKPPVYDNSHGIKLVTATTRRNSPNSVDSKIHHNNLINNILAKIEGNLAQAEDAIMLDKDGFVSETNATNIFMVKKGIVLTPHADYCLPGITRATVMDLVVKENFVLHERRISLSEFHAADEVWTTGTMGEITPVVMIDGREIGDGKIGPVTRQIQNAYKVLTAGQGVPIPRIAEV

SEQ ID NO: 9771 - protein, 585 aa, Zea mays
  Coding DNA Sequence Number=SeqID_3543
  Gene Ontology: Mol. function=unfolded protein binding; Cellular component=mitochondrion; Biological process=cellular protein metabolic process
  Homolog annotation: Hit_ID=A6S9G1; Match level="QueryCoverage=96%, HitCoverage=96%, E-value=0.0, Identity=84%"; Hit description=Heat shock protein 60
  Pfam annotation: Domain name=Cpn60_TCP1; Domain location=54-560; Score=579.3; E_value=3.8e-171; Accession=PF00118.14; Description=TCP- 1cpn60 chaperonin family
  Subcellular localization annotation: CTP_CleavageSite=44; ConfidenceScore=5.18e-01
MQRAFASRARTSALNSTSKLRTTSLSLQQQRFAHKELKFGVEARAGLLKGVDTLAKAVSTTLGPKGRNVLIESSYGSPKITKDGVTVAKAITQDKFENLGARLLQDVASKTNEAAGDGTTTATVLARAIFSETVKNVAAGCNPMDLRRGTQAAVEAVVDYLKANKRDITTSEEIAQVATISANGDTHIGKLLSNAMEKVGKEGVITVKEGKTTEDELEVTEGMKFDRGYISPYFITDTKTAKVEFEKPLILLSEKKISAVQDIVPALEASQQLRRPLVIIAEDIDGEALAVCILNKLRGQLQVAAVKAPGFGDNRKSILGDLAVLTNGTVFSDDLDIKLEKATPDMLGSTGSITITKEDTVILNGEGSKDQVSQRCEQIRGVINDPTTSEYEKEKLQERLAKLSGGVAVIKVGGSSEVEVGEKKDRIVDALNATRAAVEEGILPGGGTGLLKASANALDSVKAHNFDQQLGITIVKNAITHPARKIVENAGAEGSVIVGKLIDEHKNDFNKGFNSAKGEYVDMIAAGILDPFKVVRTALVDASGVASLLGTTEVAIVEAPEEKAGPPGGMPGGMGGMGGMGGMGF

SEQ ID NO: 9772 - protein, 191 aa, Zea mays
  Coding DNA Sequence Number=SeqID_3544
  Homolog annotation: Hit_ID=A7PZM3; Match level="QueryCoverage=84%, HitCoverage=14%, E-value=4e-58, Identity=66%"; Hit description =Chromosome chr15 scaffold_40, whole genome shotgun sequence
AASLVLSTNSSPEPPLEGGYDCGLVPGHVASWVSDCRRFILHIMGYSVEDTGPVACISWTPDNCALAVGWKFRGLTVWSVSGCRLMCTIRQTGSNSASSPMVKPSALKFEPLMGGTSHIQWDDNGYKLFAVEESLSERVLAFSFAKCCPNRGLSGTTYSHQVLYGEDRILLVQPDDADELKILHLNVPVKC

SEQ ID NO: 9773 - protein, 155 aa, Zea mays
  misc_feature (21)..(21): Xaa can be any naturally occurring amino acid
  misc_feature (125)..(125): Xaa can be any naturally occurring amino acid
  misc_feature (131)..(131): Xaa can be any naturally occurring amino acid
  Coding DNA Sequence Number=SeqID_3545
  Gene Ontology: Mol. function=hydrolase activity, acting on ester bonds; Cellular component=extracellular region; Biological process =lipid metabolic process
  Homolog annotation: Hit_ID=A2WPE0; Match level="QueryCoverage=96%, HitCoverage=42%, E-value=2e-44, Identity=61%"; Hit description =Putative uncharacterized protein
CNAQAGESRDMSYLSPYLEAXGSDFTGGANFAISGSCTLPRNVPFALHVQGQQFLHLKQRSLDLAAHGGTAPGDADGFRDALYLIFFFQNDLSGAFGSGAPYDDVGHHRIPGYRTLYYNGAKNLXWVHGTXGPVGWLPQKLGGPRPGDSGLGYSG

SEQ ID NO: 9774 - protein, 134 aa, Zea mays
  misc_feature (47)..(47): Xaa can be any naturally occurring amino acid
  Coding DNA Sequence Number=SeqID_3546
  Gene Ontology: Cellular component=integral to membrane; Biological process=photosynthesis
  Homolog annotation: Hit_ID=P36886; Match level="QueryCoverage=100%, HitCoverage=100%, E-value=3e-30, Identity=58%"; Hit description =Photosystem I reaction center subunit psaK, chloroplast precursor
  Pfam annotation: Domain name=PSI_PSAK; Domain location=49-129; Score =73.3; E_value=8.1e-19; Accession=PF01241.9; Description=Photosystem I psaG  psaK
  Subcellular localization annotation: CTP_CleavageSite=74; ConfidenceScore=5.26e-01
MESQFSAAVPRFHGLRGYPAPRSPVGGLPSLRGGRKKSSSQGIRWEXIGSATNLIMGTTTTLMVFPGRFGLGPSANPKGKGGFKLEGRESRLQKGDPPGFTLPHTLAWGAVGHILGVGIGVGFKNTGAFDQIIG

SEQ ID NO: 9775 - protein, 78 aa, Zea mays
  misc_feature (8)..(8): Xaa can be any naturally occurring amino acid
  misc_feature (14)..(14): Xaa can be any naturally occurring amino acid
  misc_feature (72)..(72): Xaa can be any naturally occurring amino acid
  Coding DNA Sequence Number=SeqID_3547
  Gene Ontology: Cellular component=endoplasmic reticulum
  Homolog annotation: Hit_ID=A7QR27; Match level="QueryCoverage=66%, HitCoverage=23%, E-value=9e-09, Identity=53%"; Hit description =Chromosome undetermined scaffold_147, whole genome shotgun sequence
PRVRIPLXGVYQGXNIILIYLYQRWKYPVDKKRVNEFGFGGEDEPAAQEAVEGSDSAAAPQLTEAGSETSTXEDKKTK

SEQ ID NO: 9776 - protein, 138 aa, Zea mays
  misc_feature (48)..(48): Xaa can be any naturally occurring amino acid
  misc_feature (121)..(121): Xaa can be any naturally occurring amino acid
  Coding DNA Sequence Number=SeqID_3548
  Gene Ontology: Mol. function=structural constituent of ribosome; Cellular component=ribonucleoprotein complex; Biological process =translation
  Homolog annotation: Hit_ID=A2X3I0; Match level="QueryCoverage=99%, HitCoverage=99%, E-value=1e-44, Identity=69%"; Hit description=60S ribosomal protein L27
  Pfam annotation: Domain name=Ribosomal_L27e; Domain location=54-138; Score=68.2; E_value=2.8e-17; Accession=PF01777.8; Description =Ribosomal L27e protein family
MVKLLKPGKSVILLQGRFAALKAVIVRVFEEGTRDRSYCHCLDGGLAXVPPKMVIRWDSVMKTCNKACVLCSIKLANFTHLMPTRYTLDDYLKVFVSGGPDSLFTRDKTVEFCNDGKARLXERLKTGKNRWIFTKLRL

SEQ ID NO: 9777 - protein, 220 aa, Zea mays
  misc_feature (183)..(183): Xaa can be any naturally occurring amino acid
  misc_feature (199)..(199): Xaa can be any naturally occurring amino acid
  Coding DNA Sequence Number=SeqID_3549
  Gene Ontology: Mol. function=structural constituent of ribosome; Cellular component=ribonucleoprotein complex; Biological process =translation
  Homolog annotation: Hit_ID=Q5EMW4; Match level="QueryCoverage=84%, HitCoverage=69%, E-value=4e-79, Identity=82%"; Hit description=40S ribosomal protein S2-like protein
  Pfam annotation: Domain name=Ribosomal_S5; Domain location=82-148; Score=121.5; E_value=2.5e-33; Accession=PF00333.10; Description =Ribosomal protein S5, N-terminal domain
  Pfam annotation: Domain name=Ribosomal_S5_C; Domain location=166-220; Score=16.1; E_value=0.0001; Accession=PF03719.5; Description =Ribosomal protein S5, C-terminal domain
  Pfam module annotation: Pfam domain module=Ribosomal_S5::Ribosomal_S5_ C; Domain location=82-148::166-220
MADAPAPARGGFGSRGDRGGDRGRGRGRGRGRRGGKSEEKEWQPVTKLGRLVKAGKIKSMEEIYLHSLPIKEYQIVDFFLPKLKDEVMKIKPVQKQTPAGQRTRFKAIVVIGDSQGHIGLGIKTSKEVATAIRAAIIIAKLAGVPIRRGYWGTNLGEPHSLPTKESGKCGSVTVRLIPAPPRXPGLVASPAVKRLLQLXAGVQDAYTASTGSTKTLENTL

SEQ ID NO: 9778 - protein, 112 aa, Zea mays
  misc_feature (1)..(13): Xaa can be any naturally occurring amino acid
  Coding DNA Sequence Number=SeqID_3550
XXXXXXXXXXXXXRTSESTVGRGAVFSLSRSPSGMGWDRTHTAILLLSSLHLPILLLCAHRRGTPSLSAAFRMSACMHLARHHAGPWVVAARRAPAGCAAVDHEFAKKAPIT

SEQ ID NO: 9779 - protein, 77 aa, Zea mays
  Coding DNA Sequence Number=SeqID_3552
  Homolog annotation: Hit_ID=A2YAQ1; Match level="QueryCoverage=89%, HitCoverage=13%, E-value=3e-23, Identity=84%"; Hit description =Putative uncharacterized protein
MLLCPITHLSSAKTKLKSIESQLNEALNASDARSTIGSESASVISSPKITESTADSSSVTKRLEEELAKRDALIEQV

SEQ ID NO: 9780 - protein, 239 aa, Zea mays
  misc_feature (152)..(152): Xaa can be any naturally occurring amino acid
  misc_feature (194)..(194): Xaa can be any naturally occurring amino acid
  Coding DNA Sequence Number=SeqID_3553
  Homolog annotation: Hit_ID=A7R618; Match level="QueryCoverage=93%, HitCoverage=20%, E-value=3e-08, Identity=25%"; Hit description =Chromosome undetermined scaffold_1129, whole genome shotgun sequence
GTLISVALSQKEELQLNLTSLNEQHGESKAFGDNASQKIIELEAQIQAMCAAEEALNLELKEAEASVKAAEKKGSVLEQQLSEIENELVASSEEIELLKERIQQEAAVSAERGMQLEEAMPSAEGCKERINELQCSLDSSMSKSQLLEQESXGADLINVHEHHGHAASSQFDATERLQHGEIVLHVIKDSDAEXAYSRTQELEQELNSTYEKLKGVEEELEQYLPGRPKGGIPHTGGRY

SEQ ID NO: 9781 - protein, 71 aa, Zea mays
  Coding DNA Sequence Number=SeqID_3554
FVIILYPPSAPCIDSWVIIVQVSKFPALCAYGQGIISLVSKFYTLNASGQGSGRLSCIPIPSTQTSGSNLL

SEQ ID NO: 9782 - protein, 239 aa, Zea mays
  misc_feature (171)..(171): Xaa can be any naturally occurring amino acid
  misc_feature (195)..(195): Xaa can be any naturally occurring amino acid
  misc_feature (209)..(209): Xaa can be any naturally occurring amino acid
  misc_feature (221)..(221): Xaa can be any naturally occurring amino acid
  misc_feature (239)..(239): Xaa can be any naturally occurring amino acid
  Coding DNA Sequence Number=SeqID_3556
  Gene Ontology: Mol. function=transporter activity; Cellular component= mitochondrial inner membrane; Biological process=transport
  Homolog annotation: Hit_ID=Q0URL3; Match level="QueryCoverage=99%, HitCoverage=74%, E-value=1e-113, Identity=89%"; Hit description =Putative uncharacterized protein
  Pfam annotation: Domain name=Mito_carr; Domain location=1-91; Score =107.6; E_value=3.8e-29; Accession=PF00153.17; Description =Mitochondrial carrier protein
  Pfam annotation: Domain name=Mito_carr; Domain location=99-195; Score= 103.8; E_value=5.3e-28; Accession=PF00153.17; Description =Mitochondrial carrier protein
  Pfam module annotation: Pfam domain module=Mito_carr::Mito_carr; Domain location=1-91::99-195
MGGVSAAVSKTAAAPIERVKLLIQNQDEMLKTGRLDRKYDGIAECFRRTSQQEGVLSLWRGNTANVIRYFPTQALNFAFRDTYKSMFAFKKERDGYAKWMAGNLASGGAAGATSLLFVYSLDYARTRLANDAKNAKKGGDRQFNGLVDVYKKTLASDGIAGLYRGFMPSVXGIVVYRGLYFGMYDSIKPVLLTGXPLEGNFLASFALGXWAVTTGAGIASXYPLDTIRRRMMMTSGEAX

SEQ ID NO: 9783 - protein, 199 aa, Zea mays
  misc_feature (97)..(97): Xaa can be any naturally occurring amino acid
  misc_feature (167)..(167): Xaa can be any naturally occurring amino acid
  Coding DNA Sequence Number=SeqID_3557
  Gene Ontology: Mol. function=metal ion binding
  Homolog annotation: Hit_ID=Q84VC6; Match level="QueryCoverage=90%, HitCoverage=72%, E-value=7e-42, Identity=55%"; Hit description=S -ribonuclease-binding protein SBP1-like protein
  Subcellular localization annotation: CTP_CleavageSite=51; ConfidenceScore=5.06e-01
QQPHPQQAPPPNQQQPALPSSTDALPLPVDGHIPAPVAFFNPPPALPEQPAQTMLVHDVRLTAAAGLGGTHSMEEELIGQNSRTALIYFLKKGSEVXTELRLTLEDRRHDGGVAGNSSEDSAMILMSMLQQDIAGQARSLDDNMDRFIKAHRERMMQSILSERSCFXFEALASVEDEIFLKIRDKEAEVETINKRNSEL

SEQ ID NO: 9784 - protein, 66 aa, Zea mays
  misc_feature (15)..(15): Xaa can be any naturally occurring amino acid
  misc_feature (36)..(36): Xaa can be any naturally occurring amino acid
  Coding DNA Sequence Number=SeqID_3558
  Gene Ontology: Mol. function=transcription factor activity; Cellular component=intracellular; Biological process=regulation of transcription, DNA-dependent
  Homolog annotation: Hit_ID=A0GBS0; Match level="QueryCoverage=100%, HitCoverage=61%, E-value=4e-20, Identity=74%"; Hit description =Transcriptional regulator, ArsR family
RMLVVAGRSGSTPGXMAEQLGGPAATLSFHLKELMXAGLLTQERDGRDLIYRASFEQMNALLGFMT

SEQ ID NO: 9785 - protein, 127 aa, Zea mays
  Coding DNA Sequence Number=SeqID_3559
  Subcellular localization annotation: CTP_CleavageSite=70; ConfidenceScore=5.78e-01
GRWPRPASAPPEGGSTSTSSRKSSRRLTGFHGRGPTPPPPPMVPPAAPVFWCAKPGSRRTSTPAPARSPSAGKVSSPGLIKPPGGRHPRPLVPACVPYVCLWLTGCPGSSYLAMVRAPTQLLYKLRQ

SEQ ID NO: 9786 - protein, 135 aa, Zea mays
  misc_feature (40)..(40): Xaa can be any naturally occurring amino acid
  misc_feature (60)..(60): Xaa can be any naturally occurring amino acid
  misc_feature (88)..(88): Xaa can be any naturally occurring amino acid
  Coding DNA Sequence Number=SeqID_3560
  Homolog annotation: Hit_ID=Q6YWA7; Match level="QueryCoverage=92%, HitCoverage=50%, E-value=7e-35, Identity=63%"; Hit description =Putative UNC50
  Pfam annotation: Domain name=UNC-50; Domain location=17-135; Score= -106.2; E_value=0.00041; Accession=PF05216.4; Description=UNC-50 family
MLPTTAFKGRVISRSCHPVFCCYLRLIVKCKQMDIEYTFXKMMRLCPSPSVCYEYTKHAXRQTHNTCATDYLACVVILMLFLASATSXYCAAYGESASHAALTITSVVVLHFLSVAKPMATLCWYQQSVAKTIPA

SEQ ID NO: 9787 - protein, 201 aa, Zea mays
  misc_feature (161)..(161): Xaa can be any naturally occurring amino acid
  misc_feature (197)..(197): Xaa can be any naturally occurring amino acid
  Coding DNA Sequence Number=SeqID_3561
  Gene Ontology: Mol. function=nucleoside-triphosphatase activity; Cellular component=mitochondrial outer membrane; Biological process =protein targeting to mitochondrion
  Homolog annotation: Hit_ID=Q0U6I6; Match level="QueryCoverage=97%, HitCoverage=43%, E-value=3e-39, Identity=51%"; Hit description =Putative uncharacterized protein
MSSNTKSSLTGYLPAILMAAAAPLIAYLGIRNLLTRLDPEAQQKEEARAKATAATRKLDAILTCKRRKSYSEYDSEDDDETDSRHRRPRLQDLNLNTYEQTIAMEVVAPEEIPVSFEDIGGLGSIIEELKESGIYPLTMPHLYAHSSSLLSAPSGVLLYGXPPGCGKDDAGQSPSHTESGACFINLHISTLTEKWYXRQQQ

SEQ ID NO: 9788 - protein, 84 aa, Zea mays
  Coding DNA Sequence Number=SeqID_3562
RHEWHRRRCLNKRLTCMHGGASRSKCSSASGLTNSLWYSLRRRAWTWSRAIALACVCYTDRYLDHTLVANSDHSNNRIRMLQYV

SEQ ID NO: 9789 - protein, 65 aa, Zea mays
  Coding DNA Sequence Number=SeqID_3564
  Gene Ontology: Mol. function=protein serine/threonine kinase activity; Cellular component=ribosome; Biological process=protein amino acid phosphorylation
  Homolog annotation: Hit_ID=A2XGD6; Match level="QueryCoverage=92%, HitCoverage=14%, E-value=6e-16, Identity=68%"; Hit description =Putative uncharacterized protein
ADWWSVGILLFEMLTGKPPFVGGNRGKIQQKIVKEKIKLPTYLSSEVHSLLKGVISKPTGYNSSL

SEQ ID NO: 9790 - protein, 111 aa, Zea mays
  Coding DNA Sequence Number=SeqID_3565
NNEVGMPSHATHCLGIKQANNDFSLIIMYISPCQKKKKKNSFFLFPGGGGGLFFPHFLPFFVGPSFVSSSRAALFWGGFCGFPSPLGPARASFWGALFPLFRVGGPFPGRL

SEQ ID NO: 9791 - protein, 199 aa, Zea mays
  Coding DNA Sequence Number=SeqID_3567
  Homolog annotation: Hit_ID=A2WLH5; Match level="QueryCoverage=72%, HitCoverage=28%, E-value=1e-47, Identity=63%"; Hit description =Putative uncharacterized protein
  Subcellular localization annotation: CTP_CleavageSite=37; ConfidenceScore=5.48e-01
KKKKKKKKISLQRRSASLRGGVPGTVGHSRARRQTPRCSSPANVGAACAYRSPTLDGDSAGSHAPAILGARDVARLAMGCRPLRAAAYCDADWYRLFRDQWPFEKEPRDALGLRELYIRRHTEIHQMKFGDPISALYYLDPAGTTPSHVMMDRNSIWFCQGPAAKKLNIDSPETELVDTHRNHSARDTRLRLFPLHEPP

SEQ ID NO: 9792 - protein, 70 aa, Zea mays
  Coding DNA Sequence Number=SeqID_3568
  Subcellular localization annotation: CTP_CleavageSite=30; ConfidenceScore=5.18e-01
KKGFHRPQTLGSGKGFFPLRQACPSFKWLKCSGKFPFNRDLIYNGHPFVQRFSCVKPSQRTWAHAKASNF

SEQ ID NO: 9793 - protein, 145 aa, Zea mays
  Coding DNA Sequence Number=SeqID_3570
  Homolog annotation: Hit_ID=A7PCE6; Match level="QueryCoverage=62%, HitCoverage=45%, E-value=3e-17, Identity=55%"; Hit description =Chromosome chr2 scaffold_11, whole genome shotgun sequence
MASSQVDVAGMAATAGGGGGGGAKAAVAEQIAQAVPSTSNLLQLMEQSSPAQQLPQCCAEVHLAKLPKNLLEKASFAKNTEHVLHQLPQVISSLDAYMDRSLQSASQIKTVTQLLSNMEKTQLKSMLPSSQMKEDQKSTEPVRVD

SEQ ID NO: 9794 - protein, 127 aa, Zea mays
  misc_feature (39)..(39): Xaa can be any naturally occurring amino acid
  misc_feature (83)..(83): Xaa can be any naturally occurring amino acid
  Coding DNA Sequence Number=SeqID_3571
  Gene Ontology: Mol. function=protein serine/threonine kinase activity; Biological process=protein amino acid phosphorylation
  Homolog annotation: Hit_ID=Q7XI53; Match level="QueryCoverage=74%, HitCoverage=21%, E-value=4e-24, Identity=62%"; Hit description =Putative ankyrin-kinase
ECYNCPYKEAAPFHRPRFYSPFYRGEGKTGSHFEPKTIXRNKTVWEINPLKLDFTKALVIGKFCSFGEILKANWRGTPIAVKXILPSLSDDRLVMSRPMQKVFTLKTPQLVHTVVHFQLFCFCYWFV

SEQ ID NO: 9795 - protein, 84 aa, Zea mays
  Coding DNA Sequence Number=SeqID_3572
  Gene Ontology: Mol. function=microtubule motor activity; Cellular component=microtubule associated complex; Biological process =microtubule-based movement
  Homolog annotation: Hit_ID=Q9SJU7; Match level="QueryCoverage=100%, HitCoverage=14%, E-value=3e-12, Identity=50%"; Hit description =Putative kinesin heavy chain
KELISVCEAQRRTGETYLNGNSSRSHQILKLVCLLLVVASVVRNYNLLIFLSWQKKWVSISAFDCTMQNFVDLAGSERASQALS

SEQ ID NO: 9796 - protein, 76 aa, Zea mays
  Coding DNA Sequence Number=SeqID_3573
  Gene Ontology: Mol. function=metal ion binding
  Homolog annotation: Hit_ID=Q4JHE0; Match level="QueryCoverage=80%, HitCoverage=14%, E-value=4e-24, Identity=83%"; Hit description=XB3 -related protein
  Pfam annotation: Domain name=Ank; Domain location=26-58; Score=28.8; E_value=1.9e-05; Accession=PF00023.20; Description=Ankyrin repeat
ASSSGGSIIAALLLENGADVNGRNIYGQTALMQACRFGHWEVVQTLLLFRCNVSKADSLSGRTALHVAAAGGHVRG

SEQ ID NO: 9797 - protein, 242 aa, Zea mays
  misc_feature (86)..(86): Xaa can be any naturally occurring amino acid
  misc_feature (100)..(100): Xaa can be any naturally occurring amino acid
  misc_feature (136)..(136): Xaa can be any naturally occurring amino acid
  misc_feature (140)..(140): Xaa can be any naturally occurring amino acid
  misc_feature (183)..(183): Xaa can be any naturally occurring amino acid
  Coding DNA Sequence Number=SeqID_3574
  Homolog annotation: Hit_ID=A3B312; Match level="QueryCoverage=73%, HitCoverage=20%, E-value=2e-25, Identity=37%"; Hit description =Putative uncharacterized protein
RRRADEEVAEKAASAKAAAATAALRGVVSVPQTCDLYRGSWVYDEVSAPVYREAECELPHGAGHLHAQRPPRRRRTRCGAGSPTGXATCPIFEAKIALCXESIETKGVMFVGDSLILDQGESVVCLPHSQAPWHTXSVVXSGSVSGVHLLECSATALLCWASFLELWNSGDPLLYRLNCPVVXPPWFARGAATFLGSFSLFFGAYDLWMNATGEQLVDRAFFLRPLPFLAFISASLRLPPGA

SEQ ID NO: 9798 - protein, 189 aa, Zea mays
  misc_feature (151)..(151): Xaa can be any naturally occurring amino acid
  misc_feature (174)..(174): Xaa can be any naturally occurring amino acid
  misc_feature (180)..(180): Xaa can be any naturally occurring amino acid
  Coding DNA Sequence Number=SeqID_3575
ASVHPMMAYIHILHTYSDRSDDGAARQTETGTRQHGLDPANSDAKSKARLQPGGLGYKHTQRITVSSARVTDSMSTASSFARTTTRRRRTEQGASRQHAQEQRNATRAMQRRAGRGLGRVEPGSFDEREGAQAGSTARLEKQEMRQRKHQXRDYEGDGGAAERGDIGRGELEGXQNAELXARADREQSR

SEQ ID NO: 9799 - protein, 171 aa, Zea mays
  Coding DNA Sequence Number=SeqID_3577
  Homolog annotation: Hit_ID=A2ZZV9; Match level="QueryCoverage=80%, HitCoverage=38%, E-value=6e-55, Identity=66%"; Hit description =Putative uncharacterized protein
  Pfam annotation: Domain name=PH_2; Domain location=56-160; Score =17.5; E_value=2e-05; Accession=PF08458.1; Description=Plant pleckstrin homology-like region
ATALRGAATLRGRRSGSGGHGQNERAEHAGPALSQDDLDFDFNHARSRAALAKGDEMFVAMPDGKWKLHTVSAASNKRGEIVLRIKKTNLVMAFSHAKESVIHDVQPCSPEKPSPHEGATYPVEVSTNKGKVELRTDDYGVYKRWVATLSHMLVMSTAVSVSTRHEPARRD

SEQ ID NO: 9800 - protein, 143 aa, Zea mays
  misc_feature (108)..(108): Xaa can be any naturally occurring amino acid
  Coding DNA Sequence Number=SeqID_3578
  Subcellular localization annotation: CTP_CleavageSite=31; ConfidenceScore=5.03e-01
TSPPSDRRSTPVQVPQPARKPEHRACTARPQAHSKHQTSQHDGAPGAARACSRPRGLPAAPSAAAAAAAAARGRRLGGVLRAVRRGVVPARRRRRLSWAAATGSWGVXILIHDSTTAFPNSSALIDVASHLTRKFCAVTCKGS

SEQ ID NO: 9801 - protein, 102 aa, Zea mays
  Coding DNA Sequence Number=SeqID_3580
  Gene Ontology: Mol. function=protein binding; Biological process=cell adhesion
  Homolog annotation: Hit_ID=Q5W6S2; Match level="QueryCoverage=85%, HitCoverage=10%, E-value=3e-27, Identity=67%"; Hit description =Putative uncharacterized protein B1036C05.9
FHFHQFVCRLTPESLLQDTVCSVLQAVSSIPSCKLLEEVCKRNFATHFDYCTTACTDFVSLDEATFKDILEASNITITGNPRALRRLRTSCERAKRTLSSTA

SEQ ID NO: 9802 - protein, 192 aa, Zea mays
  misc_feature (47)..(47): Xaa can be any naturally occurring amino acid
  misc_feature (102)..(102): Xaa can be any naturally occurring amino acid
  Coding DNA Sequence Number=SeqID_3581
  Gene Ontology: Mol. function=protein serine/threonine kinase activity; Cellular component=cytoplasm; Biological process=protein amino acid phosphorylation
  Homolog annotation: Hit_ID=A2XN71; Match level="QueryCoverage=76%, HitCoverage=26%, E-value=8e-38, Identity=58%"; Hit description =Putative uncharacterized protein
  Pfam annotation: Domain name=Pkinase; Domain location=27-191; Score= -93.6; E_value=0.0053; Accession=PF00069.15; Description=Protein kinase domain
  Pfam annotation: Domain name=Pkinase_Tyr; Domain location=27-183; Score=-174.1; E_value=0.093; Accession=PF07714.7; Description =Protein tyrosine kinase
  Pfam module annotation: Pfam domain module=Pkinase::Pkinase_Tyr; Domain location=27-191::27-183
NRVEAAPASPGLVVLLDPTRRDLGAQYELGGELGRGEFGVTYMCSPXSARYPYKSVSKRCLWTLVDMEDVHQEVDILRYMPAHPSIVSLRAVYEDTMHLRHXEDAVHLAMEFCEGGDLFDRIVARGHYIERAVVTRTIVEVVQFCKRGSVPVRLSSSSSGVFWLVWDLEEAYTTGKSIVLSELESNGMNAVT

SEQ ID NO: 9803 - protein, 211 aa, Zea mays
  misc_feature (211)..(211): Xaa can be any naturally occurring amino acid
  Coding DNA Sequence Number=SeqID_3582
  Gene Ontology: Mol. function=hydrogen ion transmembrane transporter activity; Cellular component=integral to membrane; Biological process=proton transport
  Homolog annotation: Hit_ID=Q7F1V0; Match level="QueryCoverage=20%, HitCoverage=9%, E-value=8e-15, Identity=88%"; Hit description =Putative heme binding protein cemA
  Pfam annotation: Domain name=IQ; Domain location=34-54; Score=22.2; E_ value=0.002; Accession=PF00612.17; Description=IQ calmodulin-binding motif
  Subcellular localization annotation: CTP_CleavageSite=54; ConfidenceScore=5.14e-01
MQATLQKVEQGLLQIKATVQHEQHQLALSAQLQTSATVGTQAAARGFLARRRVREMRRQMLEAALVTVDLGTRGRDLALSDGHQQRHRAAISKCEHGTCPAGDELQLYGSGGREGTPLVIGKGALFSATTFRYRPPRGRLRWLLLRPTPAPVMLQLEYELLVQEGCTVRAKFLALLIVVPWVIDFLVHDYVMMPFLERYVQKVPLAAELLX

SEQ ID NO: 9804 - protein, 86 aa, Zea mays
  Coding DNA Sequence Number=SeqID_3583
  Gene Ontology: Mol. function=catalytic activity; Cellular component =cellular_component; Biological process=metabolic process
  Homolog annotation: Hit_ID=A2ZDF3; Match level="QueryCoverage=84%, HitCoverage=18%, E-value=8e-18, Identity=55%"; Hit description =Putative uncharacterized protein
IRWRVFEILSPITRKNNDHSSKSARYGTWGICFIYGTLHAINGLVAAGRNYENNICIRKACEFLLSIQLKTGGWAESYRSLEVRYF

SEQ ID NO: 9805 - protein, 106 aa, Zea mays
  Coding DNA Sequence Number=SeqID_3584
  Homolog annotation: Hit_ID=Q2QNG6; Match level="QueryCoverage=100%, HitCoverage=100%, E-value=3e-49, Identity=90%"; Hit description =Expressed protein
MGIGYVVGVLGGAILAHAAYATIQYRAVLKITEEEFSRPPMDVMMELLLGLVLCMWAGLAVPTKFLSVLPHSDENRIVSLPANLDFMIFNHRGRALPSDSDLKLHT

SEQ ID NO: 9806 - protein, 180 aa, Zea mays
  misc_feature (164)..(165): Xaa can be any naturally occurring amino acid
  Coding DNA Sequence Number=SeqID_3585
KIYGSSPSPVFCICTSSALREALPRALCWFQVQYFLDGWHLELQRVGCVEPFHARPYVDLHQRVRCCPPHSSTAVRHTSPRRSTPSLAISAGTAAVAGTLAAGAVAFAVASASLTAVRTASRTAGADSVTVCAAAAPAPAAGRFSPIAGAMRWGTRGWVGGREXXVRGERAAASTGGLEG

SEQ ID NO: 9807 - protein, 184 aa, Zea mays
  Coding DNA Sequence Number=SeqID_3587
LRLVEPIGGVSRLGDRPWNTQLLTGVLYSQQSRYLPWAALWASNPSPIPSPSVTAAGQPAPGRRRPSLPPSARPTRLAPAVGHAPVNPPTASPRATNPDPPPGVKLWGLCCSGVAATPPGLPAGGPHGARAPPSAMGSGLPAVPLPDEQVIEDPGVQQVEIAEQELVEAPPRRRTCGLGGALQR

SEQ ID NO: 9808 - protein, 159 aa, Zea mays
  misc_feature (39)..(39): Xaa can be any naturally occurring amino acid
  misc_feature (86)..(86): Xaa can be any naturally occurring amino acid
  misc_feature (113)..(113): Xaa can be any naturally occurring amino acid
  Coding DNA Sequence Number=SeqID_3589
  Gene Ontology: Mol. function=structural molecule activity; Cellular component=cytoskeleton; Biological process=multicellular organismal development
  Homolog annotation: Hit_ID=A2XMK6; Match level="QueryCoverage=97%, HitCoverage=60%, E-value=1e-34, Identity=84%"; Hit description=Actin- related protein 7
ICAADIAPVCEGAVQHIASKRLQIGGVDLTNLFSQELNXTNPWAYLDVSDVERLKEQYACCTEYQLAFEAIESSCRPKRDTLPDGXGFEDRFQREANLSTSAICPSLVKPPEXRPENLARYSAWLGGAILAKVVFPQNQHVTKGEYDETGPSIVHKKCF

SEQ ID NO: 9809 - protein, 98 aa, Zea mays
  Coding DNA Sequence Number=SeqID_3590
PHITLSVCNSCLPKHISLTGQNITDPKAAYTHGSLEVANRLLASIACTQKHIVRLSSGNISRRQVLFSLDRKTTCPFISNDRPAIHYCHRVHEGASSI

SEQ ID NO: 9810 - protein, 90 aa, Zea mays
  Coding DNA Sequence Number=SeqID_3592
  Pfam annotation: Domain name=DUF1723; Domain location=15-74; Score =15.9; E_value=0.0069; Accession=PF08330.1; Description=Protein of unknown function (DUF1723)
EDWPPVLRRIKGLLGRRPSSVMATRHWWTSSPRPYGVGGSQRLTFHLPCGEMTVTLQDCFISLGLSIRARLVTGAPSAPALTSARAVRAL

SEQ ID NO: 9811 - protein, 141 aa, Zea mays
  misc_feature (127)..(127): Xaa can be any naturally occurring amino acid
  Coding DNA Sequence Number=SeqID_3594
  Subcellular localization annotation: CTP_CleavageSite=64; ConfidenceScore=5.74e-01
RALRSAPLPLGFRFLPPSTSHLLLFMPQPLPAAVGTKSVSVSPLRPRRATACVSVSLSARFSPSATRRRVRSCLAEWRRPGHGWPVRRRRRCWVSSWRWRQLRRHRGTWRWCTSRSGGSKAQCVWTXDRRWTILCTMWIRS

SEQ ID NO: 9812 - protein, 131 aa, Zea mays
  Coding DNA Sequence Number=SeqID_3595
  Gene Ontology: Mol. function=nutrient reservoir activity
  Homolog annotation: Hit_ID=Q41884; Match level="QueryCoverage=71%, HitCoverage=39%, E-value=1e-27, Identity=67%"; Hit description=Zein
  Subcellular localization annotation: CTP_CleavageSite=37; ConfidenceScore=5.58e-01
LFPYFQQHQFFPFNQLFTLNPAAFLQQQQFFPFSQLGSAYVQQQQFFPFNQLAALNPFVFFQQQILLPFGQLGTTSPASFLTQQQLLPFYHQFVANPPTLFQLQQLLPFVQLALTNPAAFFQQPIIGGALF

SEQ ID NO: 9813 - protein, 108 aa, Zea mays
  Coding DNA Sequence Number=SeqID_3596
TTLPRLPPITRLCLCRHRHGCCWWCSCHCCRVLVTGADIPPDLRGSLSPSWSRRDSCCQHPSRRPSNEGGAWMVVRVTSATARSGFAAEHLLRRAIRGGPVAHHAPIS

SEQ ID NO: 9814 - protein, 248 aa, Zea mays
  Coding DNA Sequence Number=SeqID_3598
  Gene Ontology: Mol. function=single-stranded DNA binding; Cellular component=nucleus; Biological process=nucleotide-excision repair
  Homolog annotation: Hit_ID=Q10Q89; Match level="QueryCoverage=95%, HitCoverage=15%, E-value=9e-39, Identity=45%"; Hit description=XPG I- region family protein, expressed
DKKREFLWSPKGRGRSRTTAGSDATINQEDYEIEYSTSASDEDSCKRHSNSYGSEGRALRRSSRKRKQVTYMEDGHEAYGNDVPMHQNDENNPGQPAAAADVAGEDTGFNIYHQDTSELNSSQMHTGAGITEDINEDSQRFELREDNQVDSTPKDYLFNGGGFCMEGEGEGDEQEPACDQSGAEVEPGPSGPCGAMDEVSESASISTAMECTENARMEARGASSSQQRRKASRGLSAMPTLIKRRRKS

SEQ ID NO: 9815 - protein, 113 aa, Zea mays
  misc_feature (17)..(17): Xaa can be any naturally occurring amino acid
  Coding DNA Sequence Number=SeqID_3599
  Subcellular localization annotation: CTP_CleavageSite=53; ConfidenceScore=5.83e-01
LYFNIDLHSFFVYFFFXPVCFSSFFFFSVSSFFFFFFPSCFFAVFFFFFFCLCCFFFVCFFFFLFFLVIPRFFFFFCLFVSFFNFFFFFFLFIFFLFFFSFFAVFFFLFFCFS

SEQ ID NO: 9816 - protein, 88 aa, Zea mays
  Coding DNA Sequence Number=SeqID_3601
  Subcellular localization annotation: CTP_CleavageSite=30; ConfidenceScore=5.38e-01
TINLSLFFYLFIFLLVLSLFVCSRPLRPPRRATIKDFLGVGFFPKRQGGSSPQLTVFQIQRQKIISPQSLNRCQTTVESDARVCKNTL

SEQ ID NO: 9817 - protein, 64 aa, Zea mays
  Coding DNA Sequence Number=SeqID_3603
  Gene Ontology: Mol. function=glycerone kinase activity; Biological process=glycerol metabolic process
  Homolog annotation: Hit_ID=Q10DU4; Match level="QueryCoverage=70%, HitCoverage=7%, E-value=3e-09, Identity=64%"; Hit description=3,4 -dihydroxy-2-butanone kinase, putative, expressed
NRKWTSKGCILEAVSEASAVEIINLKDSLNEWVTKVGDGGSGTTVFRKANDKAKHNKIIKANPE

SEQ ID NO: 9818 - protein, 80 aa, Zea mays
  Coding DNA Sequence Number=SeqID_3604
  Gene Ontology: Mol. function=GDP-mannose 4,6-dehydratase activity; Cellular component=intracellular; Biological process=GDP-mannose metabolic process
  Homolog annotation: Hit_ID=Q89TZ1; Match level="QueryCoverage=97%, HitCoverage=20%, E-value=3e-29, Identity=79%"; Hit description=GDP -mannose 4,6-dehydratase
GTGPPLEETGIDARSGKVVVKIDPTYFRPTEVDLLIGDASKARQVLGWKPKRSFAQLVEEMVASDLAEAKRDVANGKHTV

SEQ ID NO: 9819 - protein, 155 aa, Zea mays
  misc_feature (8)..(8): Xaa can be any naturally occurring amino acid
  Coding DNA Sequence Number=SeqID_3605
  Gene Ontology: Mol. function=protein transporter activity; Cellular component=cytoplasm; Biological process=regulation of transcription, DNA-dependent
  Homolog annotation: Hit_ID=A6R5Z3; Match level="QueryCoverage=100%, HitCoverage=100%, E-value=1e-55, Identity=74%"; Hit description =Nascent polypeptide-associated complex subunit beta
  Pfam annotation: Domain name=NAC; Domain location=34-93; Score=104.5; E_value=3.2e-28; Accession=PF01849.8; Description=NAC domain
MDAAKLAXLQQSVRIGGKGTPRRKTKRVHKTSTTDDKKLQTTLKKMNVQPIQAIEEVNMFKEDGNVIHFSNPKVHAAVPSNTFAIYGNGEEKELTELVPGILNQLGPDSLASLRKLAESYQSLQKKEAGEGKNDDEDEDDIPDLVEGENFEGTVE

SEQ ID NO: 9820 - protein, 115 aa, Zea mays
  Coding DNA Sequence Number=SeqID_3606
  Gene Ontology: Mol. function=serine-type endopeptidase inhibitor activity; Cellular component=extracellular region; Biological process=biological_process
  Homolog annotation: Hit_ID=A4PIB8; Match level="QueryCoverage=82%, HitCoverage=82%, E-value=1e-30, Identity=62%"; Hit description =Trypsin inhibitor
  Pfam annotation: Domain name=Bowman-Birk_leg; Domain location=54-78; Score=31.2; E_value=3.8e-06; Accession=PF00228.10; Description =Bowman-Birk serine protease inhibitor family
  Pfam annotation: Domain name=Bowman-Birk_leg; Domain location=80-104; Score=37.7; E_value=4.3e-08; Accession=PF00228.10; Description=Bowman- Birk serine protease inhibitor family
  Pfam module annotation: Pfam domain module=Bowman-Birk_leg::Bowman -Birk_leg; Domain location=54-78::80-104
MELKKKALVKVAFLLFLLGFTATVDARFDPSSFITQVLPSGDANYYVKSTTTACCDACPCTRSIPPQCRCPHVGESCHSPCKACICTKPIPPKCRCADITDFCYPKRSPSEAEAH

SEQ ID NO: 9821 - protein, 112 aa, Zea mays
  Coding DNA Sequence Number=SeqID_3607
  Gene Ontology: Mol. function=lipid binding; Cellular component =extracellular region; Biological process=cell wall organization and biogenesis
  Homolog annotation: Hit_ID=Q42589; Match level="QueryCoverage=100%, HitCoverage=94%, E-value=6e-59, Identity=100%"; Hit description=Non -specific lipid-transfer protein 1 precursor
  Pfam annotation: Domain name=Tryp_alpha_amyl; Domain location=29-112; Score=91.3; E_value=3.2e-24; Accession=PF00234.12; Description =Protease inhibitorseed storageLTP f
MAGVMKLACLLLACMIVAGPITSNAALSCGSVNSNLAACIGYVLQGGVIPPACCSGVKNLNSIAKTTPDRQQACNCIQGAARALGSGLNAGRAAGIPKACGVNIPYKISTST

SEQ ID NO: 9822 - protein, 210 aa, Zea mays
  misc_feature (134)..(134): Xaa can be any naturally occurring amino acid
  Coding DNA Sequence Number=SeqID_3608
  Gene Ontology: Mol. function=DNA binding; Cellular component =chromosome; Biological process=nucleosome assembly
  Homolog annotation: Hit_ID=P26568; Match level="QueryCoverage=99%, HitCoverage=76%, E-value=3e-45, Identity=54%"; Hit description =Histone H1.1
  Pfam annotation: Domain name=Linker_histone; Domain location=61-130; Score=133.9; E_value=4.5e-37; Accession=PF00538.9; Description =linker histone H1 and H5 family
MSEVEIENAATIEGNTAADAPVTDAAVEKKPAAKGRKTKNVKEVKEKKTVAAAPKKRTVSSHPTYEEMIKDAIVTLKERTGSSQYAIQKFIEEKRKELPPTFRKLLLLNLKRLVASGKLVKVKASFKLPSASAXASSPNAGAEKSAPANNKPATVACTTAKRIAAAASWANNTIGVKPTTAAANKAPPKSKAKPAPRGLAAAIKRKAVDG

SEQ ID NO: 9823 - protein, 79 aa, Zea mays
  Coding DNA Sequence Number=SeqID_3609
LLSRRVSNQPRLPQVVARFSPAFPRPRSADDDWVRSAAPPFYAGRPSPRRDLLWRRAPHQALSSYEHGASMQANKPDSN

SEQ ID NO: 9824 - protein, 101 aa, Zea mays
  Coding DNA Sequence Number=SeqID_358
EQHSNPLLPHTCAGCALNHMGISSLKRPLATIPTMKSERTFFRAKKPREKAQTMVWELGRHKKRTQKHSYITAQYYTHSSFYSSTSLRHMVCSRSCAGLDI

SEQ ID NO: 9825 - protein, 69 aa, Zea mays
  Coding DNA Sequence Number=SeqID_360
  Homolog annotation: Hit_ID=A2X2W6; Match level="QueryCoverage=76%, HitCoverage=23%, E-value=2e-09, Identity=50%"; Hit description =Putative uncharacterized protein
MDASALNNPRLKALVEVTFRATYWCRFWAQLQLKMEDQELIKSSCRKMEMVLLKFFRNFGWGAAWRLTL

SEQ ID NO: 9826 - protein, 205 aa, Zea mays
  Coding DNA Sequence Number=SeqID_361
RMLCRFEPSSGCEFVAHLVTPVSLTLGPTCTRKAWSRHVSNMKYRLVFVLVPTITQAWVVVERCRNGHSCPPPITKNHHGQATQDEACSCRHRPLPQPPPPSDPSKVTEQPPALPPFARRRGQSGRAPGVQPGPAAAGAGCGDGGPGEEQHVWCCQRRLQSGGLQVRVLPLLVQSYWMYTVCQLELSSLPLLACGVLVAQRCRTK

SEQ ID NO: 9827 - protein, 79 aa, Zea mays
  Coding DNA Sequence Number=SeqID_363
  Gene Ontology: Mol. function=RNA binding
  Homolog annotation: Hit_ID=Q5SMR4; Match level="QueryCoverage=88%, HitCoverage=13%, E-value=1e-22, Identity=72%"; Hit description=ALM beta-like
MGEISPAMESRRTAPFPLVDSYVAPGDVVLDLCEMNNQTIKFGAGLFQECDTIQATSAGKLRLLKPNKYWIENSHKRVR

SEQ ID NO: 9828 - protein, 120 aa, Zea mays
  Coding DNA Sequence Number=SeqID_364
  Subcellular localization annotation: CTP_CleavageSite=64; ConfidenceScore=5.56e-01
AILYIIVTGILEANISTATTIATSSGGRRKQCRRRSSGSSYAGRTRTSPRFASAAPRVFSKSASASTAAASPPQLTGGGRRSGRGPSRPSRCCLRCSGLAETPPYDRSLGRLGSDALATN

SEQ ID NO: 9829 - protein, 112 aa, Zea mays
  Coding DNA Sequence Number=SeqID_366
IITSPSSSSEFCKSNHHCSKCSGIKLTIIKRRDGEACPITLYAPPQPRQGPTQQSNPVVRRTAKSLQQPFPLENIIRRQRSSNPKLTGRRRPRPLTNSSQHPPSASSCGTCS

SEQ ID NO: 9830 - protein, 102 aa, Zea mays
  Coding DNA Sequence Number=SeqID_368
SVYKLVVLLYLRHPSVLFQASAAQRAHMKRARRGQKPPPAIYPGGDSLAPAAGLGASQDLAARICGLVGREPRPKNRRFLADASHRVSRRVIKFKEGNAGIV

SEQ ID NO: 9831 - protein, 118 aa, Zea mays
  Coding DNA Sequence Number=SeqID_370
SRMLQCNNSIRLGASDQSDTEEQFQTRKGSKQTSGREKKERGKTKKCIGTTKMDQRHTLNGYNSCDGPKLVIAKTQCPPKFKLTQLQLLEYMIYKTRPVCLGVWSDPAKGDLLTSVEP

SEQ ID NO: 9832 - protein, 84 aa, Zea mays
  Coding DNA Sequence Number=SeqID_371
  Subcellular localization annotation: CTP_CleavageSite=40; ConfidenceScore=5.79e-01
LQLQVLADSPSPSTSAARRRFPSAAAPPPLPLLLVVDLVSGTMARSLSTALMRGLMRSSRVLFVTSCIQQRLCWGHLENDPNIS

SEQ ID NO: 9833 - protein, 236 aa, Zea mays
  misc_feature (62)..(62): Xaa can be any naturally occurring amino acid
  misc_feature (70)..(70): Xaa can be any naturally occurring amino acid
  misc_feature (107)..(107): Xaa can be any naturally occurring amino acid
  Coding DNA Sequence Number=SeqID_373
  Homolog annotation: Hit_ID=Q69XH8; Match level="QueryCoverage=94%, HitCoverage=54%, E-value=9e-67, Identity=60%"; Hit description =Putative uncharacterized protein P0490F09.11
QELLAQLAAEEQHGHELTKIVRELLPTPKKTANLQRQPRHRRRSNDRSRMSKRLIEEAEQYXLSNVEDWXTDFLSFDGERSDSSSTRKDLLVQAMTETPVAFPKVAXALPAVADGVVLPWLQWETTNDLQTSSPCKTKAQVTTTRYRTSNQTRSSRGSWSPGDHTTSVASKDRLLTKLGEVGICRSSCPDHARTLSFHIDDYLHLRQSEDLLLETWMQKERIVSGGLVLCSRSTIL

SEQ ID NO: 9834 - protein, 52 aa, Zea mays
  Coding DNA Sequence Number=SeqID_374
IEIKNTCYLCSLFNKWLTHEKRLKIAQICCSTDGSYVMKLEKSTGKKMVLSC

SEQ ID NO: 9835 - protein, 97 aa, Zea mays
  Coding DNA Sequence Number=SeqID_3610
  Gene Ontology: Mol. function=catalytic activity
  Homolog annotation: Hit_ID=Q2H8W2; Match level="QueryCoverage=100%, HitCoverage=12%, E-value=3e-13, Identity=45%"; Hit description =Putative uncharacterized protein
SMGQAHKAVPLTLALCLGAACQVEGSIAWKMMSAEARHGGEAAAKASSSSGAVTSKTVTIGHASGKLDIGISMKDGAIVSAELLRTARVLMKGEVLY

SEQ ID NO: 9836 - protein, 92 aa, Zea mays
  Coding DNA Sequence Number=SeqID_3611
QKCKSACVGSYEQSLLPHLATLRALLAGLLAAVPTGAGGHQGGVGKPCPWPQATAELPPLPATRAMATTDIESMQVELLAGYYKSRFSVGYK

SEQ ID NO: 9837 - protein, 291 aa, Zea mays
  misc_feature (1)..(195): Xaa can be any naturally occurring amino acid
  Coding DNA Sequence Number=SeqID_3613
XXXXXXXXXXXXXXXXXXXXXXXXXXXXXXXXXXXXXXXXXXXXXXXXXXXXXXXXXXXXXXXXXXXXXXXXXXXXXXXXXXXXXXXXXXXXXXXXXXXXXXXXXXXXXXXXXXXXXXXXXXXXXXXXXXXXXXXXXXXXXXXXXXXXXXXXXXXXXXXXXXXXXXXXXXXXXXXXXXXXXXXXXXXXXXXXXXXLCGHQSSCSFSPGVLNAWCFDLGEFPCERHLGSTPSPGCELLCLRRSTAAASTSPLRCALDVLDKMPQRAAVMRSPPCCLHRPDLRSPCRDAKILR

SEQ ID NO: 9838 - protein, 137 aa, Zea mays
  Coding DNA Sequence Number=SeqID_3615
  Gene Ontology: Mol. function=nucleotide binding; Cellular component =ER-Golgi intermediate compartment membrane; Biological process=small GTPase mediated signal transduction
  Homolog annotation: Hit_ID=P49103; Match level="QueryCoverage=49%, HitCoverage=32%, E-value=2e-11, Identity=51%"; Hit description=Ras -related protein Rab-2-A
MCIAKSMNLGMAKLPAVVQNAPNGAGAFIKAAGRICKGVRDGLFDGSNESNGVEVGYAVPNSFAGGVGLSSQDGGCCSLLLAASLSNAQGSPFSILMFAYSWTRMICSFIPHVSIHKHFMFSVFLSFCKKKKKHQKE

SEQ ID NO: 9839 - protein, 137 aa, Zea mays
  Coding DNA Sequence Number=SeqID_3616
  Gene Ontology: Mol. function=serine-type endopeptidase activity; Cellular component=intracellular; Biological process=protein modification process
  Homolog annotation: Hit_ID=Q0WRN6; Match level="QueryCoverage=66%, HitCoverage=95%, E-value=2e-23, Identity=69%"; Hit description =Polyubiquitin 4 UBQ4
  Pfam annotation: Domain name=ubiquitin; Domain location=36-122; Score= 34.2; E_value=4.6e-07; Accession=PF00240.13; Description=Ubiquitin family
GNQLEDARPLPDSTTQKESPPPLVLRLGGGIQIFVKPLTGKPIPLEVESSAPIDNVKAKIQAKEGFPPAQQGLFFPGNQLEDAPPLADSTIPKGEPSPPGAPPPRWSVTHGSFKLLLYLGICVVWSPLGSPYMEVVV

SEQ ID NO: 9840 - protein, 76 aa, Zea mays
  Coding DNA Sequence Number=SeqID_3617
  Gene Ontology: Mol. function=metal ion binding
  Homolog annotation: Hit_ID=Q2QP88; Match level="QueryCoverage=94%, HitCoverage=25%, E-value=6e-24, Identity=73%"; Hit description=CHY zinc finger family protein, expressed
MFEMLDQEIEATIMPLVYRYKIWVFCKEGEKVSEVNFHVIGHKCSHLRSYNTRTTYRPANLSGSSSPLTDLFDNNI

SEQ ID NO: 9841 - protein, 81 aa, Zea mays
  Coding DNA Sequence Number=SeqID_3618
  Gene Ontology: Mol. function=structural constituent of ribosome; Cellular component=ribonucleoprotein complex; Biological process =translation
  Homolog annotation: Hit_ID=Q3E902; Match level="QueryCoverage=98%, HitCoverage=95%, E-value=5e-37, Identity=93%"; Hit description=40S ribosomal protein S21-2
  Pfam annotation: Domain name=Ribosomal_S21e; Domain location=1-80; Score=165.5; E_value=1.4e-46; Accession=PF01249.9; Description =Ribosomal protein S21e
MQNEEGQVTELYIPRKCSATNRMITSKDHASVQLNIGHLDADGIYTGQFTTLALCGFVRAQGDADSGVDRLWQKKVEAKQI

SEQ ID NO: 9842 - protein, 177 aa, Zea mays
  misc_feature (167)..(167): Xaa can be any naturally occurring amino acid
  Coding DNA Sequence Number=SeqID_3619
SMSRTNIFQPPSRPLPLIFLGVVFNWTTGHQPAAPHHVTIELFSDGHPSLSAAAKLLVRGPGCPTSSCAPSFPSQLAEADLGNAPIAVEFSRPSPASLPWRAITSSSFLGAPFSPAASRSRAACPLQPRCASPWRSSSPSMAAAPSAPPSWPRFFPWRSAFPRSDRXSSLLHILSPA

SEQ ID NO: 9843 - protein, 104 aa, Zea mays
  Coding DNA Sequence Number=SeqID_3621
LGDDGLDLSRTHHSILQAPHPVVPALDRDYRRRLAVVSAPSPIWFFGSQCDVSIVPCTSPSNGSRTGVAAYALSLFYLPCDGACLRMQNATFFFWKNWGIGPAG

SEQ ID NO: 9844 - protein, 140 aa, Zea mays
  Coding DNA Sequence Number=SeqID_3623
  Subcellular localization annotation: CTP_CleavageSite=50; ConfidenceScore=5.13e-01
DLTSLFSRGRIPCHALRKFLPLAKLSIHSVVPSPRHFPPFSPRPAHLSSRARHGSCRPILRRIGFLQDPADPNAGAGIGGTEPKKRKQKPSGALAVLKKKRRRPLPFIPSTDPAQRLWQMLCLLVFSACCNSKRVFSGFF

SEQ ID NO: 9845 - protein, 339 aa, Zea mays
  misc_feature (259)..(259): Xaa can be any naturally occurring amino acid
  Coding DNA Sequence Number=SeqID_3625
  Gene Ontology: Mol. function=serine-tRNA ligase activity; Cellular component=nuclear pore; Biological process=protein import into nucleus
  Homolog annotation: Hit_ID=A7QMM2; Match level="QueryCoverage=99%, HitCoverage=16%, E-value=5e-92, Identity=52%"; Hit description =Chromosome chr19 scaffold_126, whole genome shotgun sequence
  Pfam annotation: Domain name=TPR_MLP1_2; Domain location=25-277; Score=124.6; E_value=3e-34; Accession=PF07926.2; Description =TPRMLP1MLP2-like protein
DGNLRDKLSEMEKSYVIKCEEAANAIESKEKHITSLMNEISGLRTEVSQKLPQLEKLEIELALSKSSLDEQYKRWRTAQDNYERQVILQSETIQELTNTSKQLSSLQHEITVLRQTADALKNENECLRSSAEQEKIGLLKEKDDALQKYNELNDQNRILHNQLEALHIRLAEKERNIAGLSSHRTDNSHAEDDLQSVISYLRRSKEIAETEISLLKQEKSRLQIELESSLKSAKEAQDLLRGQADSARALMFKDEEFKXLQIQVREINLLRESNIQLREENRHNFEECQKFREEAQKAKMESERLQNLLLEKEVDAEMCKRELEMQKAEIANLNQSISE

SEQ ID NO: 9846 - protein, 78 aa, Zea mays
  misc_feature (19)..(19): Xaa can be any naturally occurring amino acid
  Coding DNA Sequence Number=SeqID_3626
  Subcellular localization annotation: CTP_CleavageSite=10; ConfidenceScore=5.10e-01
AWFPALPCLSASLVSCPCXWTTHHTVPFPPCPTHPPPSLCLLLQISFSLHSIWLPTNDSLNSVKRPFGELILLKKVSR

SEQ ID NO: 9847 - protein, 184 aa, Zea mays
  misc_feature (121)..(121): Xaa can be any naturally occurring amino acid
  misc_feature (135)..(135): Xaa can be any naturally occurring amino acid
  misc_feature (141)..(141): Xaa can be any naturally occurring amino acid
  misc_feature (144)..(144): Xaa can be any naturally occurring amino acid
  misc_feature (149)..(149): Xaa can be any naturally occurring amino acid
  misc_feature (153)..(154): Xaa can be any naturally occurring amino acid
  misc_feature (159)..(159): Xaa can be any naturally occurring amino acid
  misc_feature (163)..(164): Xaa can be any naturally occurring amino acid
  misc_feature (166)..(167): Xaa can be any naturally occurring amino acid
  misc_feature (169)..(169): Xaa can be any naturally occurring amino acid
  misc_feature (174)..(174): Xaa can be any naturally occurring amino acid
  misc_feature (176)..(178): Xaa can be any naturally occurring amino acid
  misc_feature (180)..(180): Xaa can be any naturally occurring amino acid
  Coding DNA Sequence Number=SeqID_3628
WIPRAAGSVECPNSNLSQDRLWPPLSYTIPRGTTCGPNPISDLLTVIEVHFGGARLRTPEAALASMAILQSGHIRLMVGVPAIFLDPAGNLGTGLQVAGGMGVSFGTGLLEGGPATRFAYXESYYNSLAVVLQRXDWENPXVPXLIALXHIPXXSLRNXRKAXXIXXPXFAQPXWXXXVXSLYF

SEQ ID NO: 9848 - protein, 244 aa, Zea mays
  Coding DNA Sequence Number=SeqID_3629
  Homolog annotation: Hit_ID=A7Q2X8; Match level="QueryCoverage=72%, HitCoverage=57%, E-value=1e-39, Identity=45%"; Hit description =Chromosome chr12 scaffold_47, whole genome shotgun sequence
MFRPGGPLPSLKGTKAGLPPGAAALEIVIPRAAGFARPPPVPTPLGLKPYRWKRRRKMLESINLPISCNFSSFPHLKPSRKAQSLSQPRNLTLVQSRAPLPFLKPDRILLRNNNKSQFLKHEKKGLFHVCRSSLNNPDPDKTEIQDEGRDWTSSVLLFALWGALLYYCFNLAPDQTPTQDLYFVKKLLNLKGDDGFRMNQILVGLWYIMGLWPVVYAMLLLPTGRSKTQAWPFVVFLILPCFVS

SEQ ID NO: 9849 - protein, 311 aa, Zea mays
  misc_feature (85)..(311): Xaa can be any naturally occurring amino acid
  Coding DNA Sequence Number=SeqID_3630
  Subcellular localization annotation: CTP_CleavageSite=61; ConfidenceScore=5.28e-01
CAVNPFLSQRKWHSSATQKNYCHTTSQVILFMICKKDNSPNNHMLGTGLSSSARRWFSRVKSEPIFSEESKIANPNKNYTSGIRXXXXXXXXXXXXXXXXXXXXXXXXXXXXXXXXXXXXXXXXXXXXXXXXXXXXXXXXXXXXXXXXXXXXXXXXXXXXXXXXXXXXXXXXXXXXXXXXXXXXXXXXXXXXXXXXXXXXXXXXXXXXXXXXXXXXXXXXXXXXXXXXXXXXXXXXXXXXXXXXXXXXXXXXXXXXXXXXXXXXXXXXXXXXXXXXXXXXXXXXXXXXXXXXXXXXXXXXXXXXXXXXXXX

SEQ ID NO: 9850 - protein, 143 aa, Zea mays
  Coding DNA Sequence Number=SeqID_3632
  Gene Ontology: Mol. function=DNA binding; Cellular component =chromosome; Biological process=nucleosome assembly
  Homolog annotation: Hit_ID=UPI0000F2BE9E; Match level="QueryCoverage =93%, HitCoverage=78%, E-value=4e-51, Identity=79%"; Hit description =PREDICTED: similar to histone protein Hist2h3c1
  Pfam annotation: Domain name=Histone; Domain location=80-143; Score =84.9; E_value=2.6e-22; Accession=PF00125.14; Description=Core histone H2AH2BH3H4
  Subcellular localization annotation: CTP_CleavageSite=75; ConfidenceScore=5.39e-01
IQTFALSFPFSRLFVVTLFDFEMARTKQTARKSTGGKAPRKQLATKAARKSAPATGGVKKPHRFRPGTVALREIRKYQKSTELLIRKLPFQRLVREIAQDFKTDLRFQSSAVAALQEAAEAYLVGLFEDTNLCAIHAKRVTIM

SEQ ID NO: 9851 - protein, 91 aa, Zea mays
  Coding DNA Sequence Number=SeqID_3633
GPFEEAFHFPHSWLPNLILTLSLQFPHHLESESGSGGGPKGHSLCFPTTHEGSFRCRLHRSGTAFSSSPPFRMKRSKSMSADKPVVSVSHL

SEQ ID NO: 9852 - protein, 113 aa, Zea mays
  Coding DNA Sequence Number=SeqID_3635
  Gene Ontology: Mol. function=sequence-specific DNA binding; Cellular component=intracellular; Biological process=regulation of transcription, DNA-dependent
MFFDALAPSSALQLTRFTDIDAFRPAESLEDSRSIPLDVANFAAARAIVNLPACRIFVARSFARILETTYRAPGGMVILPMSDDLCARSSGVEFDSRFFVALRGIHHCHFVEP

SEQ ID NO: 9853 - protein, 112 aa, Zea mays
  misc_feature (61)..(61): Xaa can be any naturally occurring amino acid
  misc_feature (68)..(68): Xaa can be any naturally occurring amino acid
  misc_feature (74)..(74): Xaa can be any naturally occurring amino acid
  misc_feature (78)..(78): Xaa can be any naturally occurring amino acid
  Coding DNA Sequence Number=SeqID_3636
  Gene Ontology: Mol. function=unfolded protein binding; Cellular component=chloroplast; Biological process=cellular protein metabolic process
  Homolog annotation: Hit_ID=A2WZS7; Match level="QueryCoverage=87%, HitCoverage=18%, E-value=4e-12, Identity=42%"; Hit description =Putative uncharacterized protein
  Subcellular localization annotation: CTP_CleavageSite=23; ConfidenceScore=5.21e-01
MASTFGATSTDGLMAAPSGKNVRLQRRANFRVKAAKELYFNKDGSAIKKLQTGVNKLADLXVGGTLGXKGKEMXFLEXSKYGSPQRLVKRMGLQLAREGWSWEGPLWEKNWS

SEQ ID NO: 9854 - protein, 120 aa, Zea mays
  misc_feature (102)..(102): Xaa can be any naturally occurring amino acid
  Coding DNA Sequence Number=SeqID_3637
  Gene Ontology: Mol. function=protein serine/threonine kinase activity; Biological process=recognition or rejection of self pollen
  Homolog annotation: Hit_ID=Q9LLN5; Match level="QueryCoverage=96%, HitCoverage=15%, E-value=1e-26, Identity=46%"; Hit description =Receptor-like protein kinase
LDWIAPTSLHGPPFVPHTGDEESNSALADMHTVRRNSPKVYTTSSCHISYFPLQAITMLHDGDANNLVDPQLHGEFNLEEAIRVCKVALWCIQDNELDRPTXIGMPPMPRQLVAITKREL

SEQ ID NO: 9855 - protein, 194 aa, Zea mays
  misc_feature (42)..(42): Xaa can be any naturally occurring amino acid
  misc_feature (54)..(54): Xaa can be any naturally occurring amino acid
  misc_feature (57)..(57): Xaa can be any naturally occurring amino acid
  misc_feature (82)..(82): Xaa can be any naturally occurring amino acid
  misc_feature (93)..(93): Xaa can be any naturally occurring amino acid
  misc_feature (143)..(143): Xaa can be any naturally occurring amino acid
  misc_feature (151)..(151): Xaa can be any naturally occurring amino acid
  Coding DNA Sequence Number=SeqID_3638
  Homolog annotation: Hit_ID=Q5VPM5; Match level="QueryCoverage=60%, HitCoverage=77%, E-value=8e-27, Identity=55%"; Hit description =Putative uncharacterized protein P0566A10.17
MAPAIAQQQPQVQPIGVGGRKVVDEVSGWRVLAAGMAEFSWXTVLGFLSLTFNXGMXIYRFNGDAGFVVFVVVTYLDLVALXFACLRYYEQLXSSTPKSARGLRLGVWSLTTLLNIMFSYKVAEIMPLPVKFVVWSMAAATHXGGFYAFFXHSEKAVIAQRLAPRPRRGPRKHSSIIVRLPPKAHTAGLGLGPR

SEQ ID NO: 9856 - protein, 81 aa, Zea mays
  Coding DNA Sequence Number=SeqID_3639
GVGGWCARAVWGGPGGVGAGAAGSKKQEKKKKKKNHLRAYKTMAIEKKTLLASFITIMMMVMMIVNQVEARNHVTIKPPPK

SEQ ID NO: 9857 - protein, 147 aa, Zea mays
  misc_feature (98)..(147): Xaa can be any naturally occurring amino acid
  Coding DNA Sequence Number=SeqID_3641
  Subcellular localization annotation: CTP_CleavageSite=29; ConfidenceScore=5.08e-01
SLLSHTPQPVHSFKTFSIMVRRHNPSVIEFSSDSDEIQEESPIPSPPPRRSLSKRGRGSGRMDGEGSSMPSQPTRGRRQKVGASRPRRSTSSSGYAPXXXXXXXXXXXXXXXXXXXXXXXXXXXXXXXXXXXXXXXXXXXXXXXXXX

SEQ ID NO: 9858 - protein, 156 aa, Zea mays
  Coding DNA Sequence Number=SeqID_3642
  Gene Ontology: Mol. function=voltage-gated potassium channel activity; Cellular component=voltage-gated potassium channel complex; Biological process=potassium ion transport
  Homolog annotation: Hit_ID=A1AL27; Match level="QueryCoverage=62%, HitCoverage=42%, E-value=1e-16, Identity=48%"; Hit description=Ion transport 2 domain protein
  Pfam annotation: Domain name=Ion_trans_2; Domain location=63-152; Score=37.0; E_value=7e-08; Accession=PF07885.6; Description=Ion channel
MLIALGMIVTGAILRIRSPSILDLNLFAGSWFIVGTTMAWAVARQTFAPGRVTYHRVIGAVLLYLTVAVIFSALYVFIGSLDPVAFVSMKVTDSPRLASDVIYFSFATMTTTGYGDVAPLHPVARSLCNMEAIFGQLYPATLLARLVTLEGGPGTQ

SEQ ID NO: 9859 - protein, 105 aa, Zea mays
  Coding DNA Sequence Number=SeqID_3643
QIDPAEPTMTMAALQLIQTERYWCCSLAFLTTTTDQNETTLLVLLIDSLLRRLHARVSRAIPLEGPGCLRRYHGTPAGSERVGAPRLTPFVGGIAGDVALLAPIV

SEQ ID NO: 9860 - protein, 148 aa, Zea mays
  Coding DNA Sequence Number=SeqID_3645
  Gene Ontology: Mol. function=carbohydrate binding; Cellular component= 6-phosphofructo-2-kinase/fructose-2,6-biphosphatase 1 complex; Biological process=fructose 2,6-bisphosphate metabolic process
  Homolog annotation: Hit_ID=Q947C1; Match level="QueryCoverage=42%, HitCoverage=8%, E-value=2e-28, Identity=98%"; Hit description =Fructose-6-phosphate-2-kinase/fructose-2, 6-bisphosphatase
  Pfam annotation: Domain name=6PF2K; Domain location=4-138; Score= -58.0; E_value=0.00019; Accession=PF01591.8; Description=6 -phosphofructo-2-kinase
AAVADRLHGSKEDRKLAIVLVGLPARGKTFTAVKLTRYLRWLGHETRHFNVGKYRRLKLGANQYPYTVDALERLYDNSLEVGMMLRCALAAGTSEENLWPLAIDVQAAAAQERIAESCPCCRIAAVAISAGNWAGPEPGPSQSYFVPN

SEQ ID NO: 9861 - protein, 67 aa, Zea mays
  misc_feature (46)..(46): Xaa can be any naturally occurring amino acid
  Coding DNA Sequence Number=SeqID_3646
  Gene Ontology: Mol. function=oxidoreductase activity; Cellular component=membrane; Biological process=electron transport
  Homolog annotation: Hit_ID=A3ARI9; Match level="QueryCoverage=89%, HitCoverage=12%, E-value=8e-13, Identity=61%"; Hit description =Putative uncharacterized protein
PIQLKATTSHGCWVVSELMRNPEAMAKAQAEVRRVLDSKNPGDHEXLLGCLSYTGMVIKETISIIYL

SEQ ID NO: 9862 - protein, 91 aa, Zea mays
  Coding DNA Sequence Number=SeqID_3647
  Gene Ontology: Cellular component=protein complex
  Homolog annotation: Hit_ID=Q10Q05; Match level="QueryCoverage=62%, HitCoverage=15%, E-value=5e-12, Identity=69%"; Hit description=PCI domain containing protein, expressed
GKKKTASEELFHKCIAEQTNFISDGRSPYEEPSVIYEGIIDEWTYIHVSGSSPDAWNPTVKALRDRLDAWVGKVHTPLLSVEAETPDLVAA

SEQ ID NO: 9863 - protein, 50 aa, Zea mays
  Coding DNA Sequence Number=SeqID_3648
  Homolog annotation: Hit_ID=Q6K8R4; Match level="QueryCoverage=94%, HitCoverage=12%, E-value=1e-15, Identity=84%"; Hit description =Putative salt tolerance protein 3
VPPAAPDARTQEMINEKLKKAEELGENGMVDEAQKLLDEAEALKKVGVFF

SEQ ID NO: 9864 - protein, 133 aa, Zea mays
  Coding DNA Sequence Number=SeqID_3649
  Gene Ontology: Mol. function=ATP binding; Cellular component =membrane; Biological process=anion transport
  Homolog annotation: Hit_ID=A6MCZ4; Match level="QueryCoverage=96%, HitCoverage=35%, E-value=2e-52, Identity=81%"; Hit description =Arsencial pump-driving ATPase
  Pfam annotation: Domain name=ArsA_ATPase; Domain location=26-134; Score=-102.0; E_value=2.4e-06; Accession=PF02374.6; Description =Anion-transporting ATPase
MASAVVVDAGDAPEPTVRNLLDQESLKWVFVGGKGGVGKTTCSSILSVLLAGVRSSVLVISTDPAHNLSDAFQQRFTKFPTLVRGFTNLYAMEIDPKVENDDLSNEGMEGFLSELTNAIPGVDEAMSFAEMLK

SEQ ID NO: 9865 - protein, 103 aa, Zea mays
  misc_feature (73)..(73): Xaa can be any naturally occurring amino acid
  misc_feature (95)..(95): Xaa can be any naturally occurring amino acid
  Coding DNA Sequence Number=SeqID_3650
  Gene Ontology: Mol. function=nucleotide binding; Cellular component =intracellular; Biological process=small GTPase mediated signal transduction
  Homolog annotation: Hit_ID=P36397; Match level="QueryCoverage=87%, HitCoverage=49%, E-value=1e-44, Identity=97%"; Hit description=ADP -ribosylation factor 1
  Pfam annotation: Domain name=Arf; Domain location=5-103; Score=131.3; E_value=2.7e-36; Accession=PF00025.11; Description=ADP-ribosylation factor family
  Pfam annotation: Domain name=MMR_HSR1; Domain location=18-98; Score= -9.5; E_value=0.0079; Accession=PF01926.13; Description=GTPase of unknown function
  Pfam module annotation: Pfam domain module=Arf::MMR_HSR1; Domain location=5-103::18-98
MGLSFGKLFSKLFAKKEMRILMVGLDAAGKTTILYKLKLGEIVTTIPTIGFNVETVEYKNISFTVWDVGGQDXIRPLWRHYFQNTQGLIFVVDSXDRDRVVEA

SEQ ID NO: 9866 - protein, 161 aa, Zea mays
  misc_feature (1)..(11): Xaa can be any naturally occurring amino acid
  misc_feature (101)..(101): Xaa can be any naturally occurring amino acid
  Coding DNA Sequence Number=SeqID_3651
XXXXXXXXXXXEGGGRGGGEGGCLRGRGRGRKWEAARPGGGGGKKKKNPAGGGRGGGGGGKRRAGEGEAGGGGEGGRETHNGGGRGRRRGRGREERRGDGXRRRRATPRPPSPWFQQQQQLWLRRHRKSSTGDDQYDSLSHSALAWANRERGLVFHRTLRS

SEQ ID NO: 9867 - protein, 130 aa, Zea mays
  Coding DNA Sequence Number=SeqID_3653
  Subcellular localization annotation: CTP_CleavageSite=26; ConfidenceScore=5.07e-01
GNVKNSPNWGNSWGQTRIWSLLKTPSAGSPVKTNPGSWLAFEQILARSTTQEDWGNYIQTRAFLTMVGTKGSPTGWNPKKKGDKGGTTFFLAGWLRNISGGGRLNNKAPWSPKTPCGLRPKRGGKNSLGI

SEQ ID NO: 9868 - protein, 119 aa, Zea mays
  Coding DNA Sequence Number=SeqID_3655
  Gene Ontology: Mol. function=DNA binding; Cellular component =chromosome; Biological process=nucleosome assembly
  Homolog annotation: Hit_ID=O23629; Match level="QueryCoverage=97%, HitCoverage=77%, E-value=4e-52, Identity=92%"; Hit description =Histone H2B.6
  Pfam annotation: Domain name=Histone; Domain location=26-96; Score =108.4; E_value=2.2e-29; Accession=PF00125.14; Description=Core histone H2AH2BH3H4
SPPPPAGKKLPKEAGAGGDKKKKMKKKSVETYKIYIFKVLKQVHPDIGISSKAMGIMNSFINDIFEKLASESSKLARYNKKPTITSREIQTAVRLVLPGELAKHAVSEGTKAVTKFTSS

SEQ ID NO: 9869 - protein, 168 aa, Zea mays
  Coding DNA Sequence Number=SeqID_3656
  Gene Ontology: Mol. function=transporter activity; Cellular component= integral to membrane; Biological process=transport
  Homolog annotation: Hit_ID=Q2H1M4; Match level="QueryCoverage=95%, HitCoverage=33%, E-value=1e-55, Identity=65%"; Hit description =Putative uncharacterized protein
  Subcellular localization annotation: CTP_CleavageSite=23; ConfidenceScore=5.06e-01
PGPPRERAILTSLFNASWFVGAIAAAGTTYGTFQMSSTWAWRLPSLLQLIPSMFQISFMYWCPESPRWLISRDRGDEAFKIIQRIHSEGDNGEEFAKLEFAQIQSTIQQEQQLASSFVWADVVRDAPMRRRFLLAGIVGFFTQWSGNGLLSYVPCMSAYAKKRIRLTL

SEQ ID NO: 9870 - protein, 200 aa, Zea mays
  Coding DNA Sequence Number=SeqID_3657
  Subcellular localization annotation: CTP_CleavageSite=83; ConfidenceScore=5.47e-01
GRLCSGPFSVFSPHCGKRGNFLPRGVINLGYPPGFFPRSRGFVKTNGPMKLLIPTPFLGRNWVSRGPPSSWGLRGKSGCEELCCREREPSRDVASWGGDSRAAGRHGDRLLLCLLGLQAAGGVENQQGAARLGNRGAMLKKGKVQGGSTMGGRRCGLHRGIELPALNAGEKRERWAEEEEGGGDEEPACSPAGSERQGGG

SEQ ID NO: 9871 - protein, 62 aa, Zea mays
  misc_feature (32)..(62): Xaa can be any naturally occurring amino acid
  Coding DNA Sequence Number=SeqID_3658
FIDHILAKKKVGNNCRFENLILYTMSYLEMCXXXXXXXXXXXXXXXXXXXXXXXXXXXXXXX

SEQ ID NO: 9872 - protein, 229 aa, Zea mays
  misc_feature (227)..(229): Xaa can be any naturally occurring amino acid
  Coding DNA Sequence Number=SeqID_3660
AGCSDGWNGSGQGMLAFAVGSSHRVGHVGGVGVVDDGGQRAVVVEEHDDLLPLGRRHQLVKHGQRRWVLHHPRGVPLLFDARGERGGRLGVGGRGRAHGLHPAADAPGAGAHLQALLAHGDARRGPRRRVLEQRRRVGRYRHGRFRHRHHHALLRHRELCLLVRQAATLLDLDGRKSLGGRQATASGGEASDSVCPRCLQLQGLAWESRAEQSRGGRRCEENRRRRXXX

SEQ ID NO: 9873 - protein, 80 aa, Zea mays
  Coding DNA Sequence Number=SeqID_3661
  Gene Ontology: Mol. function=protein serine/threonine kinase activity; Cellular component=cytoplasm; Biological process=protein amino acid phosphorylation
  Homolog annotation: Hit_ID=P53684; Match level="QueryCoverage=88%, HitCoverage=13%, E-value=8e-23, Identity=73%"; Hit description =Calcium-dependent protein kinase isoform 11
MPAELIRIIISLVAMCHSLGVMHRDLKPENFLLWDKEDDLSIKAIDFGLSVFFKPGRTSNLMCGGSVFCKAEISENSSRT

SEQ ID NO: 9874 - protein, 139 aa, Zea mays
  Coding DNA Sequence Number=SeqID_3662
  Gene Ontology: Mol. function=structural constituent of ribosome; Cellular component=ribonucleoprotein complex; Biological process =translation
  Homolog annotation: Hit_ID=P49690; Match level="QueryCoverage=100%, HitCoverage=99%, E-value=3e-75, Identity=100%"; Hit description=60S ribosomal protein L23
  Pfam annotation: Domain name=Ribosomal_L14; Domain location=18-139; Score=195.0; E_value=1.9e-55; Accession=PF00238.10; Description =Ribosomal protein L14pL23e
SKRGRGGTSGNKFRMSLGLPVAATVNCADNTGAKNLYIISVKGIKGRLNRLPSACVGDMVMATVKKGKPDLRKKVLPAVIVRQRKPWRRKDGVFMYFEDNAGVIVNPKGEMKGSAITGPIGKECADLWPRIASAANAIV

SEQ ID NO: 9875 - protein, 116 aa, Zea mays
  Coding DNA Sequence Number=SeqID_3663
  Subcellular localization annotation: CTP_CleavageSite=58; ConfidenceScore=5.74e-01
SRSVSSPQFFTAPSSPARSRAPNLPARPSAPAPPCAPPPLLPVASTGAARAGAKRRARAEKVVQPVVVLGPTAHPGLPLKVFSRSRTVSTTVAKWFVPIARKTVNKIYRFGPLRDA

SEQ ID NO: 9876 - protein, 188 aa, Zea mays
  Coding DNA Sequence Number=SeqID_3665
  Gene Ontology: Mol. function=structural constituent of cytoskeleton; Cellular component=focal adhesion; Biological process=cytoskeletal anchoring
  Homolog annotation: Hit_ID=Q5TCU6; Match level="QueryCoverage=100%, HitCoverage=7%, E-value=6e-71, Identity=76%"; Hit description=Talin 1
ATAKAVAAGNSCRQEDVIATANLSRRAIADMLRACKEAAYHPEVAPDVRLRALHFGRECANGYLELLDHVLLTLQKPSPELKQQLTVHSKRVAGSVTELIQAAEAMKGTEWVDPEDPTVIAENELLGAAAAIEAAAKKLEQLKPRAKPKEADESLNFEEQILEAAKSIAAATSALVKAASAAQRELVA

SEQ ID NO: 9877 - protein, 204 aa, Zea mays
  Coding DNA Sequence Number=SeqID_3666
  Gene Ontology: Mol. function=calcium ion binding; Cellular component =membrane
  Homolog annotation: Hit_ID=Q1IHU3; Match level="QueryCoverage=95%, HitCoverage=21%, E-value=1e-11, Identity=24%"; Hit description =Putative Ig precursor
AISLPGGTSSVSSNYNGLFQAWFADGERFITQAADSTLIYSRTAVQEDITQATGSAFGGTGNWFYNNAGSRIDIYQVGASATPKASITVSNPTVILSGTTLGLLQDGQLSVVDFSLATPAKMPQTLPVAGQLAGYAATDAAHWFVGNTNGVVLNGTGSPATVRMFDYGKALSIAGSASRFAVATGSGRVMFYDSSTHVLEGGPT

SEQ ID NO: 9878 - protein, 153 aa, Zea mays
  Coding DNA Sequence Number=SeqID_3667
HRNMLLLYKAALYHIFVETSMVCRLRNLSALLGDLACKDANEPVPWLMAASTVVVTLPSVRLPVQKRTEPSHQTNDLEHLQDCELSTAASRRRDGHPVDVHDVLERRAGWDLDVLLPEVGAVVAEPEVFFFFFFFFFGIHHRIVTFPAGLEVP

SEQ ID NO: 9879 - protein, 75 aa, Zea mays
  Coding DNA Sequence Number=SeqID_3669
  Gene Ontology: Mol. function=transferase activity
  Homolog annotation: Hit_ID=A2YXP2; Match level="QueryCoverage=96%, HitCoverage=16%, E-value=7e-15, Identity=54%"; Hit description =Putative uncharacterized protein
IFPPAGLNITSWLGRPHPDPDFGWGKPQSMLRAEFVRGGFMPLMNDDGGSGNVRVLVCLEAENIKELGRLLYAKL

SEQ ID NO: 9880 - protein, 68 aa, Zea mays
  Coding DNA Sequence Number=SeqID_3670
  Gene Ontology: Mol. function=acyl carrier activity; Biological process=fatty acid biosynthetic process
  Homolog annotation: Hit_ID=A2Y957; Match level="QueryCoverage=77%, HitCoverage=12%, E-value=2e-15, Identity=77%"; Hit description =Putative uncharacterized protein
ACLQSLTTVAGERMDGHAGDSTIQCQHLLQLESGADIVKAHTEWRPKRARGEGSLRGASGVFRPRMHE

SEQ ID NO: 9881 - protein, 125 aa, Zea mays
  Coding DNA Sequence Number=SeqID_3671
TMVRLTCNLIFLAKDPPPPPPSCGVFHGGRSVIHQYIYGYYYYKKKKKKYGYRTPSSGPAGRRGRLYGTPMGTVSLEHPLTRGAREEHRWGGAHVVPAVETLVAFGGACGTEAGRGGGGADRCGA

SEQ ID NO: 9882 - protein, 184 aa, Zea mays
  misc_feature (128)..(128): Xaa can be any naturally occurring amino acid
  misc_feature (137)..(137): Xaa can be any naturally occurring amino acid
  misc_feature (142)..(142): Xaa can be any naturally occurring amino acid
  Coding DNA Sequence Number=SeqID_3673
  Homolog annotation: Hit_ID=A5HEH2; Match level="QueryCoverage=79%, HitCoverage=33%, E-value=1e-49, Identity=68%"; Hit description =Putative growth-regulating factor 13
MPPDGWNEVTGPQPSRGGWPVRSAARRQKPSTRDTNSWQSNKPGNQGGTSDSWHNADTMVKAWGGGDHRNIPPTLRHHPPHDTKSPQSMIRIISLSQNDRLESEKNRNNVTVLVSSAFSCSDGPHTTXLTPNMTQVXQDCIXSSWYIPQCGPLGEILTNSKISEDSSKCGSRSYGWQLNLDHAP

SEQ ID NO: 9883 - protein, 120 aa, Zea mays
  Coding DNA Sequence Number=SeqID_3674
  Gene Ontology: Mol. function=protein disulfide oxidoreductase activity; Cellular component=cytoplasm; Biological process=glycerol ether metabolic process
  Homolog annotation: Hit_ID=Q9C1L1; Match level="QueryCoverage=81%, HitCoverage=92%, E-value=8e-23, Identity=56%"; Hit description =Putative thioredoxin G6G8.7
  Pfam annotation: Domain name=Thioredoxin; Domain location=3-105; Score=75.5; E_value=1.7e-19; Accession=PF00085.10; Description =Thioredoxin
MAVIDIKTKAQFDELTKATPYVALQAHATWCGPCKAISPMFNKHAEAFSNDKYTFARFDTDEVPDLAFELGIRSIPAFFIFENGDKADTLTGANPPALKKLTESIAEKSKAGELNTTEDF

SEQ ID NO: 9884 - protein, 140 aa, Zea mays
  Coding DNA Sequence Number=SeqID_3675
  Subcellular localization annotation: CTP_CleavageSite=49; ConfidenceScore=5.46e-01
NITPQQLLANHHSSKTERNWGAGRNRPQAAARSRWRAGCPRSCWCSPRRARRRRAPPWRPAALPTQPSSRRSHWIRSPPHCSQSQDNAHTFVELRSRWRAGCPRSCWCSPRRERRRRAPPWRRTALPTQPSSRRSHWIRT

SEQ ID NO: 9885 - protein, 212 aa, Zea mays
  misc_feature (201)..(212): Xaa can be any naturally occurring amino acid
  Coding DNA Sequence Number=SeqID_3677
MQGNKSKQKTPIRQACSIHAATERETEHRTARNRAVEASELRAAEQAARKCSSTVAEAARHAGSQAPSRQPPRPSQASSQRAGAPQRPAAERVSAAAASSRAGERRAAEQSCCAVRTGLAGAQSAGGLVAWGWRLAAWLERSSGTTAVCDGGERRGLRASARRPRWALLPRRTAREEVVVSWRRGIKFRSEPRLIRAGSMXXXXXXXXXXXX

SEQ ID NO: 9886 - protein, 128 aa, Zea mays
  Coding DNA Sequence Number=SeqID_3679
  Gene Ontology: Mol. function=receptor activity; Cellular component =integral to membrane; Biological process=signal transduction
  Homolog annotation: Hit_ID=Q94A20; Match level="QueryCoverage=85%, HitCoverage=42%, E-value=2e-29, Identity=61%"; Hit description =Protein FBL4
  Pfam annotation: Domain name=UPF0005; Domain location=3-125; Score= -74.0; E_value=0.063; Accession=PF01027.11; Description =Uncharacterised protein family UPF0005
DAWADAWADAWADSWAAGVVVSLTAYAFWASKKGKEFGYLGPILSSALTILVLTSFLQVFFPLGPVSAGLFGGLGALVFSGFILYDTENLIRRHTYDEYIWASVGLYLDILNLFLSILNMLRSMQSDN

SEQ ID NO: 9887 - protein, 109 aa, Zea mays
  Coding DNA Sequence Number=SeqID_3680
LWFRLGFYCDSCGAELQFVAFLKSSFYLIFLSPSGVGRLVHPSMAEPDCWGTPPLMRRAVAGVGIWKAEDESVRSAKEEECTLHLDCMYWDRCMLRAPLVTYITWCCHP

SEQ ID NO: 9888 - protein, 105 aa, Zea mays
  Coding DNA Sequence Number=SeqID_3682
APGICSPPWPRTWQREKGRHPLAWAWRPRAPARWPRELLLGAKNSTCRMGGLISYLLAFAPVLFYGAPPPAWNYLVGPSRGYSTSAAVPVQLVRASFVARSWFCS

SEQ ID NO: 9889 - protein, 81 aa, Zea mays
  Coding DNA Sequence Number=SeqID_3684
  Subcellular localization annotation: CTP_CleavageSite=53; ConfidenceScore=5.15e-01
TTQIHELITYASDYVCRSHDARFTRTKGLRKATPQEKTLRRSKKSASVLLRTVCARRTGLSGGTPDCPVPTLRNVRCTKEL

SEQ ID NO: 9890 - protein, 240 aa, Zea mays
  misc_feature (221)..(221): Xaa can be any naturally occurring amino acid
  misc_feature (232)..(232): Xaa can be any naturally occurring amino acid
  Coding DNA Sequence Number=SeqID_3686
  Gene Ontology: Mol. function=cysteine-type endopeptidase activity; Cellular component=external side of plasma membrane; Biological process=regulation of catalytic activity
  Homolog annotation: Hit_ID=Q711Q3; Match level="QueryCoverage=87%, HitCoverage=60%, E-value=1e-109, Identity=87%"; Hit description =Cathepsin B
  Pfam annotation: Domain name=Peptidase_C1; Domain location=96-241; Score=39.3; E_value=1.9e-14; Accession=PF00112.13; Description =Papain family cysteine protease
  Pfam annotation: Domain name=Propeptide_C1; Domain location=36-79; Score=67.6; E_value=4.3e-17; Accession=PF08127.3; Description =Peptidase family C1 propeptide
  Pfam module annotation: Pfam domain module=Peptidase_C1::Propeptide _C1; Domain location=96-241::36-79
MGRSLLPLALLVVLSAAAAAPQLVGAAGRDHSLGIIQKDIIQTVNNHPNAGWTAGYNPYLANYTIEQFKHMLGVKPTPPGLRARVRTKTHSRSEQLPKVFDARSKWSGCSTIGKILDQGHCGSCWAFGAVECLQDRFCIHHNMNITLSANDLVACCGFMCGDGCDGGYPISAWQYFVQNGVVTDECDPYFDQVGCKHPGCEPAYPTPVCEKKCKVQNQVWXEKKHFSINAYXQVNSDPNE

SEQ ID NO: 9891 - protein, 240 aa, Zea mays
  misc_feature (45)..(240): Xaa can be any naturally occurring amino acid
  Coding DNA Sequence Number=SeqID_3687
CINNLDPIAHGNPIGIWELKPLFNWLSLSGYSAGLLVACLQGGTXXXXXXXXXXXXXXXXXXXXXXXXXXXXXXXXXXXXXXXXXXXXXXXXXXXXXXXXXXXXXXXXXXXXXXXXXXXXXXXXXXXXXXXXXXXXXXXXXXXXXXXXXXXXXXXXXXXXXXXXXXXXXXXXXXXXXXXXXXXXXXXXXXXXXXXXXXXXXXXXXXXXXXXXXXXXXXXXXXXXXXXXXXXXXXXXXXXX

SEQ ID NO: 9892 - protein, 100 aa, Zea mays
  Coding DNA Sequence Number=SeqID_3689
RLHFSREKIILNQNSSGVATLNGRHDDFFGSHHESSLIDGNLHIKEMPTLTKQTLLPNSAEQFYFPRPGQSLPRHSSILGASLLQMYFSNDKEPKFGNHV

SEQ ID NO: 9893 - protein, 76 aa, Zea mays
  Coding DNA Sequence Number=SeqID_3690
  Subcellular localization annotation: CTP_CleavageSite=27; ConfidenceScore=5.16e-01
DSSYQGDSLDSRNLVKTSPWRQQFRPRRSACQPFEACPGLPNLSGTTTDPYRQGNAMVRGHPSLHPTLKDAPHRVF

SEQ ID NO: 9894 - protein, 144 aa, Zea mays
  Coding DNA Sequence Number=SeqID_3692
  Subcellular localization annotation: CTP_CleavageSite=50; ConfidenceScore=5.15e-01
QTKNLSIGWVIRQQLACMRVIIFSHFKQSDPCFQLLFLGFRVATGRSARRCSMNRKKGVRQLGTGRARRRGSVAGWRPLDRGRWWWDGAAQRSARGRDRAGQGASVDRQRLQGWGTGRRLPISTEGNMRRPDGGLTWWRRRVGF

SEQ ID NO: 9895 - protein, 169 aa, Zea mays
  Coding DNA Sequence Number=SeqID_3694
  Subcellular localization annotation: CTP_CleavageSite=70; ConfidenceScore=5.12e-01
PEAFLRSTTNQRTFSFSTAAPPLLSRLHHALTLKLPCVAGDEQPSSHLLPPPYLLHVRRRQTRSRAAGVRAVARREIPGTVEFRSARVRVGRGSEGGRRGSEEGVHARGELGLGEIAVRDAWYDPMRSVVCATMHLFFRVSILMINLYDADQLTIELFDPLWLRLIEIW

SEQ ID NO: 9896 - protein, 183 aa, Zea mays
  misc_feature (10)..(10): Xaa can be any naturally occurring amino acid
  misc_feature (23)..(23): Xaa can be any naturally occurring amino acid
  Coding DNA Sequence Number=SeqID_3696
  Gene Ontology: Mol. function=nucleotide binding; Cellular component =cytoplasm; Biological process=response to stress
  Homolog annotation: Hit_ID=Q9AQZ5; Match level="QueryCoverage=70%, HitCoverage=15%, E-value=1e-52, Identity=76%"; Hit description =Putative heat shock protein
LQEVEDWLYXDGEDETKGVYIAXLEELKKVGDPIELRFKEWEIRSSAVSQLVYCINSFREAAQSSDQKFEPIDMSEKRKVINECSEAETWLIEKKQQQDALPKHANPVLLAADLKKKAETLDRFCKPIMTKPKPAPKPQTPPVAENQAPEPQTPEQQQSGGESPASEGAAEEPRAEQMETDKP

SEQ ID NO: 9897 - protein, 87 aa, Zea mays
  misc_feature (85)..(87): Xaa can be any naturally occurring amino acid
  Coding DNA Sequence Number=SeqID_3697
TAPNFMEIFKICPFERPPRQGQNGADWKGLKGEFFTKLFFFFFFFFFFFFFFFFFFFFFFFFFFFFFFFFFFFFFSFFFSGHCSXXX

SEQ ID NO: 9898 - protein, 137 aa, Zea mays
  Coding DNA Sequence Number=SeqID_3698
  Gene Ontology: Mol. function=small conjugating protein ligase activity; Cellular component=cytosol; Biological process=regulation of protein metabolic process
  Homolog annotation: Hit_ID=Q9C6Q4; Match level="QueryCoverage=100%, HitCoverage=81%, E-value=6e-66, Identity=81%"; Hit description =Ubiquitin carrier protein
  Pfam annotation: Domain name=UQ_con; Domain location=33-137; Score =124.6; E_value=2.8e-34; Accession=PF00179.16; Description=Ubiquitin -conjugating enzyme
  Subcellular localization annotation: CTP_CleavageSite=50; ConfidenceScore=5.30e-01
MAAVNGYQGNTPAASKQSAPPTKTVDSQSVLKRLQSELMGLMMGGDPGISAFPEEDNIFCWKGTITGSKDTVFEGTEYRLSLSFSNDYPFKPPKIKFHTGCFHPNVDLYGNICLDILQDKWSSAYDVRTILLSIQSL

SEQ ID NO: 9899 - protein, 226 aa, Zea mays
  Coding DNA Sequence Number=SeqID_3699
SSRILAWTRMTIDDLFELSVEHLLDSGLLAAWVSRTAPDDADELDPGAGAGHRAETGRSAGELRERARELRELETDARSKEKRAQRREEQGHGKETLRRGRSRGRGRAQRKTATTGKGARRPGEMRAWERRTGARARELSRAPELEAEREYAAACHGRESTEQRELGAPWEESWSAGRGQKEGDEAEGAAQRPGELGETSAGRTMADRNNQAARRAQLPWEIRPAA

SEQ ID NO: 9900 - protein, 156 aa, Zea mays
  Coding DNA Sequence Number=SeqID_3701
  Gene Ontology: Mol. function=hydrolase activity; Biological process =purine base metabolic process
  Homolog annotation: Hit_ID=Q3HVN6; Match level="QueryCoverage=65%, HitCoverage=51%, E-value=7e-22, Identity=50%"; Hit description =Putative uncharacterized protein
  Pfam annotation: Domain name=dCMP_cyt_deam_1; Domain location=18-127; Score=86.9; E_value=6.6e-23; Accession=PF00383.13; Description =Cytidine and deoxycytidylate deaminas
MESPPDQAAAAAARQDPEQRDYRLIAKAVDEAYRAVECDGGGYPFGAVVVRGGGSDGDDEVVSSSHNSVRKDADPSAHAEVTAIRQACKKLGKTSLAGCEIYTSCEPCPMCLGLIRLAKIKVRSVHYVLPTHRLITRLETTLIERAEGDDWLRACV

SEQ ID NO: 9901 - protein, 210 aa, Zea mays
  misc_feature (51)..(51): Xaa can be any naturally occurring amino acid
  misc_feature (81)..(81): Xaa can be any naturally occurring amino acid
  Coding DNA Sequence Number=SeqID_3702
  Gene Ontology: Mol. function=RNA binding; Cellular component=nucleus
  Homolog annotation: Hit_ID=Q32SG5; Match level="QueryCoverage=96%, HitCoverage=32%, E-value=1e-100, Identity=92%"; Hit description =Protein RIK
SQQPLHLYLTSMHLKNLEAAKVLAENLLDTVAAEFGASRISSSKVYGAVPXPQQLLAGVDTSGTKSDVHYIVGPNVLSGAXHSFASTGVIAPVVAPAATVQSGAPTYSGVPLPSNMAYPIPPANGGAFYSGGGDIYPQATPLQQLAFTLKHASSSATQAVPVTSTPTSMATKGNSILDAEMDKRSRRKFQELPVSKGPATESQVQFFFLV

SEQ ID NO: 9902 - protein, 64 aa, Zea mays
  Coding DNA Sequence Number=SeqID_3703
GLSSLLMPIVKFQLKMLVHQLPQKHVCMHNTSSSGSYKIQFVKKGYQCVHLNWLNRQSSNTRCS

SEQ ID NO: 9903 - protein, 74 aa, Zea mays
  misc_feature (19)..(19): Xaa can be any naturally occurring amino acid
  Coding DNA Sequence Number=SeqID_3705
  Gene Ontology: Mol. function=serine-type endopeptidase inhibitor activity; Biological process=response to wounding
  Homolog annotation: Hit_ID=Q6E658; Match level="QueryCoverage=89%, HitCoverage=89%, E-value=4e-20, Identity=72%"; Hit description=MPI
  Pfam annotation: Domain name=potato_inhibit; Domain location=14-73; Score=65.2; E_value=2.1e-16; Accession=PF00280.8; Description=Potato inhibitor I family
MSSPKFAGGGGGPKTFWPXVVGFSVEDPKKVFLKANPDPDIVVLPVGSLVPPDFPPNRVRIFVDIFAQTPPIGL

SEQ ID NO: 9904 - protein, 124 aa, Zea mays
  Coding DNA Sequence Number=SeqID_3706
  Gene Ontology: Mol. function=aspartic-type endopeptidase activity; Biological process=proteolysis
  Homolog annotation: Hit_ID=Q7XBD4; Match level="QueryCoverage=84%, HitCoverage=10%, E-value=2e-35, Identity=65%"; Hit description =Cinful1 polyprotein
PEKTDAPAPEAFKKSIEYIIHHASGKRLSKEEEREAQHYAQKLKYPKGALVFNDSGEEDFLYCLPDSKEISVCREMRRSFGFPTLEDGLSVLSKDELADSLAYNSILDTERSLWSRPSMFLPHH

SEQ ID NO: 9905 - protein, 97 aa, Zea mays
  Coding DNA Sequence Number=SeqID_3707
  Subcellular localization annotation: CTP_CleavageSite=11; ConfidenceScore=5.15e-01
RVAVKDLITVTAATVMAMLMTMFMLPLLFPLLLLLFTLVRMDLVLDLVCNTLLVFTMMLPLVFSMPMVLPFVLAMVFPLVLLFLVPSPHEGSPQSSG

SEQ ID NO: 9906 - protein, 216 aa, Zea mays
  misc_feature (111)..(111): Xaa can be any naturally occurring amino acid
  Coding DNA Sequence Number=SeqID_3709
  Homolog annotation: Hit_ID=Q9C5H4; Match level="QueryCoverage=100%, HitCoverage=31%, E-value=4e-72, Identity=64%"; Hit description=VHS domain-containing protein At3g16270
MDQSRRAVDSYWRSRMVDGVTADDDKVAPVYKLEEICELLRASDASIVKEVADFVLKRLDNKSPLVKQKALRLIKYAVGKSGTDFKREMQRHSAAMRQLVHYKGHPDPLRXDALNKAVRETANAAIAAIPSTQDPIPASATKSVGTRIHSFGNTNYEPSTDEMKSFLNELIEGYYIRSASIKHGLSYFAAPHAIMINDNGRTYKSPNLHRSLTTES

SEQ ID NO: 9907 - protein, 94 aa, Zea mays
  Coding DNA Sequence Number=SeqID_3710
  Gene Ontology: Mol. function=glyceraldehyde-3-phosphate dehydrogenase (phosphorylating) activity; Cellular component=cytoplasm; Biological process=glucose metabolic process
  Homolog annotation: Hit_ID=P08735; Match level="QueryCoverage=100%, HitCoverage=27%, E-value=6e-45, Identity=90%"; Hit description =Glyceraldehyde-3-phosphate dehydrogenase, cytosolic 1
  Pfam annotation: Domain name=DapB_N; Domain location=4-69; Score= -38.0; E_value=0.074; Accession=PF01113.11; Description =Dihydrodipicolinate reductase, N-terminus
  Pfam annotation: Domain name=Gp_dh_N; Domain location=4-94; Score =29.1; E_value=3.4e-12; Accession=PF00044.14; Description =Glyceraldehyde 3-phosphate dehydrogen
  Pfam module annotation: Pfam domain module=DapB_N::Gp_dh_N; Domain location=4-69::4-94
MGKIKIGINGFGRIGRLVARVALQSEDVELVAVNDPFITTDYMTYMWEYDTVHGHWEHSDITLKDSQNLLFGDQPVTVFGLRNPWEIPWGEGGA

SEQ ID NO: 9908 - protein, 134 aa, Zea mays
  Coding DNA Sequence Number=SeqID_3711
  Gene Ontology: Mol. function=actin binding; Cellular component=actin cytoskeleton; Biological process=actin cytoskeleton organization and biogenesis
  Homolog annotation: Hit_ID=A8IJ92; Match level="QueryCoverage=100%, HitCoverage=100%, E-value=9e-62, Identity=84%"; Hit description =Profilin
  Pfam annotation: Domain name=Profilin; Domain location=2-129; Score =237.5; E_value=2.9e-68; Accession=PF00235.9; Description=Profilin
MSWQTYVDEHLMCDVGDGQGHHLTAAAIVGHDGSVWAQSANFPQFKAQEFTGIMKDFDEPGHLAPTGLFLAGAKYMVIQGEPGAVIRGKKGAGGITIKKTGQSCVFGIYEEPVTPGQCNMVVERLGDYLLEQDL

SEQ ID NO: 9909 - protein, 77 aa, Zea mays
  Coding DNA Sequence Number=SeqID_3712
  Homolog annotation: Hit_ID=Q75GQ2; Match level="QueryCoverage=89%, HitCoverage=39%, E-value=1e-17, Identity=61%"; Hit description =Expressed protein
MAAEALGFMARGANGGRAAELVTRDFLGGCAATGDARDASARNGTVPGRVAQQKHACPATPMDLNLLTIKLFHTSLH

SEQ ID NO: 9910 - protein, 195 aa, Zea mays
  misc_feature (47)..(47): Xaa can be any naturally occurring amino acid
  misc_feature (69)..(69): Xaa can be any naturally occurring amino acid
  misc_feature (130)..(130): Xaa can be any naturally occurring amino acid
  Coding DNA Sequence Number=SeqID_3713
  Gene Ontology: Mol. function=oxidoreductase activity, acting on the CH-OH group of donors, NAD or NADP as acceptor; Cellular component =mitochondrion; Biological process=metabolic process
  Homolog annotation: Hit_ID=Q7X9L3; Match level="QueryCoverage=84%, HitCoverage=61%, E-value=2e-41, Identity=58%"; Hit description =Formate dehydrogenase
SSFGFSAHGDDGGAPIRTAGATGSLESRAAHTPTRSKKIDMVFYKGXENADKNPNFVGCVEGALGIRGXSHAHAHQYFVTDDKEGPIWELQKHIEHMYVLITTPFHPAYVSAERITKANNLELLLTLRIXAPIHMELPPSAAAGLTGDDATGSLTLSAAEDELLRILTLLRNFLPAYQQVVQGECIVSGIAPDSL

SEQ ID NO: 9911 - protein, 205 aa, Zea mays
  misc_feature (1)..(1): Xaa can be any naturally occurring amino acid
  misc_feature (174)..(174): Xaa can be any naturally occurring amino acid
  misc_feature (186)..(186): Xaa can be any naturally occurring amino acid
  misc_feature (191)..(191): Xaa can be any naturally occurring amino acid
  misc_feature (204)..(204): Xaa can be any naturally occurring amino acid
  Coding DNA Sequence Number=SeqID_3714
XWSRAPPRRDHCLAMCRNAFTPRYFLDLEELRDTSHNGRGSATEAARRTSVHSRVALNSWQRDSSHASGNERPRLRFEMLLARYTARNSQALLTKNESSQFRRPKGSIRLSPIFSIPIFGELVMGSFVKWAGGAGVAAVSTLLLGASSALAQNCATTQTLRLSTTSARWQCLRXPLAFISAASERXHRFLXHKAPVRVGSGNPXR

SEQ ID NO: 9912 - protein, 91 aa, Zea mays
  Coding DNA Sequence Number=SeqID_3716
  Subcellular localization annotation: CTP_CleavageSite=19; ConfidenceScore=5.18e-01
DNMVGSSSTTFSWTSRKVGAALNASLLVVRGGKDDLFLEKNLTKVVSKLNATFLFNACPFEKYSSRSFDRVQQVTYIVTKSLFLHSRLHCL

SEQ ID NO: 9913 - protein, 150 aa, Zea mays
  Coding DNA Sequence Number=SeqID_3718
  Gene Ontology: Mol. function=structural constituent of ribosome; Cellular component=ribonucleoprotein complex; Biological process =translation
  Homolog annotation: Hit_ID=P51412; Match level="QueryCoverage=84%, HitCoverage=57%, E-value=3e-50, Identity=83%"; Hit description=50S ribosomal protein L21, chloroplast precursor
  Pfam annotation: Domain name=Ribosomal_L21p; Domain location=100-150; Score=-32.1; E_value=0.0074; Accession=PF00829.11; Description =Ribosomal prokaryotic L21 protein
  Subcellular localization annotation: CTP_CleavageSite=83; ConfidenceScore=5.96e-01
MASSSATLSLCSTFSAHCNVNSRRSSTILCSLSKPSLNLAKPLTGFLSPSTASTSRTAFTVAPKFAESVVEAEPETTDIEAVVVSDVSEVTEEKAKREEIFAGIMGGGRQYIVVPGRYLYTQRLKDANGDDHIVLNKVALGGTTQPPPQV

SEQ ID NO: 9914 - protein, 42 aa, Zea mays
  Coding DNA Sequence Number=SeqID_3719
  Homolog annotation: Hit_ID=Q94LV0; Match level="QueryCoverage=95%, HitCoverage=17%, E-value=1e-13, Identity=85%"; Hit description =Putative membrane protein
RNVISVYPEELTFLFELEKPCYCNLKVVNHSEHDVAFKVKTT

SEQ ID NO: 9915 - protein, 60 aa, Zea mays
  Coding DNA Sequence Number=SeqID_3720
VVCIYWDFIYKIRCLGIQHYITYGVMTNEFVILIALLFLILVYLLNSYLLYLHWSVGFID

SEQ ID NO: 9916 - protein, 96 aa, Zea mays
  misc_feature (17)..(17): Xaa can be any naturally occurring amino acid
  misc_feature (45)..(45): Xaa can be any naturally occurring amino acid
  misc_feature (54)..(54): Xaa can be any naturally occurring amino acid
  misc_feature (72)..(72): Xaa can be any naturally occurring amino acid
  misc_feature (81)..(82): Xaa can be any naturally occurring amino acid
  misc_feature (84)..(84): Xaa can be any naturally occurring amino acid
  misc_feature (86)..(88): Xaa can be any naturally occurring amino acid
  Coding DNA Sequence Number=SeqID_3722
  Gene Ontology: Mol. function=translation initiation factor activity; Biological process=translational initiation
  Homolog annotation: Hit_ID=Q6L4U9; Match level="QueryCoverage=92%, HitCoverage=77%, E-value=1e-25, Identity=67%"; Hit description =Putative uncharacterized protein P0010D04.10
  Pfam annotation: Domain name=SUI1; Domain location=27-94; Score=-8.5; E_value=0.0066; Accession=PF01253.13; Description=Translation initiation factor SUI1
MSDLDVQLPSAFDPFAXANAEDSGAGPGTKDYSACAHSTRNGHSXLTTIQGLEXEFSYIKILMDLKKEFSCXGTVALDPEXXLXIXXXGYIISIYA

SEQ ID NO: 9917 - protein, 110 aa, Zea mays
  Coding DNA Sequence Number=SeqID_3723
  Subcellular localization annotation: CTP_CleavageSite=87; ConfidenceScore=5.37e-01
RRSIGLHLGFLFKKLYNRTAGDVNLGPLKGAPPFFFFFFFFFFFFFFFFFFFYFFFFFFFFFFFFFAFFNTCININRIYITLIPSACSKMLTQGRLQISVNSMVLPFTYL

SEQ ID NO: 9918 - protein, 59 aa, Zea mays
  Coding DNA Sequence Number=SeqID_3725
LLNPTQVLTGKLFLTAKRLVSNVILRIYRLRTKTINHGKLAHVAAHLTRFHLRTSLVTL

SEQ ID NO: 9919 - protein, 91 aa, Zea mays
  misc_feature (2)..(3): Xaa can be any naturally occurring amino acid
  misc_feature (5)..(5): Xaa can be any naturally occurring amino acid
  misc_feature (9)..(9): Xaa can be any naturally occurring amino acid
  misc_feature (11)..(11): Xaa can be any naturally occurring amino acid
  misc_feature (18)..(18): Xaa can be any naturally occurring amino acid
  misc_feature (20)..(20): Xaa can be any naturally occurring amino acid
  misc_feature (23)..(24): Xaa can be any naturally occurring amino acid
  misc_feature (28)..(28): Xaa can be any naturally occurring amino acid
  misc_feature (30)..(31): Xaa can be any naturally occurring amino acid
  misc_feature (47)..(47): Xaa can be any naturally occurring amino acid
  misc_feature (53)..(53): Xaa can be any naturally occurring amino acid
  misc_feature (56)..(56): Xaa can be any naturally occurring amino acid
  misc_feature (60)..(60): Xaa can be any naturally occurring amino acid
  misc_feature (63)..(63): Xaa can be any naturally occurring amino acid
  misc_feature (68)..(68): Xaa can be any naturally occurring amino acid
  misc_feature (72)..(72): Xaa can be any naturally occurring amino acid
  misc_feature (80)..(80): Xaa can be any naturally occurring amino acid
  Coding DNA Sequence Number=SeqID_3726
PXXRXWWFXNXRSRSNAXNXLTXXVFMXGXXIFLCTPSLFICIATNXSEVAKXLKXKLVXGNXESQAXCALXHSYLPNKXHVNHCDMFRLI

SEQ ID NO: 9920 - protein, 125 aa, Zea mays
  Coding DNA Sequence Number=SeqID_3728
  Gene Ontology: Mol. function=structural constituent of ribosome; Cellular component=ribonucleoprotein complex; Biological process =translation
  Homolog annotation: Hit_ID=Q6END4; Match level="QueryCoverage=95%, HitCoverage=79%, E-value=1e-57, Identity=94%"; Hit description =Chloroplast 50S ribosomal protein L22
  Pfam annotation: Domain name=Ribosomal_L22; Domain location=16-120; Score=215.8; E_value=9.9e-62; Accession=PF00237.9; Description =Ribosomal protein L22pL17e
QRRVRGRLLKFERVFKAQKRIHMSVFKAQRVLDEIRWRYYEETVMILNLMPYRASYPILKLVYSAAANATHYRDFDKTNLFITKAEVSRSTIMKKFRPRARGRSYSIKKTMCNITIVLNIVKKSK

SEQ ID NO: 9921 - protein, 113 aa, Zea mays
  Coding DNA Sequence Number=SeqID_3729
RSDRSSCHRHIQTYMSESNYIHIISLCILYLCILWNASEIHNVVAPDQNLSQVPRELPNKARPARGNRSPEVEVGAVNCDKGSVTATLHLCQTYISASNLLACLQNTRSCTHT

SEQ ID NO: 9922 - protein, 205 aa, Zea mays
  Coding DNA Sequence Number=SeqID_3731
  Gene Ontology: Mol. function=thiamin pyrophosphate binding; Cellular component=chloroplast; Biological process=branched chain family amino acid biosynthetic process
  Homolog annotation: Hit_ID=B0J137; Match level="QueryCoverage=96%, HitCoverage=36%, E-value=5e-73, Identity=69%"; Hit description =Thiamine pyrophosphate protein domain protein TPP-binding
  Pfam annotation: Domain name=TPP_enzyme_N; Domain location=1-167; Score=161.9; E_value=1.7e-45; Accession=PF02776.8; Description =Thiamine pyrophosphate enzyme, N-termina
ICGTGPPLENEGVDRIFGVPGEENLDVVESLRNSSIKLILTRHEQGAAFMAATYGRLTGKPGVCITTLGPGALNLTTGAAYALLGAMPMIMLTGQKGIMSSRQAKFQIVDVVSAFKPLTKLSLQIVSTSSIPTIVRDAFRIAMEERPGPVLLELPEDIAGEEAEDVAMVAQHPIEIPVAHRASLDRAAEMILKAKRPLIMLGAAA

SEQ ID NO: 9923 - protein, 178 aa, Zea mays
  Coding DNA Sequence Number=SeqID_3732
  Gene Ontology: Mol. function=starch synthase activity; Cellular component=chloroplast; Biological process=glucan biosynthetic process
  Homolog annotation: Hit_ID=A4ZVI0; Match level="QueryCoverage=100%, HitCoverage=14%, E-value=1e-100, Identity=98%"; Hit description =Starch synthase IIIb-1
HAMHRALERNGQVVLLGSAPDHRIQGDFTNLASKLHGEYHGRVKLCLTYDEPLSHLIYAGADFILVPSIFEPCGLTQLIAMRYGSIPIVRKTGGLYDTVFDVNDDKDRAQAQGLEPNGFSFEGADSSGVDYALDRAITAFYDARDWFNSLSKRVMEQDWSWNRPALDYMELYHSARKN

SEQ ID NO: 9924 - protein, 100 aa, Zea mays
  Coding DNA Sequence Number=SeqID_3733
MIPLSHNPHPATIANAGVWGLFCDQHLLIRTTRSTATPKKQQMKRQGLRLHTIAEPSSSLQEEQQRGGWEKEERRLTTGSKGGGRRPWKIDRREAVGRRS

SEQ ID NO: 9925 - protein, 90 aa, Zea mays
  misc_feature (17)..(17): Xaa can be any naturally occurring amino acid
  misc_feature (19)..(19): Xaa can be any naturally occurring amino acid
  misc_feature (31)..(33): Xaa can be any naturally occurring amino acid
  misc_feature (35)..(35): Xaa can be any naturally occurring amino acid
  misc_feature (38)..(38): Xaa can be any naturally occurring amino acid
  misc_feature (42)..(42): Xaa can be any naturally occurring amino acid
  misc_feature (46)..(46): Xaa can be any naturally occurring amino acid
  misc_feature (58)..(58): Xaa can be any naturally occurring amino acid
  misc_feature (61)..(61): Xaa can be any naturally occurring amino acid
  misc_feature (64)..(64): Xaa can be any naturally occurring amino acid
  misc_feature (66)..(67): Xaa can be any naturally occurring amino acid
  misc_feature (69)..(70): Xaa can be any naturally occurring amino acid
  misc_feature (77)..(80): Xaa can be any naturally occurring amino acid
  misc_feature (84)..(84): Xaa can be any naturally occurring amino acid
  misc_feature (87)..(87): Xaa can be any naturally occurring amino acid
  misc_feature (90)..(90): Xaa can be any naturally occurring amino acid
  Coding DNA Sequence Number=SeqID_3735
THCMLCLEEKFYILSRXFXVLEKSPLFNFSXXXSXFVXYITXKIVXIRIVFFIIQKSXNKXNQXLXXLXXLQNPISXXXXTLTXLRXSIX

SEQ ID NO: 9926 - protein, 80 aa, Zea mays
  misc_feature (1)..(1): Xaa can be any naturally occurring amino acid
  Coding DNA Sequence Number=SeqID_3737
  Gene Ontology: Mol. function=sequence-specific DNA binding; Cellular component=nucleus; Biological process=regulation of transcription, DNA-dependent
  Homolog annotation: Hit_ID=Q6IEM8; Match level="QueryCoverage=55%, HitCoverage=8%, E-value=1e-10, Identity=79%"; Hit description=WRKY transcription factor 53
  Subcellular localization annotation: CTP_CleavageSite=62; ConfidenceScore=5.43e-01
XLPISPPPMSPSSYFSIPPGLSPAELLDSPVPLHSSSNFFASPTTGAIPAQRFDWKQAADLIASRNGEGSSDRRRSRCGG

SEQ ID NO: 9927 - protein, 191 aa, Zea mays
  misc_feature (11)..(11): Xaa can be any naturally occurring amino acid
  misc_feature (13)..(13): Xaa can be any naturally occurring amino acid
  Coding DNA Sequence Number=SeqID_3738
  Gene Ontology: Mol. function=oxidoreductase activity, acting on sulfur group of donors, disulfide as acceptor; Cellular component =cytosol; Biological process=protein metabolic process
  Homolog annotation: Hit_ID=A0GAQ9; Match level="QueryCoverage=97%, HitCoverage=74%, E-value=4e-73, Identity=72%"; Hit description =Peptide methionine sulfoxide reductase precursor
  Pfam annotation: Domain name=PMSR; Domain location=3-162; Score =237.5; E_value=3e-68; Accession=PF01625.11; Description=Peptide methionine sulfoxide reductase
TSETAVLAGGXCXWGVQGVFQHVDGVTSAVSGYAGGDKSTADYETVSSGTTGHAESVRVTFDPRRISYGRILQVYFSVAHNPTELNRQGPDSGTQYRSAIFPTSAEQARVAKAYIAQLNQARVFDAAIVTKAEPGREFYPAEGYHQDYLTLHPSNPYIAINDMPKLDELKRLFPALYRPEPVLVSASRSTN

SEQ ID NO: 9928 - protein, 150 aa, Zea mays
  misc_feature (1)..(2): Xaa can be any naturally occurring amino acid
  misc_feature (4)..(6): Xaa can be any naturally occurring amino acid
  misc_feature (11)..(11): Xaa can be any naturally occurring amino acid
  misc_feature (13)..(13): Xaa can be any naturally occurring amino acid
  Coding DNA Sequence Number=SeqID_3739
  Gene Ontology: Mol. function=DNA topoisomerase type I activity; Cellular component=chromosome; Biological process=DNA unwinding during replication
  Homolog annotation: Hit_ID=A7W6A8; Match level="QueryCoverage=94%, HitCoverage=15%, E-value=6e-66, Identity=87%"; Hit description=DNA topoisomerase
XXHXXXPFTTXSXQQEASRKLGMAPAQTMRVAQKLYEGVDIGGETVGIITYMRTDGVDMAPEAIQDARRVIGREFGDDYVPNVPRKYSVKAKNAQEAHEAVRPTDMGRLPKQIARYLEPEQAKLYELIWTRTVASQMESAELEGGPGTQL

SEQ ID NO: 9929 - protein, 121 aa, Zea mays
  misc_feature (85)..(85): Xaa can be any naturally occurring amino acid
  Coding DNA Sequence Number=SeqID_3740
  Gene Ontology: Mol. function=binding; Cellular component =intracellular; Biological process=RNA processing
  Homolog annotation: Hit_ID=Q10RX5; Match level="QueryCoverage=57%, HitCoverage=12%, E-value=2e-19, Identity=64%"; Hit description=Pre -mRNA processing protein PRP39, putative, expressed
GSPPPGCSLMGSHTLGVGVKNNVAPSDLSVDSSPRYEIISAGHLGEAPVSDPCWLQYIREWGPPLPYSSRSKINPALSFLPFFFXGFPPEAIFPPLPGELYEEEGPPGPKEKTPWEGAEKC

SEQ ID NO: 9930 - protein, 147 aa, Zea mays
  Coding DNA Sequence Number=SeqID_3741
CPVLRAAPSRGRCSVRQVPNGDCRNVQGDENHLLQAARVMRCGHGVVAPSRGLCCAFFHVAVSVVCHTAIVVRLLLSNRLLRSVALLSRVLSLASHACDVSHCTRECHMSRRPVSSHVFEIVGSRGSRCVSALVVFTAVSLSPSSII

SEQ ID NO: 9931 - protein, 152 aa, Zea mays
  misc_feature (10)..(10): Xaa can be any naturally occurring amino acid
  misc_feature (60)..(60): Xaa can be any naturally occurring amino acid
  misc_feature (122)..(122): Xaa can be any naturally occurring amino acid
  misc_feature (141)..(141): Xaa can be any naturally occurring amino acid
  Coding DNA Sequence Number=SeqID_3743
  Gene Ontology: Mol. function=oxidoreductase activity; Cellular component=cellulose and pectin-containing cell wall; Biological process=electron transport
  Homolog annotation: Hit_ID=Q8W2K4; Match level="QueryCoverage=98%, HitCoverage=51%, E-value=3e-73, Identity=91%"; Hit description =Cytochrome b5 reductase isoform II
  Pfam annotation: Domain name=NAD_binding_1; Domain location=22-137; Score=118.8; E_value=1.6e-32; Accession=PF00175.11; Description =Oxidoreductase NAD-binding domain
PAGVKGPKGXFKYLPGQVRALGMVAGGSGITPMFQVTRAILENPKDNTKVHLIYASVHAXEDILLKEELDGMAKNYPDRFKIYYVLNQPPEVWDGGVGFVSKEMIQTHCPAPAADIQFSVFXVLRCGPPPMNKAMAAHLDXLGYTKEMQFQF

SEQ ID NO: 9932 - protein, 207 aa, Zea mays
  Coding DNA Sequence Number=SeqID_3744
  Gene Ontology: Mol. function=threonine endopeptidase activity; Cellular component=proteasome core complex; Biological process =ubiquitin-dependent protein catabolic process
  Homolog annotation: Hit_ID=Q5XUV7; Match level="QueryCoverage=93%, HitCoverage=90%, E-value=1e-102, Identity=97%"; Hit description=20S proteasome beta 4 subunit
  Pfam annotation: Domain name=Proteasome; Domain location=1-182; Score= 175.9; E_value=1e-49; Accession=PF00227.16; Description=Proteasome A -type and B-type
MECVIGVVGSDFAVVAADTSAVQSILVHKTDEDKIMLLDSHKLMGASGEPGDRVQFTEFIQKNLHLYQFRNNMPLSTAATANFTRGELATALRKNPYSVNIILAGFDKDAGASMYYIDYIATLHKIDKGAFGYGSYFCLSLMDKLYRPDMTVEEAVDLVDKCIKEIRLRLVVAPQNFAIKIVDKEVPRGYATRVLFVTVLPSSPTQS

SEQ ID NO: 9933 - protein, 68 aa, Zea mays
  Coding DNA Sequence Number=SeqID_3745
LLSSITPTIIKATCRSEPRSIYLPVKHVTTSSTQLDSNELPVHSFLDEHELKLAAYQQLAVNLRIHPD

SEQ ID NO: 9934 - protein, 200 aa, Zea mays
  misc_feature (46)..(46): Xaa can be any naturally occurring amino acid
  misc_feature (185)..(185): Xaa can be any naturally occurring amino acid
  misc_feature (192)..(192): Xaa can be any naturally occurring amino acid
  misc_feature (194)..(194): Xaa can be any naturally occurring amino acid
  Coding DNA Sequence Number=SeqID_3747
  Gene Ontology: Mol. function=oxidoreductase activity; Cellular component=integral to membrane; Biological process=electron transport
  Homolog annotation: Hit_ID=A2Z9A9; Match level="QueryCoverage=99%, HitCoverage=37%, E-value=5e-62, Identity=63%"; Hit description =Putative uncharacterized protein
RLVARYGPVVSLRAGPSLSVFIADRRVAHAALVESGAALADRPALXRALLGESGNTISRSSYGPVWRLLRRNLVSETLHPSRVKLFAPARAWVRRVLAEKLGREAEEAQARAQAPPPAMEAFRYAMFCLLVLMCFGERLDEATVRAIAAAQREPLIYRSRKMAVFAFLPSVTKHLYRDRLQTLHXMQRRKKXLXVPLITL

SEQ ID NO: 9935 - protein, 98 aa, Zea mays
  misc_feature (67)..(98): Xaa can be any naturally occurring amino acid
  Coding DNA Sequence Number=SeqID_3748
HACAGLLQSEWSHATSKHEWTLIDRMRAWTPARFVGTSPLTKRYPRELSAPDALTSTAHLDWGKRNXXXXXXXXXXXXXXXXXXXXXXXXXXXXXXXX

SEQ ID NO: 9936 - protein, 188 aa, Zea mays
  misc_feature (45)..(45): Xaa can be any naturally occurring amino acid
  misc_feature (162)..(162): Xaa can be any naturally occurring amino acid
  Coding DNA Sequence Number=SeqID_3750
  Gene Ontology: Mol. function=RNA-directed DNA polymerase activity; Cellular component=membrane; Biological process=RNA-dependent DNA replication
  Homolog annotation: Hit_ID=Q8SA85; Match level="QueryCoverage=90%, HitCoverage=12%, E-value=2e-49, Identity=57%"; Hit description=Prpol
WPGPPREPVGRNIFTYVDDIVVASRSKEDHLADLAKTFANMRDTXLRLNPEKCVFDVRQGKILGYLVSHRGIEANSTKIQAIINMTPPQSARDVQRLTGRLATLNRFISKSAERSLPFLKTLRGAKDFAWGPEQAAAFASLKQYLSELAILTSPDPLLPLLXYIAASPHAVSTTLVQDPGHLRGLGEC

SEQ ID NO: 9937 - protein, 116 aa, Zea mays
  misc_feature (70)..(70): Xaa can be any naturally occurring amino acid
  misc_feature (92)..(92): Xaa can be any naturally occurring amino acid
  Coding DNA Sequence Number=SeqID_3751
  Homolog annotation: Hit_ID=A2WWH6; Match level="QueryCoverage=89%, HitCoverage=65%, E-value=2e-25, Identity=61%"; Hit description =Putative uncharacterized protein
  Subcellular localization annotation: CTP_CleavageSite=32; ConfidenceScore=5.17e-01
MAMRALPLTPSRSSSFGAHQTRPSGGGPRSVRAYAKGDEEGDKQSLFGSITEALDFSQVRSEKDAELLSXARDSTSHGGRMLLEQLCARLRXIGASYQDIFRFFEHLILHPGQKGG

SEQ ID NO: 9938 - protein, 195 aa, Zea mays
  misc_feature (2)..(2): Xaa can be any naturally occurring amino acid
  misc_feature (6)..(6): Xaa can be any naturally occurring amino acid
  misc_feature (8)..(9): Xaa can be any naturally occurring amino acid
  misc_feature (11)..(14): Xaa can be any naturally occurring amino acid
  misc_feature (17)..(19): Xaa can be any naturally occurring amino acid
  misc_feature (21)..(31): Xaa can be any naturally occurring amino acid
  misc_feature (33)..(36): Xaa can be any naturally occurring amino acid
  misc_feature (38)..(43): Xaa can be any naturally occurring amino acid
  misc_feature (47)..(51): Xaa can be any naturally occurring amino acid
  misc_feature (61)..(61): Xaa can be any naturally occurring amino acid
  misc_feature (63)..(63): Xaa can be any naturally occurring amino acid
  misc_feature (71)..(71): Xaa can be any naturally occurring amino acid
  Coding DNA Sequence Number=SeqID_3752
GXGEGXVXXEXXXXRYXXXGXXXXXXXXXXXRXXXXRXXXXXXARGXXXXXPQRPAPQQQXQXHHAQFHHXPSPSASPSPRFPSQMVPVPPSHQAMASPSAQHMPHSQQHAAAAQYRPSPTQPSPKTVPAPRPKKKTPAPSPRQSSVQHPTPPPQQRAHLPASGGGGGTSELSRAEFLQPGGSTVLERPPPRGAP

SEQ ID NO: 9939 - protein, 320 aa, Zea mays
  misc_feature (250)..(250): Xaa can be any naturally occurring amino acid
  misc_feature (292)..(294): Xaa can be any naturally occurring amino acid
  misc_feature (309)..(310): Xaa can be any naturally occurring amino acid
  misc_feature (314)..(315): Xaa can be any naturally occurring amino acid
  misc_feature (319)..(320): Xaa can be any naturally occurring amino acid
  Coding DNA Sequence Number=SeqID_3754
  Gene Ontology: Mol. function=serine-type endopeptidase activity; Cellular component=intracellular; Biological process=protein modification process
  Homolog annotation: Hit_ID=Q3EAA5; Match level="QueryCoverage=99%, HitCoverage=87%, E-value=1e-165, Identity=96%"; Hit description =Uncharacterized protein At4g05320.3
  Pfam annotation: Domain name=Tash_PEST; Domain location=158-176; Score=6.2; E_value=9.2; Accession=PF07708.2; Description=Tash protein PEST motif
  Pfam annotation: Domain name=Tash_PEST; Domain location=234-252; Score=8.0; E_value=4.6; Accession=PF07708.2; Description=Tash protein PEST motif
  Pfam annotation: Domain name=Tash_PEST; Domain location=6-24; Score =6.2; E_value=9.2; Accession=PF07708.2; Description=Tash protein PEST motif
  Pfam annotation: Domain name=Tash_PEST; Domain location=82-100; Score= 6.2; E_value=9.2; Accession=PF07708.2; Description=Tash protein PEST motif
  Pfam annotation: Domain name=ubiquitin; Domain location=158-226; Score=138.0; E_value=2.6e-38; Accession=PF00240.13; Description =Ubiquitin family
  Pfam annotation: Domain name=ubiquitin; Domain location=234-301; Score=106.9; E_value=6e-29; Accession=PF00240.13; Description =Ubiquitin family
  Pfam annotation: Domain name=ubiquitin; Domain location=6-74; Score =111.6; E_value=2.3e-30; Accession=PF00240.13; Description=Ubiquitin family
  Pfam annotation: Domain name=ubiquitin; Domain location=82-150; Score= 138.0; E_value=2.6e-38; Accession=PF00240.13; Description=Ubiquitin family
  Pfam module annotation: Pfam domain module=Tash_PEST::Tash_PEST::Tash_ PEST::Tash_PEST::ubiquitin::ubiquitin::ubiquitin::ubiquitin; Domain location=158-176::234-252::6-24::82-100::158-226::234-301::6-74::82 -150
MQIFVKTLTGKTITLEVESSDTIDNVEAKTQDKEGFFPDQQRLIFAGKQLEDGRTLADYNIQKESTLHLVLRLRGGMQIFVKTLTGKTITLEVESSDTIDNVKAKIQDKEGIPPDQQRLIFAGKQLEDGRTLADYNIQKESTLHLVLRLRGGMQIFVKTLTGKTITLEVESSDTIDNVKAKIQDKEGIPPDQQRLIFAGKQLEDGRTLADYNIQKESTLHLVLRLRGGMQIFVKTLTGKTITLEVESSDXDNVKAKIQDKEGIPPDQQRLIFAGKQLEDGRTLADYNIQKEXXXHLVLRLRGGMQIFVXXLTGXXITLXX

SEQ ID NO: 9940 - protein, 84 aa, Zea mays
  Coding DNA Sequence Number=SeqID_3755
  Gene Ontology: Mol. function=protein serine/threonine kinase activity; Cellular component=integral to membrane; Biological process=protein amino acid phosphorylation
  Homolog annotation: Hit_ID=Q94IJ4; Match level="QueryCoverage=96%, HitCoverage=12%, E-value=7e-40, Identity=100%"; Hit description =Somatic embryogenesis receptor-like kinase 2 precursor
MCLEEVEVESLIQVALLCTQGSPLDRPKMSEVVRMLEGDGLAERWDEWQKVEVVRQEAESAPLRNDWIVDSTYNLRAVELSGPR

SEQ ID NO: 9941 - protein, 152 aa, Zea mays
  Coding DNA Sequence Number=SeqID_3756
  Gene Ontology: Mol. function=superoxide dismutase activity; Cellular component=cytoplasm; Biological process=superoxide metabolic process
  Homolog annotation: Hit_ID=Q7M1R5; Match level="QueryCoverage=100%, HitCoverage=100%, E-value=5e-69, Identity=82%"; Hit description =Superoxide dismutase [Cu-Zn]
  Pfam annotation: Domain name=Sod_Cu; Domain location=1-152; Score =337.5; E_value=2.4e-98; Accession=PF00080.10; Description=Copperzinc superoxide dismutase (SODC)
MVKAVAVLGNSENVGGTIYFNQEGNGPTTVTGSLSGLKPGLHGFHVHAMGDTTNGCMSTGAHFNPHGKEHGAPEDQNRHAGDLGNVNVGDDGTVSFTITDSQIPLTGPNSIIGRAVVVHADPDDLGKGGHELSKTTGNAGGRVACGIIGLQG

SEQ ID NO: 9942 - protein, 130 aa, Zea mays
  Coding DNA Sequence Number=SeqID_3757
  Subcellular localization annotation: CTP_CleavageSite=35; ConfidenceScore=5.33e-01
LFFFFFFFFFFFFFFFFFFERGRINNFFLKGTWVVPKKKQKQQQIPLFQSSGGSLFQGGAAGSIQHKHAANGEGTRIQQCYSRARFMGGAEHEHTSAKILRGKSRGGNTIKGLPGTMGQTAVGAHSRLTR

SEQ ID NO: 9943 - protein, 207 aa, Zea mays
  misc_feature (53)..(53): Xaa can be any naturally occurring amino acid
  misc_feature (79)..(79): Xaa can be any naturally occurring amino acid
  Coding DNA Sequence Number=SeqID_3759
  Gene Ontology: Mol. function=protein serine/threonine phosphatase activity; Cellular component=protein serine/threonine phosphatase complex; Biological process=protein amino acid dephosphorylation
  Homolog annotation: Hit_ID=A2Y846; Match level="QueryCoverage=98%, HitCoverage=48%, E-value=8e-87, Identity=76%"; Hit description =Putative uncharacterized protein
  Pfam annotation: Domain name=PP2C; Domain location=1-190; Score=70.6; E_value=5.2e-18; Accession=PF00481.12; Description=Protein phosphatase 2C
HASAFVGCFSRVDAQVGGDAATEAKPVAPDTVGSTAVVALVCSSHVIVANCGXSVDHKPNTEDEYARIEAHGGNVINWXNGYRVPRVLAMSRSIGDRYLKPYIIPVPEVTIVARAKDDECLIIASDGLWDVMSNEEVCDAARKRILLWHKKNSDASSSAQRSGDSPDEAAQAAAEYLSKLALHKGSKDNITVRLVDLKSHRKIKSRA

SEQ ID NO: 9944 - protein, 154 aa, Zea mays
  Coding DNA Sequence Number=SeqID_3760
  Gene Ontology: Mol. function=protein binding; Cellular component =nucleus; Biological process=regulation of transcription, DNA -dependent
  Homolog annotation: Hit_ID=A3BM65; Match level="QueryCoverage=85%, HitCoverage=56%, E-value=1e-36, Identity=64%"; Hit description =Putative uncharacterized protein
  Pfam annotation: Domain name=tify; Domain location=93-128; Score =73.8; E_value=5.6e-19; Accession=PF00481.12; Description=tify domain
MAASARPGERATSFAVACSLLSRFVRQNGAAPAQLGLGIKGEDEQQRTPATINLLPGADGEETERRKETMELFPQSAGFGVKDPAAAPREQENKEKPKQLTIFYGGKVLVFDDFPADKAKDLMQLASKGSPCGTERLFLPHPPALVAAVPTRAV

SEQ ID NO: 9945 - protein, 154 aa, Zea mays
  Coding DNA Sequence Number=SeqID_3761
  Homolog annotation: Hit_ID=O82317; Match level="QueryCoverage=100%, HitCoverage=15%, E-value=6e-26, Identity=48%"; Hit description =Putative uncharacterized protein At2g25800
MAHLFRELSLGHSKRETTPPPPSMASTIPSDLPPSPLGQLAVQFSESDLRLISYEIFVAACRSATGKPLSSAVSSLSVANPDSPSNGASPASPAAQRSLTAAAASKMKKALGMKSLSSLSPGSTKSPGSGSGSGSGSGGKSKRPTTVGELMRIQ

SEQ ID NO: 9946 - protein, 165 aa, Zea mays
  misc_feature (9)..(9): Xaa can be any naturally occurring amino acid
  misc_feature (16)..(16): Xaa can be any naturally occurring amino acid
  misc_feature (114)..(114): Xaa can be any naturally occurring amino acid
  misc_feature (117)..(117): Xaa can be any naturally occurring amino acid
  Coding DNA Sequence Number=SeqID_3762
  Gene Ontology: Mol. function=protein domain specific binding; Cellular component=late endosome membrane; Biological process =protein transport
  Homolog annotation: Hit_ID=Q6ASS4; Match level="QueryCoverage=95%, HitCoverage=67%, E-value=5e-54, Identity=75%"; Hit description=SNF7 family protein
  Pfam annotation: Domain name=Snf7; Domain location=1-142; Score=22.0; E_value=7.9e-07; Accession=PF03357.11; Description=Snf7
RRTAKNWKXEAATKIXSSATLVRLRQQILNLQGTRAQIRGVATHTQAMYAGTSISAGMKGASKAMSAMNKQMEPAKQIKVMKEFQKQSTQLDMPLEMMSDAIDETLAKYEVEEXTRXLPNQVLVEIGDDVGSQLSPVLKGRIDATNKKVDNGQARRARNVAALVF

SEQ ID NO: 9947 - protein, 159 aa, Zea mays
  misc_feature (68)..(68): Xaa can be any naturally occurring amino acid
  Coding DNA Sequence Number=SeqID_3763
  Gene Ontology: Mol. function=transcription factor activity; Cellular component=nucleus; Biological process=regulation of transcription, DNA-dependent
  Homolog annotation: Hit_ID=A7EKB3; Match level="QueryCoverage=85%, HitCoverage=14%, E-value=1e-39, Identity=60%"; Hit description =Putative uncharacterized protein
  Subcellular localization annotation: CTP_CleavageSite=72; ConfidenceScore=5.13e-01
RVSYVGPPPSPGSDNDDHDGDNDKKRQPGVKRACNECRQQKASLSTSLTLFLVPCLRLVRRVTNAIFXKQLRCDVVQEPFQSCSRCNRLKLDCKIESNFKRIGKRSKHAEMEKEIERLRRSVNRAQLQGFVPDEEEDLQSPLAQSTPYTHTRNPSLMGS

SEQ ID NO: 9948 - protein, 70 aa, Zea mays
  Coding DNA Sequence Number=SeqID_3764
LAYELEIARRREHRTRSGSVSRTGCRARLAARADPPAPACPCGPGASARGVASRDRFWHRQTGCQPPSTD

SEQ ID NO: 9949 - protein, 173 aa, Zea mays
  Coding DNA Sequence Number=SeqID_3766
  Subcellular localization annotation: CTP_CleavageSite=11; ConfidenceScore=5.20e-01
SSQLRRPPPPTASSSSTPAKTTPAKTTPAKKATVERTVIGQLYYSRPHDQAYPHGSMYTHTWDLIELLAKLQEKDPVVMGEDQAVGKLLQNAGEQVHLVNMNATEKFDYDDADARTADSPWARTATHPMAMLHALYGRDELAVHQLKDRNLFMKIANAFDSKGIKAPPRFDGP

SEQ ID NO: 9950 - protein, 194 aa, Zea mays
  misc_feature (1)..(99): Xaa can be any naturally occurring amino acid
  Coding DNA Sequence Number=SeqID_3768
XXXXXXXXXXXXXXXXXXXXXXXXXXXXXXXXXXXXXXXXXXXXXXXXXXXXXXXXXXXXXXXXXXXXXXXXXXXXXXXXXXXXXXXXXXXXXXXXXXXASRCHFLLCVFFFFCFFFASLVLSRKKNLGAHGHFWLHLYSDPNSCIRSLSSYECMYEMCLVVIYGIEYGGLKRGSGSFCVFVCDLRVDLVTGLN

SEQ ID NO: 9951 - protein, 197 aa, Zea mays
  Coding DNA Sequence Number=SeqID_375
  Subcellular localization annotation: CTP_CleavageSite=63; ConfidenceScore=5.17e-01
IWSDIFDISDISCLSMTSDFFVFPILKTLFPVASVVLSHGIAVTRDPPLLCLRRAAWSHASGRAASSSRPASPQPLVPPLVCVPTGPRHYEIRRHRSAMAARHRTCLLAAAAACSGEATRLPAPAWMSATPTLVLAPYCVCLPAERCGIAMAPCVPRFPVPLPQPRHRPRAAANASACLCSTALPAASPLDNPHTRA

SEQ ID NO: 9952 - protein, 169 aa, Zea mays
  misc_feature (66)..(66): Xaa can be any naturally occurring amino acid
  misc_feature (71)..(71): Xaa can be any naturally occurring amino acid
  misc_feature (80)..(80): Xaa can be any naturally occurring amino acid
  Coding DNA Sequence Number=SeqID_377
REFVLALSVLRRPRQTVCSERTRIPVSLAFLSLPTHTHERSSPPPPKPENPIPTRQSQPPRRCGRXRRGEXGKSRGDTDXTTIDNQTLPWTWTTLTATCTTTYLSPLATPILSCRPSVPQGECRGRRGRPAGAAVVGATGAGGGAPATRVHELLEYPVCTNSTFPAHPS

SEQ ID NO: 9953 - protein, 65 aa, Zea mays
  Coding DNA Sequence Number=SeqID_379
LPATPKKNQSQRGSTLTAVTADPSFGDAQGFLSASDFGKIAKPEEKRRQVFLCPHFPRENKSYRN

SEQ ID NO: 9954 - protein, 188 aa, Zea mays
  Coding DNA Sequence Number=SeqID_381
  Subcellular localization annotation: CTP_CleavageSite=36; ConfidenceScore=5.01e-01
TLFPLFSHSRRAPTLVHSAAAAPRRSCAKEKLCAVQAQVQGEQEAATALQRRVDELESGREERAGVLAVEGVELRRANTVLEENNRELALRLQDAIEQAAASASANLAPKVTWSWKGFLLQSVFQLSRESYKLPKKPLTEKFVNTLHFKIHWGHGCLGVHCAYFACKANQAIKRWRKADNSNGGCIIQ

SEQ ID NO: 9955 - protein, 163 aa, Zea mays
  Coding DNA Sequence Number=SeqID_382
  Homolog annotation: Hit_ID=A5BHR2; Match level="QueryCoverage=71%, HitCoverage=73%, E-value=2e-10, Identity=27%"; Hit description =Putative uncharacterized protein
  Pfam annotation: Domain name=Polyketide_cyc; Domain location=23-144; Score=7.7; E_value=0.069; Accession=PF03364.10; Description =Streptomyces cyclasedehydrase
MDGHGQSDEAASKAWRGAASGVVSAPVARVWELVSSTSRLREWMPMVESCTAVAGDEDVPGYVRLVRGGLMFPQQQQGSSWVRERLVAMDHTARSYTYLMEDGNVGLAGSRNTISLLDYGGGATLVVWSFEMEPVDDANQDALLDYLRILYKSCIDTIPLCLL

SEQ ID NO: 9956 - protein, 98 aa, Zea mays
  misc_feature (31)..(31): Xaa can be any naturally occurring amino acid
  Coding DNA Sequence Number=SeqID_383
  Gene Ontology: Mol. function=serine-type endopeptidase inhibitor activity; Biological process=defense response
  Homolog annotation: Hit_ID=Q40066; Match level="QueryCoverage=66%, HitCoverage=20%, E-value=2e-11, Identity=51%"; Hit description =Protein zx
MLVLGSSPYILLPEARDGLRSVAEKLSTEQXRVRRMKLSFGFEASELLKALGLRLPFSPEEADLSGLVADPPVMRRGAARGRLGAAGIVSSRATLSSS

SEQ ID NO: 9957 - protein, 180 aa, Zea mays
  misc_feature (1)..(33): Xaa can be any naturally occurring amino acid
  Coding DNA Sequence Number=SeqID_384
XXXXXXXXXXXXXXXXXXXXXXXXXXXXXXXXXQPTEIPFASYQFPPLCVILSVERWCAVFSTQRSLPSDAEFSHRDSCCTIIVLVPRHHSPVPCSQRRRTSSTPSVHLIRAALKAPPRHRPVLRLLLLIFVVHVQRWKPQVLNVTSHRHDQVVDLVVKNQDLFRSVEESQVFNKQEVCR

SEQ ID NO: 9958 - protein, 154 aa, Zea mays
  Coding DNA Sequence Number=SeqID_386
REKYCRSRSRSRIAAAASRSEQASFGCRLPPPGFFQAARAWIELDCWRQPKASESSKLWVCAGVCECPPSFACLSVPRIGRRRHGGAGPRRASPSPWPPSPSACTRCMLLCSGGRQGQRSYWHARLVVHVPYVPLASPSPSAESWHGKARRSEA

SEQ ID NO: 9959 - protein, 44 aa, Zea mays
  misc_feature (3)..(3): Xaa can be any naturally occurring amino acid
  Coding DNA Sequence Number=SeqID_388
LQXPPPGFTPFSCLSYSEAEAGESLEPGRQAAVSQDRATALKPG

SEQ ID NO: 9960 - protein, 44 aa, Zea mays; identical to SEQ ID NO: 9959
  misc_feature (3)..(3): Xaa can be any naturally occurring amino acid
  Coding DNA Sequence Number=SeqID_389

SEQ ID NO: 9961 - protein, 260 aa, Zea mays
  Coding DNA Sequence Number=SeqID_390
  Subcellular localization annotation: CTP_CleavageSite=28; ConfidenceScore=5.44e-01
FPLPPLFFFSRHSLSLFSQPSLPWSLLPQRAGNSHDAIHPCSPSMEARLQLPRRSLPAPSRWSRHKGLPPRQHHLAAIFLQVQAPRTNCEPLCSYSSMAPPTARALLWSSAREKSPIAGARRCRISPCELELLPPGTPHNSNKSPTPRTERPFPPSDLWALAQAPFFSPLSPSASSRRPPPPAVLVVQVLPTPTFFSGKSGRCHPSAPGWSTRRAPPHVLFHRSASPLEQQQQQRRRPPLRRARQDRPPAVDLAVPVAMS

SEQ ID NO: 9962 - protein, 91 aa, Zea mays
  Coding DNA Sequence Number=SeqID_3770
PAQTTMLHCTMLHRVNRVEVVMNEIVDRVLQNYQLNNPLDAASVVESREKVSQYVAKLASAGQNDRRRLIVFARAYLKELHQGPDRRFTGC

SEQ ID NO: 9963 - protein, 183 aa, Zea mays
  misc_feature (24)..(24): Xaa can be any naturally occurring amino acid
  misc_feature (98)..(98): Xaa can be any naturally occurring amino acid
  misc_feature (140)..(140): Xaa can be any naturally occurring amino acid
  Coding DNA Sequence Number=SeqID_3772
  Gene Ontology: Mol. function=binding; Cellular component=kinesin complex
  Homolog annotation: Hit_ID=A6S2S3; Match level="QueryCoverage=61%, HitCoverage=10%, E-value=4e-21, Identity=45%"; Hit description =Putative uncharacterized protein
SWPGSDDQSRGHQRKHVQHPSAPXRPAASRSTARVIPYPHNPDFVRRPDLADKLDELLPLGEHYKSVALWGLGGSGKTQITLEYAYGRFQPNVCGVFXVQADSEATFTHDYKSIAAKLRVDTRLEGEDLFEAVRAAIESXPSWVLVLATRTEAVRLAITEETKLKSCQGMDIETWPLLDPLGG

SEQ ID NO: 9964 - protein, 397 aa, Zea mays
  misc_feature (222)..(222): Xaa can be any naturally occurring amino acid
  Coding DNA Sequence Number=SeqID_3773
  Gene Ontology: Mol. function=receptor binding; Cellular component =membrane; Biological process=protein homooligomerization
  Homolog annotation: Hit_ID=Q9T082; Match level="QueryCoverage=95%, HitCoverage=76%, E-value=1e-174, Identity=82%"; Hit description =Putative uncharacterized protein AT4g27580
  Pfam annotation: Domain name=Band_7; Domain location=55-227; Score =168.3; E_value=2e-47; Accession=PF01145.15; Description=SPFH domain Band 7 family
  Subcellular localization annotation: CTP_CleavageSite=36; ConfidenceScore=5.67e-01
MMMNHLLRKSSATAMRSVGYLRQSSSAVSTVRQFTSAGYPSNSFQLTPPVNWGVRIVPEKKAFVIERFGKFAKTLPSGIHFLIPFVDRIAYVHSLKEEAIPIPNQTAITKDNVSIHIDGVLYVKIVDPKLASYGVESPIYAVVQLAQTTMRSELGKITLDKTFEERDTLNEKIVEAINVAARDWGLQCLRYEIRDIMPPHGVRVAMEMPAEAERKKRAQILXSEGERQAHINIADGKKSSVILASEAAKMDQVNRAQGEAEAILARAEATARGLAMLSQSLKETGGVEAASLRVAEQYIQAFSNIAKEGTTMLLPSTASNPASMIAQALTMYKSLVNQGPKSEHQETSAMEGDWEDIGEKEISEGSKNQSGSTTFETEKPGHTGGPVFSLQSRTEEP

SEQ ID NO: 9965 - protein, 200 aa, Zea mays
  misc_feature (169)..(169): Xaa can be any naturally occurring amino acid
  misc_feature (181)..(182): Xaa can be any naturally occurring amino acid
  Coding DNA Sequence Number=SeqID_3774
  Gene Ontology: Cellular component=Golgi apparatus; Biological process= biosynthetic process
  Homolog annotation: Hit_ID=A2ZVI3; Match level="QueryCoverage=97%, HitCoverage=18%, E-value=2e-73, Identity=70%"; Hit description =Putative uncharacterized protein
EEQLFPSVLVQAMSLEKLVIAPDLAIIRKHIDDGVNGLLFPRKNVGMLPQVLLQAVSNGKVSISGQKIASAGKAHAKNLMASETIEGYAVLLENVVKFPTDALHPLTVDEIPLALKKEWKWHLFEDVKHLHHMNTSLSSYKILKKLEQEWHKNQMENFSLSTTKIVDTXFSAIAWEEQKSXXEVMDIKRKMEEDQFEGQE

SEQ ID NO: 9966 - protein, 165 aa, Zea mays
  misc_feature (15)..(15): Xaa can be any naturally occurring amino acid
  Coding DNA Sequence Number=SeqID_3775
  Homolog annotation: Hit_ID=Q47DZ2; Match level="QueryCoverage=84%, HitCoverage=54%, E-value=1e-27, Identity=50%"; Hit description =Putative uncharacterized protein
  Pfam annotation: Domain name=DUF833; Domain location=2-159; Score =6.3; E_value=4.6e-10; Accession=PF05742.2; Description=Protein of unknown function (DUF833)
ELGTGPPLEPLADSXSGFNLLLADRESLWYLSNRAPEFARSLRPGIYGLSNELLDTPWPKLQRVRRRFDPLVKQPDNISSDALFEILADPTQAGVDDVLPDTGLSREWEQLLSSPFISNKDYGTRCSTVLLLETSGAVSLTERRFGPQGIPLSDTRFDLAANEWP

SEQ ID NO: 9967 - protein, 300 aa, Zea mays
  misc_feature (216)..(216): Xaa can be any naturally occurring amino acid
  Coding DNA Sequence Number=SeqID_3776
  Gene Ontology: Mol. function=nucleotide binding; Cellular component =membrane; Biological process=defense response
  Homolog annotation: Hit_ID=Q5BMB3; Match level="QueryCoverage=92%, HitCoverage=30%, E-value=1e-120, Identity=80%"; Hit description=RXO1 disease resistance protein
LGTSRPAGEKLLHLQTLSLERAELVKFPQGFSNLKKLRHLMVSRLRDVTYRSLKSWEALEPFKGLWGLTELQTLFAITASEVLVAILGNLSQLRSLEICDVRSNLCAHLCGSLSKMCQLSRLTIRACNEDEVLQLDDLTFPNPLQTLSLDGRLSEGTFTSPFFLNHGNGLLCLMLWYSQLSENPVPRLSKLSNLTRLSLIKAYTGQELYFQAGWFXLNLKELYMKDLPHLNQIHIQGGSFAPALKLIAIFHLPDLRQAPIGFRFLKSLETTFFYDMHPTFESNIEERNLERIAYIFGTMA

SEQ ID NO: 9968 - protein, 88 aa, Zea mays
  Coding DNA Sequence Number=SeqID_3777
  Homolog annotation: Hit_ID=Q0CDP7; Match level="QueryCoverage=77%, HitCoverage=92%, E-value=9e-12, Identity=54%"; Hit description =Putative uncharacterized protein
MSAPNVDKPNEGIVGQVGNSISNAANYVSESLQGNAKEASKEANKQQAKGNAGDTSLTGRASGALDAAGDKLDQSKHDSAAKANKESI

SEQ ID NO: 9969 - protein, 216 aa, Zea mays
  misc_feature (105)..(105): Xaa can be any naturally occurring amino acid
  Coding DNA Sequence Number=SeqID_3778
  Gene Ontology: Mol. function=RNA-directed DNA polymerase activity; Biological process=RNA-dependent DNA replication
  Homolog annotation: Hit_ID=Q8SA85; Match level="QueryCoverage=100%, HitCoverage=16%, E-value=2e-75, Identity=62%"; Hit description=Prpol
  Pfam annotation: Domain name=RnaseH; Domain location=65-216; Score= -1.4; E_value=4e-05; Accession=PF00075.14; Description=RNase H
VSEVLSVSKKNYTELEKVLYAVLMASRKLRHYFQAYNIIVPSSQPLKDIMRNRPGAQEDETNKEAEEWIVFCDGSWGTFGAGAAAVLVSPSKVKTCYAATLDFSXTNKISEYEALLIGLRKLKAMGIRRAMLKTGSEVGLYLGIIKRVARFKIRSLGLRKLKAMGIRRAILKTDSQVVSGHVDKSCKAKDPKLEKYLDTVRRIEASFEGFSVKNIP

SEQ ID NO: 9970 - protein, 62 aa, Zea mays
  Coding DNA Sequence Number=SeqID_3779
  Gene Ontology: Mol. function=protein serine/threonine kinase activity; Cellular component=beta-catenin destruction complex; Biological process=protein amino acid phosphorylation
  Homolog annotation: Hit_ID=A2WMX6; Match level="QueryCoverage=77%, HitCoverage=8%, E-value=9e-20, Identity=89%"; Hit description =Putative uncharacterized protein
CPLGPPQLQPLFPGESGVDQLVEIIKILGTPTREEIRCMNPNYSEFKFPQIKAHPWHKVRDL

SEQ ID NO: 9971 - protein, 107 aa, Zea mays
  misc_feature (51)..(52): Xaa can be any naturally occurring amino acid
  misc_feature (64)..(64): Xaa can be any naturally occurring amino acid
  misc_feature (96)..(96): Xaa can be any naturally occurring amino acid
  Coding DNA Sequence Number=SeqID_3780
  Gene Ontology: Mol. function=tetrahydrofolylpolyglutamate synthase activity; Biological process=folic acid and derivative biosynthetic process
  Homolog annotation: Hit_ID=Q2QLY6; Match level="QueryCoverage=57%, HitCoverage=12%, E-value=2e-11, Identity=61%"; Hit description =Dihydrofolate synthetase/folylpolyglutamate synthetase, putative, expressed
MLGHRFPAALGLPRGLLLGRSVTRRSLSAMAGGEAGGPLGGFFDYMERLRXXERSGVPRGAGTXSDDGFDLGRMRRLLRRLGDPHTDFPAVHIAGXKGKGSTAALLS

SEQ ID NO: 9972 - protein, 219 aa, Zea mays
  misc_feature (1)..(188): Xaa can be any naturally occurring amino acid
  misc_feature (190)..(190): Xaa can be any naturally occurring amino acid
  misc_feature (193)..(193): Xaa can be any naturally occurring amino acid
  misc_feature (196)..(196): Xaa can be any naturally occurring amino acid
  Coding DNA Sequence Number=SeqID_3781
XXXXXXXXXXXXXXXXXXXXXXXXXXXXXXXXXXXXXXXXXXXXXXXXXXXXXXXXXXXXXXXXXXXXXXXXXXXXXXXXXXXXXXXXXXXXXXXXXXXXXXXXXXXXXXXXXXXXXXXXXXXXXXXXXXXXXXXXXXXXXXXXXXXXXXXXXXXXXXXXXXXXXXXXXXXXXXXXXXXXXXXXXXXXFXVLXSSXIERGALRCRKVERGQALVQRRLT

SEQ ID NO: 9973 - protein, 198 aa, Zea mays
  Coding DNA Sequence Number=SeqID_3783
MDIRDPTAKTVRVAGPKCGGAARPHSEISMEMRETATAGLWGLGEGLGRVQGDMANMIMGTTPARGHQRAQNAVGWPNGGADLLRDASGQPWRSSDSTTRTPVSADWVNRGVSEAADDEMELTEVADTVEAQRRPQIGHETTVSGGGTSWGSGTGVVAEKHTVVGTSTTEGASGRLGKRKGLTGGVYLSSVVGAWGWA

SEQ ID NO: 9974 - protein, 59 aa, Zea mays
  misc_feature (21)..(21): Xaa can be any naturally occurring amino acid
  misc_feature (40)..(40): Xaa can be any naturally occurring amino acid
  Coding DNA Sequence Number=SeqID_3785
  Homolog annotation: Hit_ID=A9P8K5; Match level="QueryCoverage=79%, HitCoverage=33%, E-value=2e-10, Identity=67%"; Hit description =Putative uncharacterized protein
MIYVRDIGKIIVTVPRQLLWXKKNNYFLVKQFGRGNANVXFSKESNNLYKLNCYRFSPE

SEQ ID NO: 9975 - protein, 241 aa, Zea mays
  Coding DNA Sequence Number=SeqID_3786
SFVVCRYDIERLHIFFYKRCMCIFFLFFFGGGGGGAAPPPLPPPYKRPPPPRPPRSLPLYRRVFPWLGLPGPNLCPQPVFPRRHLLSPFPPLSQTLHSPTPPSPLTSTPTPVPRRLTPVPSAPAKLPPPSPCVPFSSTPPVRTHSRPLQSPLPPSPPHPHPSPPLPPPPQYTTPPPHHDAVSPPTPPHLPGSAPQGLPTTQSVSTPPHKPLTGPRLSPLSPNHHPPPRRLSHVAPPPPPHP

SEQ ID NO: 9976 - protein, 190 aa, Zea mays
  misc_feature (4)..(4): Xaa can be any naturally occurring amino acid
  misc_feature (19)..(19): Xaa can be any naturally occurring amino acid
  misc_feature (31)..(31): Xaa can be any naturally occurring amino acid
  misc_feature (39)..(43): Xaa can be any naturally occurring amino acid
  misc_feature (120)..(120): Xaa can be any naturally occurring amino acid
  Coding DNA Sequence Number=SeqID_3788
  Homolog annotation: Hit_ID=Q10H93; Match level="QueryCoverage=96%, HitCoverage=28%, E-value=4e-54, Identity=56%"; Hit description =Expressed protein
KARXKDKEQDGSKSKKPKXLLNTPSPYGTNXPQRGGGIXXXXXEVIDKEPNKNFVVEKGQGTPLKDIPSVAHRISRKKPSDLKFLHLIHFGRPGKTGAFLVHILHFSGTVWHPWDLNLPXANILKEDVVSKLLDFIAEPHSAAESWGSDDHGSNSKKRKRGGESASYTPDDTPIKSRKKFVDDRTFSKRQ

SEQ ID NO: 9977 - protein, 135 aa, Zea mays
  misc_feature (18)..(18): Xaa can be any naturally occurring amino acid
  misc_feature (29)..(29): Xaa can be any naturally occurring amino acid
  misc_feature (32)..(33): Xaa can be any naturally occurring amino acid
  misc_feature (37)..(37): Xaa can be any naturally occurring amino acid
  Coding DNA Sequence Number=SeqID_3789
  Gene Ontology: Mol. function=DNA (cytosine-5-)-methyltransferase activity; Cellular component=chromatin; Biological process =regulation of transcription, DNA-dependent
  Homolog annotation: Hit_ID=Q9ARI6; Match level="QueryCoverage=66%, HitCoverage=9%, E-value=5e-17, Identity=61%"; Hit description=DNA (cytosine-5)-methyltransferase 2
FIPTSRGSSLYPGRKRKXLQGLFPDLLTXIVXXPIKXEKYIPVGGARAVPVARALGYCLGQAYLGESEGSDPLYQLPPSFTSVGGRTAGQARASPVGTPAGEVQHPAAGAFLVRFDSGSCNIQRQEHFWFGSIRA

SEQ ID NO: 9978 - protein, 95 aa, Zea mays
  misc_feature (26)..(26): Xaa can be any naturally occurring amino acid
  Coding DNA Sequence Number=SeqID_3790
VRPSNKLAQLFMLHTARVPCVQNFQXPDAGTPLDQKREEGRQERFRVARAGRVKEPSAGVVVVFSAEEKSCSSSTSTSTAASTSERLVQLLSKYP

SEQ ID NO: 9979 - protein, 406 aa, Zea mays
  misc_feature (1)..(291): Xaa can be any naturally occurring amino acid
  Coding DNA Sequence Number=SeqID_3792
XXXXXXXXXXXXXXXXXXXXXXXXXXXXXXXXXXXXXXXXXXXXXXXXXXXXXXXXXXXXXXXXXXXXXXXXXXXXXXXXXXXXXXXXXXXXXXXXXXXXXXXXXXXXXXXXXXXXXXXXXXXXXXXXXXXXXXXXXXXXXXXXXXXXXXXXXXXXXXXXXXXXXXXXXXXXXXXXXXXXXXXXXXXXXXXXXXXXXXXXXXXXXXXXXXXXXXXXXXXXXXXXXXXXXXXXXXXXXXXXXXXXXXXXXXXXXXXXXXXXXXXXXXXXXXXXXXXXXXXXXXXXXXXXXXXAPPPARRRRRRPPSRTAGYGRGVKRRGRSVWQRRAHGPWTRRTLHVQQGEQACCRCGRQSYLRVSHIASGLLPLARRDSWLCQGRDLRSRELSFTILLVGDLFVQIGASLHALHS

SEQ ID NO: 9980 - protein, 780 aa, Zea mays
  misc_feature (317)..(317): Xaa can be any naturally occurring amino acid
  Coding DNA Sequence Number=SeqID_3794
  Gene Ontology: Mol. function=aminoacyl-tRNA ligase activity; Cellular component=cytoplasm; Biological process=tRNA aminoacylation for protein translation
  Homolog annotation: Hit_ID=A2XKX8; Match level="QueryCoverage=99%, HitCoverage=70%, E-value=0.0, Identity=84%"; Hit description =Putative uncharacterized protein
  Pfam annotation: Domain name=Anticodon_1; Domain location=499-654; Score=157.7; E_value=3.1e-44; Accession=PF08264.3; Description =Anticodon-binding domain
  Pfam annotation: Domain name=tRNA-synt_1; Domain location=3-455; Score=407.3; E_value=2.2e-119; Accession=PF00133.12; Description =tRNA synthetases class I (I, L, M and V)
  Pfam module annotation: Pfam domain module=Anticodon_1::tRNA-synt_1; Domain location=499-654::3-455
MLLWGKKKKKNALKDDTMLKVPGYANPVQFGVLISFAYPLEEGLGEIVVATTRIETMLGDTAIAVHPEDERYKHLHGRYAVHPFNGRRLKIICDAELVDPTFGTGAVKITPAHDPNDFEVGKRHNLEFINIFTDDGKINSNGGAKFDGMPRFTARVAVIEALKEKGLYKDTKKNEMSLGVCSRTNDVVEPMIKPQWFVNCNHMAKAGLDAVRSKKIEIIPQQYEQDWYRWLENIRDWCVSRQLWWGHRVPAWYVTLEDDLDKNLGSANDRWIVARNESDANLEAQKKYAGKKLRLDQDPDVLDTWFSSGLFPLTVLXGWASDTADLRAFYPTSVLETGLDILFFWVARMVMMGMQLGGDVPFQKVYLHPMIRDAHGRKMSKSLGNVVDPLEVINGMSLDGLLKRLEEGNLDPNELNIARDGKKKDFPDGIAECGTDALRFALISYTSQSDRINLDIKRVVGYRQWCNKLWNAIRFAMGKLGDHYIPPATVDVSLMPPICKWILSVLSKAVGKTVSSLEAYKLSDATSAIYSWWQYQLCDVFIEAIKPYFFNDSQELESARAASRDTLWICLDTGLRLLHPFMPFVTEELWQRLPQPKDSCRKGSIMISQYPSLVEEWSNGRLENEMDIVLDAVNKIRSLKPPTDSNERRPAFALCRGQEIAATIQCYQSLIVYLSSISHLKILTENDETPADCATAVVNKDLSVYLQLQGALNADAEREKLKKKKDEIQKLQNALAQKMDASGYREKAPQSVQEEDMRKLTALLEQLEVISEAEKKLDAN

SEQ ID NO: 9981 - protein, 152 aa, Zea mays
  misc_feature (62)..(62): Xaa can be any naturally occurring amino acid
  Coding DNA Sequence Number=SeqID_3795
VLHRAPTRINHGTPPWSPPEKMLHSWGSDSRHIIGNPAAYSGAFVSLTRPIHGPPPVVPGRXGEYICVWYPSPSSSSSTYSSSSSPSGHRRRLPLMPRLAGGDPSPVPIPFRARIDAKQWTTKGRAAGHQVSVHTPLAQKFSRNNSSGGPKS

SEQ ID NO: 9982 - protein, 225 aa, Zea mays
  Coding DNA Sequence Number=SeqID_3796
  Gene Ontology: Mol. function=protein serine/threonine kinase activity; Cellular component=integral to membrane; Biological process=protein amino acid phosphorylation
  Homolog annotation: Hit_ID=A2ZN59; Match level="QueryCoverage=99%, HitCoverage=39%, E-value=1e-109, Identity=87%"; Hit description =Putative uncharacterized protein
  Pfam annotation: Domain name=Pkinase; Domain location=1-205; Score =6.9; E_value=4.8e-09; Accession=PF00069.15; Description=Protein kinase domain
  Pfam annotation: Domain name=Pkinase_Tyr; Domain location=2-205; Score=-37.9; E_value=4.4e-10; Accession=PF07714.7; Description =Protein tyrosine kinase
  Pfam module annotation: Pfam domain module=Pkinase::Pkinase_Tyr; Domain location=1-205::2-205
AAKLLVYDFVELGSLDCYLHGDGQEDQPLNWNARMKIALGSARGLAYLHHDCSPGIVHRDIKASNILLDRSLEPRVSDFGLAKLLVDNAAAHVTTVVAGTFGYLAPEYLQNGHATEKSDVYSFGVLLLELVTGKRPTDSCFIKKGLNIVGWLNTLTGEHRLEDIIDERCGDVEVETVETILGIATMCPDADPGQRPSMSAVLKMLEEEILSPCMSELCYEQHLEL

SEQ ID NO: 9983 - protein, 173 aa, Zea mays
  Coding DNA Sequence Number=SeqID_3797
  Homolog annotation: Hit_ID=Q8GS08; Match level="QueryCoverage=69%, HitCoverage=65%, E-value=1e-34, Identity=62%"; Hit description =Disease resistance response protein-like
  Pfam annotation: Domain name=Dirigent; Domain location=31-174; Score =57.0; E_value=6.6e-14; Accession=PF03018.5; Description=Dirigent -like protein
VKYNKKGYVGCVKKKKKKKKKKKKKKKKKKGPFVLLLVSSVAAFAAADHGLTHIHLYVHETYTGANATAAAVLQSPLGANSSFGSMGVVDDEIRVGPDRSSQLVGRYQGVFFGTSVQLGAGYLSSITLVFTAGEYNGSTLSVQGPLLGFTGTIERAVVGGTGKFRLARGYMLS

SEQ ID NO: 9984 - protein, 138 aa, Zea mays
  misc_feature (67)..(67): Xaa can be any naturally occurring amino acid
  misc_feature (119)..(119): Xaa can be any naturally occurring amino acid
  Coding DNA Sequence Number=SeqID_3798
GRPGEFGPRREGGRERERAQGPPPPQKMKLMLQLYEEMIGESPKREKTAKSDSLSNGKATTTTTTTXTSVLRSSETEKHSSDGDGDKVVGGSAFGWNFITSGGPGTEPVYSGMSKEEYXRSSHPIMQVEAELELPNTL

SEQ ID NO: 9985 - protein, 404 aa, Zea mays
  misc_feature (159)..(159): Xaa can be any naturally occurring amino acid
  Coding DNA Sequence Number=SeqID_3799
  Gene Ontology: Mol. function=protein binding; Cellular component =nucleus; Biological process=regulation of transcription, DNA -dependent
  Homolog annotation: Hit_ID=Q8LPU3; Match level="QueryCoverage=94%, HitCoverage=100%, E-value=0.0, Identity=90%"; Hit description =Nucleosome/chromatin assembly factor 104
  Pfam annotation: Domain name=WD40; Domain location=157-196; Score =36.7; E_value=8.5e-08; Accession=PF00400.22; Description=WD domain, G-beta repeat
  Pfam annotation: Domain name=WD40; Domain location=206-245; Score =27.8; E_value=4e-05; Accession=PF00400.22; Description=WD domain, G -beta repeat
  Pfam annotation: Domain name=WD40; Domain location=249-288; Score =33.8; E_value=6.1e-07; Accession=PF00400.22; Description=WD domain, G-beta repeat
  Pfam annotation: Domain name=WD40; Domain location=293-332; Score =33.0; E_value=1.1e-06; Accession=PF00400.22; Description=WD domain, G-beta repeat
  Pfam annotation: Domain name=WD40; Domain location=350-389; Score =31.8; E_value=2.4e-06; Accession=PF00400.22; Description=WD domain, G-beta repeat
  Pfam module annotation: Pfam domain module=WD40::WD40::WD40::WD40::WD4 0; Domain location=157-196::206-245::249-288::293-332::350-389
MDGGSSTPASPPPTVSASAANMEEYRNWKKNAAVLYDLVISHPLEWPSLTVQWLPSESSARSHRLVVGTHTSDEAPNNLMVLDAVLPLPPRLAAAVAASGGAVPFPSVSVSRVAPHRGEVNRARCMPQRPYTVATKTCVDEVHVYHLGDDDGSGKSGAXEVVLKGHEAEGYGLSWSPMKEGWLLSGSYDKKICLWDISSGSGAPVLDAQQVFVAHEDLVEDVAWHLKDEHIFGSVGDDCKLMMWDLRTNKPEQSILAHRKEVNSLSFNPFNEWILATASGDTTINLFDMRKLSRSLHTFDSHEAEVFQVEWNPNLATVLASSAADKRVMIWDINRIGDEQSEEDADDGPPELLFVHGGHTDKISELSWNPSEKWAIASVSEDNILQIWEMAESIYCDDLSMQVN

SEQ ID NO: 9986 - protein, 192 aa, Zea mays
  misc_feature (149)..(149): Xaa can be any naturally occurring amino acid
  misc_feature (155)..(155): Xaa can be any naturally occurring amino acid
  misc_feature (161)..(161): Xaa can be any naturally occurring amino acid
  misc_feature (167)..(167): Xaa can be any naturally occurring amino acid
  misc_feature (170)..(170): Xaa can be any naturally occurring amino acid
  misc_feature (174)..(174): Xaa can be any naturally occurring amino acid
  misc_feature (176)..(176): Xaa can be any naturally occurring amino acid
  misc_feature (180)..(192): Xaa can be any naturally occurring amino acid
  Coding DNA Sequence Number=SeqID_3800
  Gene Ontology: Mol. function=protein dimerization activity; Biological process=proteolysis
  Homolog annotation: Hit_ID=A9FZX3; Match level="QueryCoverage=89%, HitCoverage=43%, E-value=5e-37, Identity=47%"; Hit description =Amidohydrolase
TIGTGPPLESRGFAVDRAFAGVATALRARAGKTGGPRVAILAEYDALPEIGHACGHNLIAAAGVGAFLAAASVAAEAGGEVVLFGTPAEEGGGGKIKLIEAGAFEGIDAAMMFHPFDRDILAHPALASYWYSFTFHGKPAHAAAAPHAXNSALTXCMDTLXLIDGQXMHXPHGXRXHGMXXXXXXXXXXXXX

SEQ ID NO: 9987 - protein, 148 aa, Zea mays
  Coding DNA Sequence Number=SeqID_3801
  Gene Ontology: Mol. function=chlorophyll binding; Cellular component =photosystem I reaction center; Biological process=photosynthesis
  Homolog annotation: Hit_ID=Q9SUI4; Match level="QueryCoverage=100%, HitCoverage=67%, E-value=5e-60, Identity=80%"; Hit description =Photosystem I reaction center subunit XI, chloroplast precursor
  Pfam annotation: Domain name=PsaL; Domain location=59-148; Score =126.5; E_value=7.5e-35; Accession=PF02605.5; Description=Photosystem I reaction centre subunit XI
  Subcellular localization annotation: CTP_CleavageSite=50; ConfidenceScore=5.82e-01
MATTASPMASQLRLSFCSATNVRRLAVPKGVSGAPFGVSPTKKTFSFTVRALQSDKPTFQVVQPINGDPFIGSLETPVTSSPLIAWYLSNLPAYRTAVNPLLRGVEVGLAHGFLLVGPFVKAGPLRNTAYAGSAGSLAAAGLVVILSM

SEQ ID NO: 9988 - protein, 179 aa, Zea mays
  Coding DNA Sequence Number=SeqID_3802
KDRVGLFRVVCLIRHAKHTRRFALNKAAHRRTQPTETATAYVRQLNVHAATSRKLHSHAPQVRLTRGGGVLSCSGDRRRRRRPPPPVLLSAGRRLRHVGREAHLLVLLRAAPALVRGSVAFAEYHDPEVRLQAAVEAVGDEDDARRHHGDRQQPQAAPRAAAAPPLHRDQRGRQPPTFR

SEQ ID NO: 9989 - protein, 125 aa, Zea mays
  misc_feature (26)..(26): Xaa can be any naturally occurring amino acid
  misc_feature (37)..(37): Xaa can be any naturally occurring amino acid
  misc_feature (53)..(53): Xaa can be any naturally occurring amino acid
  misc_feature (77)..(77): Xaa can be any naturally occurring amino acid
  misc_feature (104)..(104): Xaa can be any naturally occurring amino acid
  Coding DNA Sequence Number=SeqID_3804
  Gene Ontology: Mol. function=hydrolase activity, acting on glycosyl bonds; Cellular component=beta-galactosidase complex; Biological process=carbohydrate metabolic process
  Homolog annotation: Hit_ID=Q10RB4; Match level="QueryCoverage=94%, HitCoverage=13%, E-value=3e-38, Identity=66%"; Hit description=Beta -galactosidase 5 precursor
WHITRVDISSSENFLQRGRKPLSLSXHSAGHALHSLXVNGQLQSSAYGSREDXRIKYTGTANLRAGTNKIPMLTVAXGLPNVGVHYETWNTDVDRPVVLHKLDXKPRDLTWQTRAYQVSRVLLEL

SEQ ID NO: 9990 - protein, 185 aa, Zea mays
  Coding DNA Sequence Number=SeqID_3805
  Homolog annotation: Hit_ID=Q10MX5; Match level="QueryCoverage=41%, HitCoverage=21%, E-value=3e-27, Identity=80%"; Hit description =Expressed protein
  Pfam annotation: Domain name=DUF231; Domain location=13-122; Score= -24.6; E_value=1.2e-05; Accession=PF03005.6; Description=Arabidopsis proteins of unknown function
RVLSCLFFLFDQFVHRLLFRPFCAVCATVRCTSSKEWPNPVSKNCYGETAPATGLNSTGQASGQDQVIQAVLRGMKSPVRLLDITALSAMRKDAHPSAYSGDFSPAQRARHRPSGAPSRAQIRRRTPRPGAEIEERGEPASTGTKAAATKGSTTRGRGSVKKGKDRERAAAVAASGGQTEEGRGW

SEQ ID NO: 9991 - protein, 249 aa, Zea mays
  misc_feature (63)..(249): Xaa can be any naturally occurring amino acid
  Coding DNA Sequence Number=SeqID_3806
LLFLSCAHSLLVPIRRRSYSPDTGAWMPSERSLRQICQARAVMRARGYSHSLTGPASQGGLVXXXXXXXXXXXXXXXXXXXXXXXXXXXXXXXXXXXXXXXXXXXXXXXXXXXXXXXXXXXXXXXXXXXXXXXXXXXXXXXXXXXXXXXXXXXXXXXXXXXXXXXXXXXXXXXXXXXXXXXXXXXXXXXXXXXXXXXXXXXXXXXXXXXXXXXXXXXXXXXXXXXXXXXXXXXXXXXXXXXXXXXXXXX

SEQ ID NO: 9992 - protein, 82 aa, Zea mays
  Coding DNA Sequence Number=SeqID_3807
  Subcellular localization annotation: CTP_CleavageSite=42; ConfidenceScore=5.54e-01
DLHIATLLNFKTSQPWGKTKPKTKGGGASSTPRSNQHAGNPRGMMTMDNQRRRQPAERAIKLFGLGGGGPRAQQEIQEDLVE

SEQ ID NO: 9993 - protein, 185 aa, Zea mays
  misc_feature (173)..(173): Xaa can be any naturally occurring amino acid
  Coding DNA Sequence Number=SeqID_3809
  Gene Ontology: Mol. function=protein binding; Cellular component =endoplasmic reticulum; Biological process=vesicle-mediated transport
  Homolog annotation: Hit_ID=Q8GRK9; Match level="QueryCoverage=100%, HitCoverage=100%, E-value=2e-95, Identity=93%"; Hit description =Transport protein particle component Bet3-like protein
  Pfam annotation: Domain name=TRAPP_Bet3; Domain location=22-172; Score=220.1; E_value=5.1e-63; Accession=PF04051.6; Description =Transport protein particle (TRAPP) component, Bet3
MPPAPKSGDALFASVDRVNAELFTLTYGAIVRQLLTDLEEVEEVNKQLDQMGYDIGTRLVDEFLAKSNVSRCVDFKETADVIAKLGFKMFLGVTATVTNWDVEGTSCSIVLEDNPLVDFVELPDTCQGLQYCNLLSGVIRGALEMVSMKAEVTWVRDMLRGDDAYEMRVKLIXQVPEEYPYKDDD

SEQ ID NO: 9994 - protein, 113 aa, Zea mays
  Coding DNA Sequence Number=SeqID_3810
  Gene Ontology: Mol. function=nucleotide binding; Cellular component =cytoplasm; Biological process=response to stress
  Homolog annotation: Hit_ID=P22954; Match level="QueryCoverage=100%, HitCoverage=17%, E-value=4e-38, Identity=70%"; Hit description=Heat shock cognate 70 kDa protein 2
EHKKKVEAKNALENYAYNMRNTVKDEKIGGKLDPADKKKIEDAIEAAIQWLDNNQLGEADEFEDKMKELESICNPIIAKMYQGASGPDMGGGAMDDDAPTGGSGAGPKIEEVD

SEQ ID NO: 9995 - protein, 137 aa, Zea mays
  misc_feature (76)..(76): Xaa can be any naturally occurring amino acid
  misc_feature (82)..(82): Xaa can be any naturally occurring amino acid
  misc_feature (108)..(108): Xaa can be any naturally occurring amino acid
  Coding DNA Sequence Number=SeqID_3811
  Gene Ontology: Mol. function=RNA-directed DNA polymerase activity; Biological process=RNA-dependent DNA replication
  Homolog annotation: Hit_ID=Q5KQA7; Match level="QueryCoverage=65%, HitCoverage=16%, E-value=2e-15, Identity=40%"; Hit description =Putative uncharacterized protein OSJNOa0158O07.1
  Subcellular localization annotation: CTP_CleavageSite=33; ConfidenceScore=5.64e-01
FFFFFFFFFFFFFFFFFFFFFFFFFFFFFFFILARVFNCQLSSLYYGNIPWVNLIWNTHYTNGKVPYATNEREPFXWKDIIXLKDLYRGVAKCIVGDDTTLLFWFDIXNDKLLQQIYPIFFSYAKNKNISVSKFVSS

SEQ ID NO: 9996 - protein, 221 aa, Zea mays
  misc_feature (1)..(5): Xaa can be any naturally occurring amino acid
  misc_feature (69)..(72): Xaa can be any naturally occurring amino acid
  misc_feature (75)..(76): Xaa can be any naturally occurring amino acid
  misc_feature (91)..(92): Xaa can be any naturally occurring amino acid
  misc_feature (94)..(94): Xaa can be any naturally occurring amino acid
  misc_feature (99)..(99): Xaa can be any naturally occurring amino acid
  misc_feature (156)..(156): Xaa can be any naturally occurring amino acid
  misc_feature (175)..(175): Xaa can be any naturally occurring amino acid
  misc_feature (181)..(181): Xaa can be any naturally occurring amino acid
  misc_feature (205)..(221): Xaa can be any naturally occurring amino acid
  Coding DNA Sequence Number=SeqID_3812
XXXXXHRRTDWCTEHTTTGHCQAREAQPELEPGRRRAAVAVSLPPKEAAPSPAASDGSGGRGEGRWWGXXXXFCXXFFFFFFFFFFFFFFXXVXFFFFXFFFFYFFFFFFLFSFFFFFLFFVNALGSPLFYFFFFFVFFFLLSTFYFIFFFLFFFXFFFFFLFFFFFFFFFFILXVFFFFXFFFLFFFFFFLFIYFFVFFFFFYXXXXXXXXXXXXXXXXX

SEQ ID NO: 9997 - protein, 249 aa, Zea mays
  Coding DNA Sequence Number=SeqID_3814
  Gene Ontology: Mol. function=structural constituent of ribosome; Cellular component=ribonucleoprotein complex; Biological process =translation
  Homolog annotation: Hit_ID=Q9SIP7; Match level="QueryCoverage=99%, HitCoverage=98%, E-value=1e-114, Identity=86%"; Hit description=40S ribosomal protein S3-1
  Pfam annotation: Domain name=KH_2; Domain location=45-102; Score =40.2; E_value=7.2e-09; Accession=PF07650.7; Description=KH domain
  Pfam annotation: Domain name=Ribosomal_S3_C; Domain location=104-188; Score=107.1; E_value=5.2e-29; Accession=PF00189.10; Description =Ribosomal protein S3, C-terminal domain
  Pfam module annotation: Pfam domain module=KH_2::Ribosomal_S3_C; Domain location=45-102::104-188
MATQISKKRKFVADGVFYAELNEVLTRELAEDGYSGVEVRVTPMRTEIIIRATRTQNVLGEKGRRIRELTSLVQKRFRFPQDSVELYAEKVANRGLCAIAQAESLRYELLGGLAVRRACYGVLRFVMESGAKGCEVIVSGKLRAARAKSMKFKDGYMVSSGQPTKDYIDSAVRHVLLRQGVLGIKVKVMLDWDPKGINGPKTPLPDVVIIHAPKEEDVNSAPAQVAAPAALAPEAPLTAVDYPEMIPVA

SEQ ID NO: 9998 - protein, 129 aa, Zea mays
  misc_feature (22)..(22): Xaa can be any naturally occurring amino acid
  misc_feature (33)..(33): Xaa can be any naturally occurring amino acid
  misc_feature (73)..(73): Xaa can be any naturally occurring amino acid
  misc_feature (78)..(78): Xaa can be any naturally occurring amino acid
  misc_feature (88)..(88): Xaa can be any naturally occurring amino acid
  misc_feature (96)..(96): Xaa can be any naturally occurring amino acid
  Coding DNA Sequence Number=SeqID_3815
  Gene Ontology: Biological process=lipid transport
  Homolog annotation: Hit_ID=Q01595; Match level="QueryCoverage=82%, HitCoverage=82%, E-value=8e-21, Identity=47%"; Hit description =Cortical cell-delineating protein precursor
MLPQAAIFLALSLLFAATDEWXKPNCSVPVDAXPPAVPTPRWYIHEQCPIHVIKLKERAIVLCLIQDYLPHYXQCCPXVVGSGGSLTXLSLCTDIXVNDLSIHLDVPLILNFILKNCGRICPDDFTCPN

SEQ ID NO: 9999 - protein, 143 aa, Zea mays
  misc_feature (115)..(115): Xaa can be any naturally occurring amino acid
  Coding DNA Sequence Number=SeqID_3816
  Gene Ontology: Mol. function=structural constituent of ribosome; Cellular component=ribonucleoprotein complex; Biological process =translation
  Homolog annotation: Hit_ID=A2XIT5; Match level="QueryCoverage=51%, HitCoverage=35%, E-value=6e-16, Identity=59%"; Hit description=60S ribosomal protein L13
  Pfam annotation: Domain name=Ribosomal_L13e; Domain location=1-120; Score=-91.4; E_value=0.0045; Accession=PF01294.8; Description =Ribosomal protein L13e
  Subcellular localization annotation: CTP_CleavageSite=51; ConfidenceScore=5.21e-01
PKPGFHPTPAPIQSDGGRRLVRRRRRRRRGRGGQVAERRVAGVPVLPGPIDASRHGAVVIFARRRRHVNAGDSTAEELVTATQVQCDYMSFTRGEKPPAVGWNFTPPLKSFVGYXKFRLERMNKKHLGARQKKASEAEKEDKK

SEQ ID NO: 10000 - protein, 228 aa, Zea mays
  misc_feature (201)..(201): Xaa can be any naturally occurring amino acid
  misc_feature (208)..(208): Xaa can be any naturally occurring amino acid
  Coding DNA Sequence Number=SeqID_3817
  Gene Ontology: Mol. function=aspartic-type endopeptidase activity; Biological process=DNA integration
  Homolog annotation: Hit_ID=Q7XBC6; Match level="QueryCoverage=98%, HitCoverage=12%, E-value=2e-97, Identity=77%"; Hit description =Putative copia-type pol polyprotein
CRSTLEVEKCEKLSSELSTCHDIINNLRNENANLIAKVDSNVCNVSIPNLRDDNVDLLAKIEELNVSLASLRNENEKLIAKAKNFDVCNATISDLRSKNDILHAKVVELKSCKPSTSTVEHTSICTRCRDVNIDAIHDHMALIKQQNDHIAKLDAKITEHDLENEKFKFARSMLYSGKRPGIKDGIGFQKGGNVKLNAPQXNLLNLLXGKAPEPQDNEGYIINPDGYP

SEQ ID NO: 10001 - protein, 158 aa, Zea mays
  misc_feature (1)..(106): Xaa can be any naturally occurring amino acid
  Coding DNA Sequence Number=SeqID_3818
XXXXXXXXXXXXXXXXXXXXXXXXXXXXXXXXXXXXXXXXXXXXXXXXXXXXXXXXXXXXXXXXXXXXXXXXXXXXXXXXXXXXXXXXXXXXXXXXXXXXXXXXXXLVAFGAIYAQVKKVSRRISRSSRTSTSSRIRLVTSRSQLPVVMSQMMSVFLL

SEQ ID NO: 10002 - protein, 139 aa, Zea mays
  misc_feature (111)..(111): Xaa can be any naturally occurring amino acid
  Coding DNA Sequence Number=SeqID_3819
  Gene Ontology: Mol. function=actin binding; Cellular component =intracellular; Biological process=response to stress
  Homolog annotation: Hit_ID=Q2PK12; Match level="QueryCoverage=100%, HitCoverage=100%, E-value=9e-59, Identity=79%"; Hit description =Actin depolymerizing factor-like protein
  Pfam annotation: Domain name=Cofilin_ADF; Domain location=12-139; Score=157.2; E_value=4.4e-44; Accession=PF00241.10; Description =Cofilintropomyosin-type actin-bindin
MANAASGVAGHDDCMLKLWELKAKRTYRYIVYNIDETQKHVMVEKLGEPTEGYEDFSASLPANECRYAVYDFEYLTEGNLPKSRTFCIAWSPDTSRVRNKMIYAGSKDRIXRELDGIQIEPQATDPTEMGLDVLKSRAN

SEQ ID NO: 10003 - protein, 167 aa, Zea mays
  Coding DNA Sequence Number=SeqID_3820
  Subcellular localization annotation: CTP_CleavageSite=24; ConfidenceScore=5.54e-01
AGSLDGRVVFFFFFFFFFFFFFFSLSKGSYISTSLVTLSPTTMGFYFLQIYTNPAPQGGLPLHILIINAFYYHENGMETQILTQTGFWEEPFISRNFSPNHFTYYGRSSSLGRGRSHISLFTREQSSSAGGVPCTTPTAQGPSRRAHPPGPCLSVKHQSSGGCWWPS

SEQ ID NO: 10004 - protein, 88 aa, Zea mays
  Coding DNA Sequence Number=SeqID_3821
  Subcellular localization annotation: CTP_CleavageSite=40; ConfidenceScore=5.27e-01
KPFRETKMMQPTHLTHCARQPFPISLPVFPVSGAGSAYPRGRTLASPHGRLWGSNYVSEREPAPPGPASSEPQDLRATITDRRKREAH

SEQ ID NO: 10005 - protein, 138 aa, Zea mays
  Coding DNA Sequence Number=SeqID_3823
  Homolog annotation: Hit_ID=Q84JL6; Match level="QueryCoverage=100%, HitCoverage=56%, E-value=1e-33, Identity=61%"; Hit description =Putative uncharacterized protein At1g79160
MTADVSSLVRLLSRYNDDRTTVKDSAQQGSSVALMTRDLLGSGSCRGGGGGDQSLELDLDLKVPNGWEKRLDLKSGKVYLQQQNSTTSSHHRRAEQSNQTFRKFQDLNFPSKSPVRPLLSLFDDTSLELKLVPSSSSS

SEQ ID NO: 10006 - protein, 223 aa, Zea mays
  misc_feature (144)..(223): Xaa can be any naturally occurring amino acid
  Coding DNA Sequence Number=SeqID_3824
HYSRANEIVIYLDTDSSPVCVAGTTSELMLLSPWRDGESSAGFLAAGSAEIGLMLARLTPLPTTPRSVTVLPELPVVAAVDITEESNPLLEVAIWEEVKDAAFGITSVTLDAIAFTISSMSALGFASDRSSSFFSRSGNILVSXXXXXXXXXXXXXXXXXXXXXXXXXXXXXXXXXXXXXXXXXXXXXXXXXXXXXXXXXXXXXXXXXXXXXXXXXXXXXXXX

SEQ ID NO: 10007 - protein, 168 aa, Zea mays
  misc_feature (37)..(37): Xaa can be any naturally occurring amino acid
  misc_feature (48)..(48): Xaa can be any naturally occurring amino acid
  misc_feature (69)..(69): Xaa can be any naturally occurring amino acid
  misc_feature (75)..(75): Xaa can be any naturally occurring amino acid
  misc_feature (160)..(161): Xaa can be any naturally occurring amino acid
  Coding DNA Sequence Number=SeqID_3825
  Gene Ontology: Mol. function=glucose-1-phosphate adenylyltransferase activity; Cellular component=chloroplast; Biological process =glycogen biosynthetic process
  Homolog annotation: Hit_ID=P55241; Match level="QueryCoverage=90%, HitCoverage=30%, E-value=4e-61, Identity=75%"; Hit description =Glucose-1-phosphate adenylyltransferase large subunit 1, chloroplast precursor
DQFLACLDEPEYPYLAQWAFWGGRSLLDLLKSKYIQXHDFGSEILPEXLDHSVQACIFTGHWEDVGPIXSFFDAXLALAEHPSQFAFCDPGTPFFPAPRCSPPTQLGKCPLPYAFLSDGCLLRECNIEHSVIGVCSRVSSGCELKDSVMMGADVYEAEEXXSPPPPPG

SEQ ID NO: 10008 - protein, 95 aa, Zea mays
  misc_feature (77)..(77): Xaa can be any naturally occurring amino acid
  Coding DNA Sequence Number=SeqID_3826
  Gene Ontology: Mol. function=hydrolase activity, acting on carbon -nitrogen (but not peptide) bonds
  Homolog annotation: Hit_ID=A2WZ51; Match level="QueryCoverage=96%, HitCoverage=24%, E-value=3e-30, Identity=72%"; Hit description =Putative uncharacterized protein
FWYVVAYFGNLSSSYFIEHAQHLAPGAANCFGKHGIIASVQPDHLLDDANRAGSKIRVERAKRSSYTFQSLLDGGAXVAPGSDWFISDINPLQAI

SEQ ID NO: 10009 - protein, 168 aa, Zea mays
  misc_feature (63)..(63): Xaa can be any naturally occurring amino acid
  misc_feature (144)..(144): Xaa can be any naturally occurring amino acid
  misc_feature (152)..(152): Xaa can be any naturally occurring amino acid
  Coding DNA Sequence Number=SeqID_3827
  Gene Ontology: Cellular component=microtubule organizing center; Biological process=microtubule cytoskeleton organization and biogenesis
  Homolog annotation: Hit_ID=A7PKP5; Match level="QueryCoverage=86%, HitCoverage=11%, E-value=7e-24, Identity=43%"; Hit description =Chromosome chr7 scaffold_20, whole genome shotgun sequence
VSLGINCGGGGSTLQQYLHCHLSDISWRRFQHSLKNQVRGRLDLEYARMCYITDALDGCCLAXESKQVATIIKSMLQLALELRSCFQSGDTCDLSVNQLSNLQYLINFSQVDVIRTKFEDHIKDLYILHSKSSKYAVLGLSRFXGGFLNYNXEYHSTKVSKDMDSFCF

SEQ ID NO: 10010 - protein, 81 aa, Zea mays
  Coding DNA Sequence Number=SeqID_3828
NLSKVFYLSVIFYLSVIIDNTIYIIYIIKLSMEFEPELHLRFRFSISLAPISFIFHQHTIYTQHILFTDFFSWANSFYFYI

SEQ ID NO: 10011 - protein, 183 aa, Zea mays
  misc_feature (26)..(26): Xaa can be any naturally occurring amino acid
  misc_feature (44)..(44): Xaa can be any naturally occurring amino acid
  misc_feature (86)..(86): Xaa can be any naturally occurring amino acid
  misc_feature (107)..(107): Xaa can be any naturally occurring amino acid
  misc_feature (116)..(116): Xaa can be any naturally occurring amino acid
  misc_feature (155)..(155): Xaa can be any naturally occurring amino acid
  misc_feature (167)..(167): Xaa can be any naturally occurring amino acid
  Coding DNA Sequence Number=SeqID_3830
  Gene Ontology: Mol. function=nucleic acid binding; Cellular component= cytoplasm; Biological process=RNA processing
  Homolog annotation: Hit_ID=Q2QKB2; Match level="QueryCoverage=80%, HitCoverage=73%, E-value=6e-36, Identity=56%"; Hit description=MRNA transport factor
MAAAMNADVEVVDFDLYDDDLMDEDXGADPAPAPTSRLRSTIAXGDDAPRMTEGRGFREDPNSSAPRDSRFGAMGRGDLYSLGGPXPIRSIEGCNVMASGVHEEARXDDRPICCSXFGQVQTCIVNLDRHTGFVKGDALIEYEKIEEAHAATKEXDGAELYELRMSXVDWAFTTGPAKRRLTR

SEQ ID NO: 10012 - protein, 154 aa, Zea mays
  misc_feature (2)..(2): Xaa can be any naturally occurring amino acid
  misc_feature (4)..(4): Xaa can be any naturally occurring amino acid
  misc_feature (6)..(6): Xaa can be any naturally occurring amino acid
  misc_feature (10)..(10): Xaa can be any naturally occurring amino acid
  misc_feature (12)..(12): Xaa can be any naturally occurring amino acid
  misc_feature (15)..(16): Xaa can be any naturally occurring amino acid
  misc_feature (19)..(19): Xaa can be any naturally occurring amino acid
  misc_feature (21)..(22): Xaa can be any naturally occurring amino acid
  misc_feature (30)..(31): Xaa can be any naturally occurring amino acid
  misc_feature (39)..(39): Xaa can be any naturally occurring amino acid
  misc_feature (42)..(42): Xaa can be any naturally occurring amino acid
  misc_feature (55)..(55): Xaa can be any naturally occurring amino acid
  misc_feature (60)..(60): Xaa can be any naturally occurring amino acid
  misc_feature (64)..(64): Xaa can be any naturally occurring amino acid
  misc_feature (69)..(69): Xaa can be any naturally occurring amino acid
  misc_feature (75)..(75): Xaa can be any naturally occurring amino acid
  misc_feature (83)..(84): Xaa can be any naturally occurring amino acid
  misc_feature (87)..(87): Xaa can be any naturally occurring amino acid
  misc_feature (90)..(90): Xaa can be any naturally occurring amino acid
  misc_feature (92)..(93): Xaa can be any naturally occurring amino acid
  misc_feature (98)..(99): Xaa can be any naturally occurring amino acid
  misc_feature (104)..(105): Xaa can be any naturally occurring amino acid
  misc_feature (107)..(107): Xaa can be any naturally occurring amino acid
  misc_feature (109)..(109): Xaa can be any naturally occurring amino acid
  misc_feature (118)..(118): Xaa can be any naturally occurring amino acid
  misc_feature (127)..(128): Xaa can be any naturally occurring amino acid
  misc_feature (134)..(134): Xaa can be any naturally occurring amino acid
  Coding DNA Sequence Number=SeqID_3831
  Subcellular localization annotation: CTP_CleavageSite=48; ConfidenceScore=5.07e-01
SXTXSXAARXSXNPXXLPXLXXSRNCILSXXLALIAVPXRLXISWRVTAQLFPAXRGGAXWGFXAATTXCFSVLXVVAPAHVXXSAXAAXGXXVPQRXXPAFSXXRXPXPAPAPPRAXPPPLLLLPXXAAPPPXPPPAPPPPPPPPPPLPPPPP

SEQ ID NO: 10013 - protein, 74 aa, Zea mays
  Coding DNA Sequence Number=SeqID_3833
KKGWMKFWVNIILLFLIFVFLSLYHSLSLSGALWHGAEHLTGQLGYTFLFSGLFFNLACMFSSCLWGCPRKIFT

SEQ ID NO: 10014 - protein, 107 aa, Zea mays
  Coding DNA Sequence Number=SeqID_3834
  Gene Ontology: Mol. function=protein disulfide oxidoreductase activity; Cellular component=cytoplasm; Biological process=cell redox homeostasis
  Homolog annotation: Hit_ID=A1ECK0; Match level="QueryCoverage=100%, HitCoverage=100%, E-value=4e-44, Identity=79%"; Hit description =Putative glutaredoxin
  Pfam annotation: Domain name=Glutaredoxin; Domain location=15-77; Score=104.8; E_value=2.7e-28; Accession=PF00462.14; Description =Glutaredoxin
MALPKAKEIVSSNSVVVFSKTYCPFCVEVKQLFGNLGVTYKAIELDSEADGSEIQAALVEWTGQRTVPNVFIGGNHIGGCDSTTALHNQGKLVPLLTSAGALAKSTA

SEQ ID NO: 10015 - protein, 67 aa, Zea mays
  Coding DNA Sequence Number=SeqID_3835
  Subcellular localization annotation: CTP_CleavageSite=19; ConfidenceScore=5.06e-01
GLRPHRPHQAPTSRHRASRCAVRRRLTVYVDCNRCQAARLPALPLSCNSEWFGSFLDAYRMIFFIAL

SEQ ID NO: 10016 - protein, 86 aa, Zea mays
  misc_feature (11)..(11): Xaa can be any naturally occurring amino acid
  misc_feature (22)..(22): Xaa can be any naturally occurring amino acid
  misc_feature (32)..(32): Xaa can be any naturally occurring amino acid
  Coding DNA Sequence Number=SeqID_3837
  Gene Ontology: Mol. function=translation initiation factor activity; Cellular component=cytoplasm; Biological process=translational initiation
  Homolog annotation: Hit_ID=Q6L4U9; Match level="QueryCoverage=100%, HitCoverage=84%, E-value=6e-27, Identity=65%"; Hit description =Putative uncharacterized protein P0010D04.10
  Pfam annotation: Domain name=SUI1; Domain location=27-87; Score=38.2; E_value=2.9e-08; Accession=PF01253.13; Description=Translation initiation factor SUI1
MSNLDVQLPSXFDLFVEANAEXSGVAPGTKDXVHVRILERNDRKSLNTVQGLNMKKKFCCNGNVVQYPELGQVIQLQGDQHKDALT

SEQ ID NO: 10017 - protein, 203 aa, Zea mays
  misc_feature (7)..(7): Xaa can be any naturally occurring amino acid
  misc_feature (12)..(13): Xaa can be any naturally occurring amino acid
  misc_feature (15)..(17): Xaa can be any naturally occurring amino acid
  misc_feature (19)..(19): Xaa can be any naturally occurring amino acid
  misc_feature (24)..(26): Xaa can be any naturally occurring amino acid
  misc_feature (31)..(32): Xaa can be any naturally occurring amino acid
  misc_feature (34)..(35): Xaa can be any naturally occurring amino acid
  misc_feature (41)..(44): Xaa can be any naturally occurring amino acid
  misc_feature (50)..(50): Xaa can be any naturally occurring amino acid
  misc_feature (54)..(54): Xaa can be any naturally occurring amino acid
  misc_feature (141)..(141): Xaa can be any naturally occurring amino acid
  misc_feature (151)..(151): Xaa can be any naturally occurring amino acid
  misc_feature (153)..(153): Xaa can be any naturally occurring amino acid
  misc_feature (158)..(158): Xaa can be any naturally occurring amino acid
  misc_feature (163)..(163): Xaa can be any naturally occurring amino acid
  misc_feature (167)..(169): Xaa can be any naturally occurring amino acid
  misc_feature (173)..(173): Xaa can be any naturally occurring amino acid
  misc_feature (175)..(179): Xaa can be any naturally occurring amino acid
  misc_feature (182)..(183): Xaa can be any naturally occurring amino acid
  misc_feature (190)..(190): Xaa can be any naturally occurring amino acid
  Coding DNA Sequence Number=SeqID_3838
  Gene Ontology: Mol. function=oxidoreductase activity; Cellular component=anchored to membrane; Biological process=electron transport
  Homolog annotation: Hit_ID=Q9SVG4; Match level="QueryCoverage=98%, HitCoverage=35%, E-value=4e-52, Identity=59%"; Hit description =Reticuline oxidase-like protein precursor
ENRVHGXPAGVXXRXXXGXNGGGXXXVASWXXVXXVEDARXXXXNGRVLXRKAXGEDHFWAISGEEEEIGVVLGYKVKLVPVPSVVTVFRVEQYMDSGTVDMVHKWQSDGKKTDQNLFMRMLIQPVTRKKVKTVRASVVAXFLGRADEVDXLXSKEFXELGLXKPLXXXPSWXQXXXXXDNXXNDTQVDXKVFLDRNLDTRGG

SEQ ID NO: 10018 - protein, 184 aa, Zea mays
  misc_feature (141)..(141): Xaa can be any naturally occurring amino acid
  misc_feature (150)..(150): Xaa can be any naturally occurring amino acid
  Coding DNA Sequence Number=SeqID_3839
  Gene Ontology: Mol. function=hydrolase activity, acting on carbon -nitrogen (but not peptide) bonds; Biological process=nitrogen compound metabolic process
  Homolog annotation: Hit_ID=A3HZY5; Match level="QueryCoverage=66%, HitCoverage=34%, E-value=1e-42, Identity=64%"; Hit description =Peptidylarginine deiminase related enzyme
  Pfam annotation: Domain name=PAD_porph; Domain location=50-181; Score= -191.6; E_value=0.0033; Accession=PF04371.5; Description =Porphyromonas-type peptidyl-arginine deiminase
DRYHCNRSLQNTLALHARQAYRFLPARYQKIHRRRLIKLHHLKLPKEAGYYFPAEFEPHEATWLSWPHKEASWPGKIHTIYPNYSLFVKYLALSEKVRINVTDEAMKAFAVEQLQKAGVDMQQVEFFLHPTNDAWCRDHGXCFPRHPHAXQRKVIVDWTTCLGHKYLLMTGDVIPIIGNIHIRL

SEQ ID NO: 10019 - protein, 78 aa, Zea mays
  Coding DNA Sequence Number=SeqID_3840
TTLQGGRLVLPLTIRSTGLPLYLPYIYIYIYIYIYIYITVALESDLEEMSAQASWTPYFYLLLYSIESFEEAPKKKKK

SEQ ID NO: 10020 - protein, 124 aa, Zea mays
  Coding DNA Sequence Number=SeqID_3842
  Gene Ontology: Mol. function=structural constituent of ribosome; Cellular component=ribonucleoprotein complex; Biological process =translation
  Homolog annotation: Hit_ID=P49200; Match level="QueryCoverage=100%, HitCoverage=100%, E-value=7e-59, Identity=93%"; Hit description=40S ribosomal protein S20-1
  Pfam annotation: Domain name=Ribosomal_S10; Domain location=24-119; Score=186.6; E_value=6.3e-53; Accession=PF00338.12; Description =Ribosomal protein S10pS20e
MAYAPPPMKQGKTGFEETQEQIHKIRITLSSKNVKNLEKVCTDLVRGAKDKRLRVKGPVRMPTKVLKITTRKAPCGEGTNTWDRFELRVHKRVIDLFSSPDVVKQITSITIEPGVEVEVTIADS

SEQ ID NO: 10021 - protein, 44 aa, Zea mays
  Coding DNA Sequence Number=SeqID_3843
HSFVPNGEEDQVRSKGREKRVRREREREREPLLVVLSMLIPHCN

SEQ ID NO: 10022 - protein, 145 aa, Zea mays
  misc_feature (139)..(139): Xaa can be any naturally occurring amino acid
  Coding DNA Sequence Number=SeqID_3845
  Gene Ontology: Mol. function=threonine endopeptidase activity; Cellular component=proteasome core complex; Biological process =ubiquitin-dependent protein catabolic process
  Homolog annotation: Hit_ID=Q9LST4; Match level="QueryCoverage=82%, HitCoverage=46%, E-value=1e-57, Identity=89%"; Hit description=Beta 7 subunit of 20S proteasome
  Pfam annotation: Domain name=Proteasome; Domain location=34-145; Score=-53.6; E_value=0.023; Accession=PF00227.16; Description =Proteasome A-type and B-type
ERNQSRINPSRESMDASAAAAGGGDGTQRTLNPYVTGNSVIAMKYKDGVIMACDTGASYGSTLRYKSVERIKEVGKHSLIGGSGEFSDFQEILRYLDELTLNDHMWDDGNSLGPKEIHAYLTRVMYNRRNKFDPLWNSXVLGGVK

SEQ ID NO: 10023 - protein, 99 aa, Zea mays
  Coding DNA Sequence Number=SeqID_3846
AGPSRPAQPWPSTCTYSARHSSGCIGPPLPMAHHAHAEMTQLNPALQEPAGAASPHEVCHHTFRNACRGTCCAITSSAHMASPIHIELRILLTPSIVAP

SEQ ID NO: 10024 - protein, 86 aa, Zea mays
  Coding DNA Sequence Number=SeqID_3848
  Gene Ontology: Cellular component=integral to membrane; Biological process=protein transport
  Homolog annotation: Hit_ID=Q75IC7; Match level="QueryCoverage=70%, HitCoverage=19%, E-value=4e-20, Identity=75%"; Hit description =Secretory carrier-associated membrane protein 4
  Pfam annotation: Domain name=SCAMP; Domain location=4-82; Score= -65.4; E_value=0.044; Accession=PF04144.4; Description=SCAMP family
TPAPIKQHGDPTQVHIVFCVYVAGSSSILFVGKTFIGIFPAISLIGDIAIVGIFYFIGFALFCLEALLSVWVIQVKLLLPTASLLI

SEQ ID NO: 10025 - protein, 557 aa, Zea mays
  misc_feature (1)..(55): Xaa can be any naturally occurring amino acid
  misc_feature (557)..(557): Xaa can be any naturally occurring amino acid
  Coding DNA Sequence Number=SeqID_3849
XXXXXXXXXXXXXXXXXXXXXXXXXXXXXXXXXXXXXXXXXXXXXXXXXXXXXXXYKRDLQKVFARELEASRREKRLAKREEDLSQREALTTELRAKLNALDQTLEAQGVQQVEAIERMKKWQQELKDKANNIALAEENLKEKGTSLDRRETDLTRREKDLAFREEMLERRGMLLAEHELEAEEKERKLEERIRRFEAAQAAPDPSLASPTPRTRQSAAAIKPPSSRARFSVDVGAPPCPLPRRRGPPPSTRAVVAPLPPPRSPWASPPSRFAVDRPPPVPLSRPSPRQRIPRAFPNLAGHSGRPKDPQSPRALVSGELLRRGCGRRRLCWLEKGTEAGHPIPAVHPRSGGLVSINPGPIMAVRLESDGPGPLPPHPASLPFEPRLSAARVRAARLAPPVSRSRSLCPPGPTCQPAAPRCPPGPAYNEQSVFPEEVAEEVPDQQFGEGKGLRLFPEYLSVRTSSISDALPVLDSAAERLRRLDQILGARLEAEGNRLCRAMVDYLLTCFRSHDPAMSLAPVLDGPMAATEDVAWESVQDVVETVAARFQRDPVDAEX

SEQ ID NO: 10026 - protein, 241 aa, Zea mays
  misc_feature (241)..(241): Xaa can be any naturally occurring amino acid
  Coding DNA Sequence Number=SeqID_3850
  Gene Ontology: Mol. function=nucleoside-triphosphatase activity; Cellular component=integral to membrane; Biological process=transport
  Homolog annotation: Hit_ID=A3C627; Match level="QueryCoverage=85%, HitCoverage=32%, E-value=1e-88, Identity=79%"; Hit description =Putative uncharacterized protein
  Pfam annotation: Domain name=ABC_tran; Domain location=31-198; Score =65.9; E_value=1.3e-16; Accession=PF00005.17; Description=ABC transporter
  Subcellular localization annotation: CTP_CleavageSite=54; ConfidenceScore=5.66e-01
PPPTPSTSPRPSSTTSSSPSDHETGRRRPAGRRHNAFLSGNVLLNGRKAKLSFGAAAYVTQDDNLIGTLTVRETIGYSALLRLPDKMPREDKRALVEGTIVEMGLQDCADTVIGNWHLRGVSGGEKRRVSIALELLMRPRLLFLDEPTSGLDSSSAFFVTQTLRGLARDGGRTVVASVHQPSSDVFLLFDFLYLLSGGRTVYFGKASQACEFFAQAGFPCPPMRNPSDHFLRCINSDFDRX

SEQ ID NO: 10027 - protein, 208 aa, Zea mays
  misc_feature (172)..(172): Xaa can be any naturally occurring amino acid
  misc_feature (176)..(176): Xaa can be any naturally occurring amino acid
  misc_feature (180)..(181): Xaa can be any naturally occurring amino acid
  misc_feature (185)..(189): Xaa can be any naturally occurring amino acid
  misc_feature (191)..(191): Xaa can be any naturally occurring amino acid
  misc_feature (193)..(193): Xaa can be any naturally occurring amino acid
  misc_feature (195)..(195): Xaa can be any naturally occurring amino acid
  misc_feature (197)..(197): Xaa can be any naturally occurring amino acid
  misc_feature (200)..(202): Xaa can be any naturally occurring amino acid
  misc_feature (204)..(208): Xaa can be any naturally occurring amino acid
  Coding DNA Sequence Number=SeqID_3851
  Gene Ontology: Mol. function=calcium ion binding; Cellular component =cell outer membrane; Biological process=cell adhesion
  Homolog annotation: Hit_ID=A4JU50; Match level="QueryCoverage=89%, HitCoverage=68%, E-value=7e-19, Identity=33%"; Hit description=Outer membrane autotransporter barrel domain precursor
MNWVPGPPSSGGYEAVQGVATSATVLSGGVQLIYANGLASNTLVMSGGTLDVLSGGIASSTTVSQGGLEVVSAGGIDIGTRVRSGAVLVNSGSVSGAVISGGRETVSGGLDVGATILANGQVRVFGGTVSGATIAAGSQYINYGTAVDTTISGTGSYQYLGVSGGVGSQATXTILXHGGXXVGYXXXXXYXTXTXIXGGXXXDXXXXX

SEQ ID NO: 10028 - protein, 248 aa, Zea mays
  misc_feature (1)..(3): Xaa can be any naturally occurring amino acid
  misc_feature (204)..(248): Xaa can be any naturally occurring amino acid
  Coding DNA Sequence Number=SeqID_3852
  Subcellular localization annotation: CTP_CleavageSite=78; ConfidenceScore=5.04e-01
XXXTGFLLLLLSPPDSFSLPLNGWARYAGFLSRSRFFRLHDRALGKLHGERGRRTKGDVSAAGEGSPRIRRLPRFVFLATAGRPSSSPPFSRCPGLRRSLWRLLAADEHQPGSGPGRRYSGRASGRWQRRRVCPCAAAAVPACRRTALRPKGQGSARGPARALPAGRRICQTSPRRLLREHGALLTFLAAGTACTSRLRRRACXXXXXXXXXXXXXXXXXXXXXXXXXXXXXXXXXXXXXXXXXXXXX

SEQ ID NO: 10029 - protein, 81 aa, Zea mays
  Coding DNA Sequence Number=SeqID_3854
  Gene Ontology: Mol. function=transferase activity, transferring glycosyl groups; Biological process=carbohydrate metabolic process
  Homolog annotation: Hit_ID=Q575Z8; Match level="QueryCoverage=100%, HitCoverage=10%, E-value=5e-39, Identity=97%"; Hit description =Alkaline alpha galactosidase 1
MFNAGGAVEECDVISDAGSKAMALRVRGCGRFGAYCSREPARCLLDSAEVEFSYDIDTGLVSVDLPVPEQELYLWTLEIMI

SEQ ID NO: 10030 - protein, 81 aa, Zea mays; identical to SEQ ID NO: 10029
  Coding DNA Sequence Number=SeqID_3855
  Gene Ontology: Mol. function=transferase activity, transferring glycosyl groups; Biological process=carbohydrate metabolic process
  Homolog annotation: Hit_ID=Q575Z8; Match level="QueryCoverage=100%, HitCoverage=10%, E-value=5e-39, Identity=97%"; Hit description =Alkaline alpha galactosidase 1

SEQ ID NO: 10031 - protein, 161 aa, Zea mays
  misc_feature (6)..(6): Xaa can be any naturally occurring amino acid
  misc_feature (59)..(59): Xaa can be any naturally occurring amino acid
  misc_feature (73)..(73): Xaa can be any naturally occurring amino acid
  misc_feature (81)..(81): Xaa can be any naturally occurring amino acid
  misc_feature (112)..(112): Xaa can be any naturally occurring amino acid
  misc_feature (142)..(142): Xaa can be any naturally occurring amino acid
  misc_feature (146)..(146): Xaa can be any naturally occurring amino acid
  misc_feature (150)..(150): Xaa can be any naturally occurring amino acid
  Coding DNA Sequence Number=SeqID_3856
  Gene Ontology: Mol. function=calcium ion binding
  Homolog annotation: Hit_ID=Q9FEE2; Match level="QueryCoverage=92%, HitCoverage=28%, E-value=1e-40, Identity=61%"; Hit description =Tonneau 2
EMDSYXGGGMPILAQLTDMPPAFNQMYCRIASQKYIFFCDPHRRGRACIKKILLTTCLXDLMELHQESEEEVXHTEQAENXVLVVSDPAQAGYASSLTSAQRVGGLSLALVXHSAGSPCKRELTLDAGGPLSVTFSDTEFHXPVRXGKLXHPPPGSYSSQT

SEQ ID NO: 10032 - protein, 67 aa, Zea mays
  misc_feature (50)..(50): Xaa can be any naturally occurring amino acid
  Coding DNA Sequence Number=SeqID_3857
  Gene Ontology: Mol. function=structural constituent of ribosome; Cellular component=ribonucleoprotein complex; Biological process =translation
  Homolog annotation: Hit_ID=Q43291; Match level="QueryCoverage=92%, HitCoverage=37%, E-value=2e-10, Identity=56%"; Hit description=60S ribosomal protein L21-1
RPPPQKKFPLKKAKNVHLKAVPKKRGEVISPKRQPLGPKARLYGLGHPHXTVTPLPNNVVNDLKGGY

SEQ ID NO: 10033 - protein, 265 aa, Zea mays
  misc_feature (1)..(163): Xaa can be any naturally occurring amino acid
  Coding DNA Sequence Number=SeqID_3858
  Gene Ontology: Mol. function=oxidoreductase activity; Cellular component=cytosol; Biological process=auxin mediated signaling pathway
  Homolog annotation: Hit_ID=A2WSN5; Match level="QueryCoverage=27%, HitCoverage=19%, E-value=2e-29, Identity=88%"; Hit description =Putative uncharacterized protein
XXXXXXXXXXXXXXXXXXXXXXXXXXXXXXXXXXXXXXXXXXXXXXXXXXXXXXXXXXXXXXXXXXXXXXXXXXXXXXXXXXXXXXXXXXXXXXXXXXXXXXXXXXXXXXXXXXXXXXXXXXXXXXXXXXXXXXXXXXXXXXXXXXXXXXXXXXXXXXXXXXXYYQHRIDTTIPIEDTIGELKKLVGEGKVKYIGLSEASPDTIRRAHAVHPISAVIMEWSLKPRDIEPEIVGLCIREKNVAGGRQFTSFAHTPWKYADTPKKQS

SEQ ID NO: 10034 - protein, 112 aa, Zea mays
  Coding DNA Sequence Number=SeqID_3859
IIIFFLKTERKRGLIKGCSASDLPAAPGVPRVSLVTIRGTSMPRRRCIHAVCTIAQTLVCAHFSHTDTSQWSPKKKRRNPHKVCHVSICACQSYAQRQCYSSMYRTQYNECL

SEQ ID NO: 10035 - protein, 73 aa, Zea mays
  Coding DNA Sequence Number=SeqID_3861
  Homolog annotation: Hit_ID=Q6JAD1; Match level="QueryCoverage=57%, HitCoverage=19%, E-value=4e-14, Identity=90%"; Hit description =Putative lateral organ boundaries (LOB) domain family
  Pfam annotation: Domain name=DUF260; Domain location=4-72; Score=7.0; E_value=2e-06; Accession=PF03195.5; Description=Protein of unknown function DUF260
MCPAVCRRRQCTACLPPVCLRPWAAFSLGLGLHMEIPAQHRGDAVSSLVYEANARVRDPVYGCAGAVSSLQER

SEQ ID NO: 10036 - protein, 141 aa, Zea mays
  Coding DNA Sequence Number=SeqID_3862
  Gene Ontology: Mol. function=structural constituent of ribosome; Cellular component=intracellular; Biological process=translation
  Homolog annotation: Hit_ID=Q9FW34; Match level="QueryCoverage=59%, HitCoverage=61%, E-value=6e-39, Identity=91%"; Hit description =Putative ribosomal protein L28
  Pfam annotation: Domain name=Ribosomal_L28; Domain location=66-126; Score=115.7; E_value=1.4e-31; Accession=PF00830.9; Description =Ribosomal L28 family
  Subcellular localization annotation: CTP_CleavageSite=77; ConfidenceScore=5.81e-01
MVTATLLGSSFAMPAAARRASSSASTSLGFATSQLAGLSLSAGAATPTAVAFLPKRQQLQPIVARRVCPFTGKKTNRANKVSFSNHKTKKQQFVNLQYKKLWWEAGKRFVKLRLSTKALKTIEKHGLDAVARKAGIDLNKK

SEQ ID NO: 10037 - protein, 189 aa, Zea mays
  misc_feature (11)..(12): Xaa can be any naturally occurring amino acid
  misc_feature (17)..(18): Xaa can be any naturally occurring amino acid
  misc_feature (23)..(24): Xaa can be any naturally occurring amino acid
  misc_feature (29)..(29): Xaa can be any naturally occurring amino acid
  misc_feature (32)..(32): Xaa can be any naturally occurring amino acid
  misc_feature (34)..(35): Xaa can be any naturally occurring amino acid
  misc_feature (37)..(38): Xaa can be any naturally occurring amino acid
  misc_feature (44)..(44): Xaa can be any naturally occurring amino acid
  misc_feature (47)..(48): Xaa can be any naturally occurring amino acid
  misc_feature (50)..(50): Xaa can be any naturally occurring amino acid
  misc_feature (53)..(53): Xaa can be any naturally occurring amino acid
  misc_feature (56)..(57): Xaa can be any naturally occurring amino acid
  misc_feature (72)..(72): Xaa can be any naturally occurring amino acid
  misc_feature (76)..(76): Xaa can be any naturally occurring amino acid
  misc_feature (79)..(79): Xaa can be any naturally occurring amino acid
  misc_feature (83)..(83): Xaa can be any naturally occurring amino acid
  misc_feature (90)..(90): Xaa can be any naturally occurring amino acid
  misc_feature (97)..(97): Xaa can be any naturally occurring amino acid
  misc_feature (107)..(107): Xaa can be any naturally occurring amino acid
  misc_feature (114)..(114): Xaa can be any naturally occurring amino acid
  misc_feature (128)..(128): Xaa can be any naturally occurring amino acid
  misc_feature (149)..(149): Xaa can be any naturally occurring amino acid
  misc_feature (168)..(169): Xaa can be any naturally occurring amino acid
  misc_feature (173)..(173): Xaa can be any naturally occurring amino acid
  misc_feature (179)..(180): Xaa can be any naturally occurring amino acid
  Coding DNA Sequence Number=SeqID_3863
SSPGKGGARAXXQHESXXVNHAXXPRLLXSRXGXXQXXTLCWKXRVXXVXDHXCRXXAPCAEPGLRKLSARXARVXWLXPEAXARRFRPXSAALPPXLWRRFQLPRXVRGICCXIPTGPILQFLRVRXSPGLHFSCQQDTNFEGLYPPXAAFQFIRFQNLLEPVISMXXIYHXHLQLSXXVSFPAFTSF

SEQ ID NO: 10038 - protein, 226 aa, Zea mays
  Coding DNA Sequence Number=SeqID_3865
ARWAELEAAPGPSRCEQDMPGRAGGHGRARHGHVPWTGRGRGRARAQGGARARRAGAMAGEAGAGRARGGRAEAGHGRGGEGAGEREGGLGRARASGAGLAAPPWPATPRGGAGSLALGRGGREPGAIAGELEAGGARRGRDTRRAPSGGGRRREGRENRRGGGRGSPRAGIGGACGEWRGIWGEGRGRLGPKRGAGEASWDATPPAHSARRGGRGEGAWLVGPAG

SEQ ID NO: 10039 - protein, 143 aa, Zea mays
  misc_feature (48)..(48): Xaa can be any naturally occurring amino acid
  misc_feature (56)..(56): Xaa can be any naturally occurring amino acid
  Coding DNA Sequence Number=SeqID_3866
  Gene Ontology: Mol. function=translation initiation factor activity; Cellular component=nucleolus; Biological process=translational initiation
  Homolog annotation: Hit_ID=P80639; Match level="QueryCoverage=90%, HitCoverage=80%, E-value=1e-55, Identity=80%"; Hit description =Eukaryotic translation initiation factor 5A
  Pfam annotation: Domain name=eIF-5a; Domain location=81-140; Score =22.8; E_value=8.9e-05; Accession=PF01287.10; Description=Eukaryotic initiation factor 5A hypusine, DNA-binding OB fold
EHHFKSNDDAAAAETYPQQAGPARKNGFIAIENRPCKAVEVSTSQTGXYGHAKCHXVAIDIFNGKKLEDIVPSSLNCDIPHANRTEYHLIDISEDAFASLLTSDGNANGDLRLPTDETLAGQIKEGFESCQGSCCDCPVCPDG

SEQ ID NO: 10040 - protein, 73 aa, Zea mays
  misc_feature (30)..(73): Xaa can be any naturally occurring amino acid
  Coding DNA Sequence Number=SeqID_3867
TNLLHHLNASKLPALIISSSSTEPPCSSKXXXXXXXXXXXXXXXXXXXXXXXXXXXXXXXXXXXXXXXXXXXX

SEQ ID NO: 10041 - protein, 70 aa, Zea mays
  Coding DNA Sequence Number=SeqID_3869
NPRVTHGYPLTRWVRVWAKAQTTHGYMFFKLHCYFSRMTTLGLYGNGGSYTVRCASSQHTQAFAPFQFSP

SEQ ID NO: 10042 - protein, 144 aa, Zea mays
  Coding DNA Sequence Number=SeqID_3871
VCRTCRVLYGTRIEQIFRLSSLTGRMAFVFIQEIFLAATASFHRVFFAVRQQSEGQRAVYAMHLGRLDDVIPGVDGEAPELPVLLVEVPDVHGVVAGDLHDGEVGPRQAHRRLQLPDVHGVADAWADAWADACKNAPVKGTCSC

SEQ ID NO: 10043 - protein, 143 aa, Zea mays
  Coding DNA Sequence Number=SeqID_3872
  Gene Ontology: Mol. function=structural constituent of ribosome; Cellular component=ribonucleoprotein complex; Biological process =translation
  Homolog annotation: Hit_ID=Q9SGA6; Match level="QueryCoverage=99%, HitCoverage=99%, E-value=2e-76, Identity=97%"; Hit description=40S ribosomal protein S19-1
  Pfam annotation: Domain name=Ribosomal_S19e; Domain location=5-144; Score=321.9; E_value=1.2e-93; Accession=PF01090.9; Description =Ribosomal protein S19e
MANGKTVKDVSPHDFVKAYASHLKRSGKIELPSWTDIVKTGKLKELAPYDPDWYYIRAASMARKVYLRGGLGVGAFRRIYGGSKRNGSRPPHFCKSSGGIARHILQQLETMNIVEIDTKGGRRITSSGQRDLDQVAGRIAVEV

SEQ ID NO: 10044 - protein, 128 aa, Zea mays
  misc_feature (115)..(115): Xaa can be any naturally occurring amino acid
  Coding DNA Sequence Number=SeqID_3873
  Homolog annotation: Hit_ID=Q7SCN7; Match level="QueryCoverage=39%, HitCoverage=4%, E-value=1e-09, Identity=50%"; Hit description =Putative uncharacterized protein
  Subcellular localization annotation: CTP_CleavageSite=59; ConfidenceScore=5.49e-01
MMRYSLDSEPNSLQLDRKTSLASRQPSGCTCPAASSAKPRKRSCRRPRSIYSTLALAVLAAAPVAAVQVPFTNCLSDSYRNNDPTLLQWVPLYADAKFDTESSSHNLEVVVWGNXTGSRGGPGHKCYT

SEQ ID NO: 10045 - protein, 73 aa, Zea mays
  Coding DNA Sequence Number=SeqID_3874
  Gene Ontology: Mol. function=nucleotide binding; Cellular component =cytoplasm; Biological process=response to stress
  Homolog annotation: Hit_ID=Q3EC99; Match level="QueryCoverage=98%, HitCoverage=9%, E-value=7e-25, Identity=80%"; Hit description =Uncharacterized protein At1g79920.1
MSVVGFDFGNENCLVAVARHGAIGVLLHHESNREAPAILGFGDRQRFIGTAGAASTMPNPQNSISQIKRLTGP

SEQ ID NO: 10046 - protein, 124 aa, Zea mays
  Coding DNA Sequence Number=SeqID_3875
  Gene Ontology: Mol. function=small conjugating protein ligase activity; Cellular component=proteasome complex; Biological process =regulation of protein metabolic process
  Homolog annotation: Hit_ID=A2WWE6; Match level="QueryCoverage=95%, HitCoverage=60%, E-value=7e-46, Identity=72%"; Hit description =Ubiquitin carrier protein
  Pfam annotation: Domain name=UQ_con; Domain location=40-124; Score =62.9; E_value=1.1e-15; Accession=PF00179.16; Description=Ubiquitin -conjugating enzyme
LGTSRPAGPCSFPAPQAAHRPPSAPPIQIQIQGLVMASKRILKELKDLQKDPPTSCSAGPAGEDMFHWQATIMGPPDSPYAGGVFLVNIHFPPDYPFKPPKTKGFHPNMDSNGKICVDVLNEQR

SEQ ID NO: 10047 - protein, 124 aa, Zea mays
  Coding DNA Sequence Number=SeqID_3876
  Subcellular localization annotation: CTP_CleavageSite=45; ConfidenceScore=5.46e-01
AVVTTQSTREGSGTNPESRGLTRRRAKSRHRSAGDSAGSRPSAPSSSMAEPGTSVKFYCIGMVQDAATKRERWSVWCYFANSLSKCGREFVLRLCRELCCPPGYRKRTRWRSAEIACRYLPIAP

SEQ ID NO: 10048 - protein, 95 aa, Zea mays
  misc_feature (43)..(43): Xaa can be any naturally occurring amino acid
  misc_feature (61)..(61): Xaa can be any naturally occurring amino acid
  misc_feature (75)..(76): Xaa can be any naturally occurring amino acid
  Coding DNA Sequence Number=SeqID_3877
  Gene Ontology: Mol. function=tetracycline:hydrogen antiporter activity; Cellular component=integral to membrane; Biological process=response to antibiotic
  Homolog annotation: Hit_ID=O21999; Match level="QueryCoverage=60%, HitCoverage=37%, E-value=3e-17, Identity=71%"; Hit description=LacZ -alpha
HPLFCHGGQRSAHTSASPGGARIRPIGRITIHWPLYIDWENPXVTQLNRLAAQPPFASWRXSEEARTDRPSQQLXXLNGEWQVSVNIAKLLQLIF

SEQ ID NO: 10049 - protein, 99 aa, Zea mays
  Coding DNA Sequence Number=SeqID_3878
  Gene Ontology: Mol. function=structural constituent of ribosome; Cellular component=ribonucleoprotein complex; Biological process =translation
  Homolog annotation: Hit_ID=Q9XHS0; Match level="QueryCoverage=98%, HitCoverage=68%, E-value=2e-49, Identity=94%"; Hit description=40S ribosomal protein S12
  Pfam annotation: Domain name=Ribosomal_L7Ae; Domain location=1-79; Score=64.9; E_value=2.7e-16; Accession=PF01248.16; Description =Ribosomal protein L7AeL30eS12eGadd45 family
KGLREAAKAIEKHAAQLCVLAEDCDQPDYVKLVKALCAEHNVHLVTVPAAKTLGEWAGLCKIDSEGKARKVVGCSCVVVKDYGEESEGLNIVQEYVKSH

SEQ ID NO: 10050 - protein, 72 aa, Zea mays
  misc_feature (18)..(18): Xaa can be any naturally occurring amino acid
  misc_feature (60)..(60): Xaa can be any naturally occurring amino acid
  Coding DNA Sequence Number=SeqID_3879
  Subcellular localization annotation: CTP_CleavageSite=59; ConfidenceScore=5.10e-01
ILPILPRRGEPWPLGQTXFRDRLLVLQFSTKPSNQPTMRPSSRYPPQPALLALALALALXAAAPELRPLARR

SEQ ID NO: 10051 - protein, 211 aa, Zea mays
  misc_feature (123)..(123): Xaa can be any naturally occurring amino acid
  misc_feature (131)..(131): Xaa can be any naturally occurring amino acid
  misc_feature (164)..(164): Xaa can be any naturally occurring amino acid
  Coding DNA Sequence Number=SeqID_3881
  Gene Ontology: Mol. function=glycolipid transporter activity; Cellular component=cytoplasm; Biological process=glycolipid transport
  Homolog annotation: Hit_ID=Q10CF2; Match level="QueryCoverage=100%, HitCoverage=100%, E-value=1e-75, Identity=73%"; Hit description =Expressed protein
  Pfam annotation: Domain name=GLTP; Domain location=31-209; Score =158.7; E_value=1.6e-44; Accession=PF08718.1; Description=Glycolipid transfer protein (GLTP)
MGSNEADKPLRRIGASFEQLAAVAKQQQPQQPAMAAGDFSRACSNVSVLFGCLGIAFKFAPAGYVAKVDDLLEASKSISTLPSMVERDIQTGTVRQPGSHTRNLLRVKRGIDMVKVLFEQILXVTEGNSLXRDAASVAYAQVFAPHHGWAIRKAVAAGMYALPXSKSQLLKKLNEDEESAKVQMQNFVRSSAPVICYVDDLFTSRNLGIDW

SEQ ID NO: 10052 - protein, 150 aa, Zea mays
  misc_feature (11)..(11): Xaa can be any naturally occurring amino acid
  misc_feature (81)..(81): Xaa can be any naturally occurring amino acid
  misc_feature (101)..(101): Xaa can be any naturally occurring amino acid
  Coding DNA Sequence Number=SeqID_3882
  Gene Ontology: Mol. function=structural constituent of ribosome; Cellular component=ribonucleoprotein complex; Biological process =translation
  Homolog annotation: Hit_ID=Q4GXJ8; Match level="QueryCoverage=82%, HitCoverage=62%, E-value=9e-65, Identity=98%"; Hit description =Ribosomal protein L11e
  Pfam annotation: Domain name=Ribosomal_L5; Domain location=23-76; Score=85.7; E_value=1.5e-22; Accession=PF00281.9; Description =Ribosomal protein L5
  Pfam annotation: Domain name=Ribosomal_L5_C; Domain location=80-150; Score=109.0; E_value=1.4e-29; Accession=PF00673.11; Description =ribosomal L5P family C-terminus
  Pfam module annotation: Pfam domain module=Ribosomal_L5::Ribosomal_L5_ C; Domain location=23-76::80-150
MAPVAKKPAVXKEKKDVKDKSKNPMKDLHIRKLCLNICVGESGDRLTRAAKVLEQLTGQQPVFSKARYTVRSFGIRRNEKXAVHCTVRGAKAEEILERGLXVREYELRRDNFSASGNFGFGIQEHIDLGIKYDPSIGIYGLDFYVVLGRP

SEQ ID NO: 10053 - protein, 118 aa, Zea mays
  misc_feature (1)..(1): Xaa can be any naturally occurring amino acid
  Coding DNA Sequence Number=SeqID_3883
  Gene Ontology: Mol. function=microtubule motor activity; Cellular component=microtubule associated complex; Biological process =microtubule-based movement
  Homolog annotation: Hit_ID=Q93XF2; Match level="QueryCoverage=84%, HitCoverage=24%, E-value=4e-35, Identity=81%"; Hit description =Kinesin heavy chain
XAKSPSSSTDINDSSQQIRRLSGAAGSSEAECEDNMSDDGCSVAGTECSVGGASEATAERMQKAPSRIARLFPPKNGQPANSKPKPRESALKPPGRPTSTGGSQATGGGSLVKPPKRR

SEQ ID NO: 10054 - protein, 146 aa, Zea mays
  Coding DNA Sequence Number=SeqID_3884
  Gene Ontology: Mol. function=carbon-sulfur lyase activity; Biological process=metabolic process
  Homolog annotation: Hit_ID=Q0V7E1; Match level="QueryCoverage=93%, HitCoverage=100%, E-value=4e-52, Identity=68%"; Hit description =Putative uncharacterized protein
  Pfam annotation: Domain name=GFA; Domain location=27-127; Score=15.4; E_value=0.00049; Accession=PF00673.11; Description=Glutathione -dependent formaldehyde-acti
MAAFQGECHCGNTKWTAKLEQDQGPDILCHCNTCKQLSGGTYTLNQIIPKANLKITQGEDLGKYTYKGDSGKGVPCFSCKNCTAHVYHAQEAMGDDKIVLRTGLLEAEFKPAAEIYCKDRLGWEKEVAHSYETMPASPRMGCDIPY

SEQ ID NO: 10055 - protein, 190 aa, Zea mays
  misc_feature (1)..(120): Xaa can be any naturally occurring amino acid
  Coding DNA Sequence Number=SeqID_3885
XXXXXXXXXXXXXXXXXXXXXXXXXXXXXXXXXXXXXXXXXXXXXXXXXXXXXXXXXXXXXXXXXXXXXXXXXXXXXXXXXXXXXXXXXXXXXXXXXXXXXXXXXXXXXXXXXXXXXXXXVAEPPKLLGPHAHVLVSKTSDGYACAPDNLTGSVRVSRGPRINHLQPELDNTRLVFVRRCPLDDHPCPST

SEQ ID NO: 10056 - protein, 251 aa, Zea mays
  misc_feature (146)..(146): Xaa can be any naturally occurring amino acid
  misc_feature (170)..(170): Xaa can be any naturally occurring amino acid
  misc_feature (201)..(201): Xaa can be any naturally occurring amino acid
  Coding DNA Sequence Number=SeqID_3887
  Gene Ontology: Mol. function=binding
  Homolog annotation: Hit_ID=Q8H613; Match level="QueryCoverage=84%, HitCoverage=36%, E-value=5e-74, Identity=70%"; Hit description =Nodulin-like protein
  Pfam annotation: Domain name=Nodulin-like; Domain location=35-251; Score=230.9; E_value=2.9e-66; Accession=PF06813.4; Description =Nodulin-like
  Subcellular localization annotation: CTP_CleavageSite=63; ConfidenceScore=5.69e-01
TLGLSGPTFPAPFPTASPPPTRPRAHGPQPKPANPSSTFALYSHALKVALGADQSRLALLGVACDVGENLGLLPRVLGNRLHPALLLLIGAGACLLGYGTAWLLVSGVAPALPYWLIWFVRYCLATNGGAWLATAVLVTNMRNFPXLSRGAVAGILKGFSGLSAAVYTLXYYTRRVLRDSTSIKPLLLSLALGIPAVCLLXMYFVQPCEPSLVETNAEQVHFMFAQVASVLLGVYLVGATILDHVVALMTL

SEQ ID NO: 10057 - protein, 125 aa, Zea mays
  Coding DNA Sequence Number=SeqID_3888
  Pfam annotation: Domain name=DUF948; Domain location=4-75; Score= -25.4; E_value=0.059; Accession=PF06103.2; Description=Bacterial protein of unknown function (DUF948)
MAKISFVILVVALIVFLRVSEAQSSKDRDEKKIENDLHEAKDLIEEDLKEKEKNIKSLEDEVNMLTKSEKMLNDIGEAHKKGESLEPYGKKLKKFNRKVKQAPKSKRGSVVQNILKDLGLNGGRN

SEQ ID NO: 10058 - protein, 120 aa, Zea mays
  misc_feature (54)..(120): Xaa can be any naturally occurring amino acid
  Coding DNA Sequence Number=SeqID_3889
SQGTSSGDNLRESSPVAEDELPNISSDSYHLFLSTFQLMNDLRPAEPMPASPTXXXXXXXXXXXXXXXXXXXXXXXXXXXXXXXXXXXXXXXXXXXXXXXXXXXXXXXXXXXXXXXXXXX

SEQ ID NO: 10059 - protein, 76 aa, Zea mays
  Coding DNA Sequence Number=SeqID_3891
FDLRAQVEMSQDGGGCFANTQSLIDEIQEVWWEGLNAKTADNVGFRLDGLDGLIACLHKITDCTGYGAEEESMVGE

SEQ ID NO: 10060 - protein, 107 aa, Zea mays
  Coding DNA Sequence Number=SeqID_3893
LELACNKPSQDTSLTWDKTKTSRERVDEPQVFCLSWLEPGHISPRHTKSCWKEEDAQGHAHQACRWGVCDAKAEDAGRTDHNCQGHLSDPPADPVPQKAHPPSFADA

SEQ ID NO: 10061 - protein, 184 aa, Zea mays
  misc_feature (1)..(117): Xaa can be any naturally occurring amino acid
  Coding DNA Sequence Number=SeqID_3895
XXXXXXXXXXXXXXXXXXXXXXXXXXXXXXXXXXXXXXXXXXXXXXXXXXXXXXXXXXXXXXXXXXXXXXXXXXXXXXXXXXXXXXXXXXXXXXXXXXXXXXXXXXXXXXXXXXXXXAKLVIVHHDMLSSYILFMRGHLMVFAFFQLFFVLIFVLFFLSYIVIILVKLVDLVLFRHLLQCTLIL

SEQ ID NO: 10062 - protein, 163 aa, Zea mays
  misc_feature (1)..(70): Xaa can be any naturally occurring amino acid
  Coding DNA Sequence Number=SeqID_3897
XXXXXXXXXXXXXXXXXXXXXXXXXXXXXXXXXXXXXXXXXXXXXXXXXXXXXXXXXXXXXXXXXXXXXXICRISYKVSTLSATIPLSIQRFRRRITTAHHSSWTEATALNAMFLLKRQVRCLHGTGRELLSYCRTVLADTENTSDTSDLLARTLQRTRASDE

SEQ ID NO: 10063 - protein, 168 aa, Zea mays
  Coding DNA Sequence Number=SeqID_3898
  Gene Ontology: Mol. function=transporter activity; Cellular component= cell outer membrane; Biological process=transport
  Homolog annotation: Hit_ID=A4XEM4; Match level="QueryCoverage=98%, HitCoverage=22%, E-value=4e-44, Identity=56%"; Hit description=TonB -dependent receptor precursor
  Pfam annotation: Domain name=TonB_dep_Rec; Domain location=25-168; Score=24.0; E_value=0.00057; Accession=PF00593.14; Description=TonB dependent receptor
PTLNNVGGVESYGAEVSAFYRLTPAFSALASYSYNHATYQQTVRDGSGNLLAEKGRYVVDTPQNMVKGELVYDDSRVFGRVGADYMSKRYFTYLNDQSVDGRVLVDASIGYRFPKEWGGFSIEGSVTNLTDKRYISTIGTNGFTASGDNQTLLAGAPRQWFVTLKKGF

SEQ ID NO: 10064 - protein, 90 aa, Zea mays
  misc_feature (48)..(48): Xaa can be any naturally occurring amino acid
  Coding DNA Sequence Number=SeqID_3899
  Homolog annotation: Hit_ID=A7QAV6; Match level="QueryCoverage=38%, HitCoverage=27%, E-value=6e-07, Identity=74%"; Hit description =Chromosome chr5 scaffold_72, whole genome shotgun sequence
ILNKCVAVLSRRTSMPAWSAAAAAGHHAWAADIAGAASKRRPPPPAAXAEAKKDPNVSGVQAKVLASRKRKEAMKEAVAKLREKGKPVDK

SEQ ID NO: 10065 - protein, 170 aa, Zea mays
  Coding DNA Sequence Number=SeqID_3900
TLIHDGRPELLLLVVVQDEEHEPDEEEDPEKPPDPPRQMPPRRAQCPPPRIAAPVPRSTKHLRTSPTQELNQSPASPPTRQTLLHGRREPNPQRRCLCRGSGVRMDQEAITIQRTHPPEAAGSSPATGDPTAASRRAGQRRQERRRRKGCRIREGERGMRGRRGVQNSER

SEQ ID NO: 10066 - protein, 216 aa, Zea mays
  misc_feature (42)..(42): Xaa can be any naturally occurring amino acid
  misc_feature (155)..(156): Xaa can be any naturally occurring amino acid
  misc_feature (167)..(167): Xaa can be any naturally occurring amino acid
  misc_feature (169)..(170): Xaa can be any naturally occurring amino acid
  misc_feature (172)..(172): Xaa can be any naturally occurring amino acid
  misc_feature (176)..(177): Xaa can be any naturally occurring amino acid
  misc_feature (179)..(179): Xaa can be any naturally occurring amino acid
  misc_feature (181)..(181): Xaa can be any naturally occurring amino acid
  misc_feature (187)..(187): Xaa can be any naturally occurring amino acid
  misc_feature (191)..(191): Xaa can be any naturally occurring amino acid
  Coding DNA Sequence Number=SeqID_3902
  Gene Ontology: Mol. function=exoribonuclease II activity; Cellular component=ribosome; Biological process=RNA metabolic process
  Homolog annotation: Hit_ID=A2SHA2; Match level="QueryCoverage=87%, HitCoverage=26%, E-value=4e-70, Identity=72%"; Hit description =Exoribonuclease II
LGTGPPLERKKRPIIGRLLLESGVWLVAPEDRRMGQDILIPXNGIANATAGQVVAVELTEPPSLYSQPVGRVVEVLGEIDDPGMEIEIAVRKYDVPHRFSPDTLAQSAKLPEKLRAADLKHRIDLRDVPLVTIDGEDARDFDDAVYCEPFKQGRXXKAVEGWRLLVXFXXVXHYVXXGXRXTPPYNXATWXFPRRVSYLKSVHGLNLQDYIVLNWF

SEQ ID NO: 10067 - protein, 84 aa, Zea mays
  Coding DNA Sequence Number=SeqID_3903
  Subcellular localization annotation: CTP_CleavageSite=56; ConfidenceScore=5.18e-01
VDQGGKYFLPRVSHGKPPFGLVPRGAPINWAPAGGGNQSMPCGAPVKKPWVFNFTSSPHVPGPFVFLGSLGGPFTHRAVLLDMG

SEQ ID NO: 10068 - protein, 180 aa, Zea mays
  misc_feature (81)..(81): Xaa can be any naturally occurring amino acid
  misc_feature (108)..(108): Xaa can be any naturally occurring amino acid
  misc_feature (123)..(123): Xaa can be any naturally occurring amino acid
  misc_feature (132)..(133): Xaa can be any naturally occurring amino acid
  misc_feature (148)..(148): Xaa can be any naturally occurring amino acid
  misc_feature (153)..(153): Xaa can be any naturally occurring amino acid
  misc_feature (155)..(158): Xaa can be any naturally occurring amino acid
  misc_feature (160)..(160): Xaa can be any naturally occurring amino acid
  misc_feature (162)..(180): Xaa can be any naturally occurring amino acid
  Coding DNA Sequence Number=SeqID_3905
GRRLIRMCTAYHNKRTLPAHQETCAHYRFNSYYVVFPFHPQDPFFWYLSQTISDNIFSLTTGFFVYLAFILCYLRRTGGKXILVPFVSPPTGFGLFFRPFSLRGHASXYHYWLMLFSFLISAXNFFLFGLLXXTSMFSCLRSCYGAGXVGLEXSXXXXKXYXXXXXXXXXXXXXXXXXXX

SEQ ID NO: 10069 - protein, 79 aa, Zea mays
  Coding DNA Sequence Number=SeqID_3907
EATIVSCYLRYHMSLPYPAVMSLRSLIYRNKCRRSEGVCSCRRICLALEKLGENKDRREGGGRGLLDYVLFKILQLTNN

SEQ ID NO: 10070 - protein, 129 aa, Zea mays
  misc_feature (127)..(127): Xaa can be any naturally occurring amino acid
  Coding DNA Sequence Number=SeqID_3909
  Gene Ontology: Mol. function=structural constituent of ribosome; Cellular component=intracellular; Biological process=translation
  Homolog annotation: Hit_ID=A9PGV4; Match level="QueryCoverage=58%, HitCoverage=42%, E-value=1e-26, Identity=80%"; Hit description =Putative uncharacterized protein
  Pfam annotation: Domain name=Ribosomal_S21; Domain location=83-129; Score=16.2; E_value=0.00065; Accession=PF01165.10; Description =Ribosomal protein S21
  Subcellular localization annotation: CTP_CleavageSite=53; ConfidenceScore=5.73e-01
MAASFSLTSFISFISPFKSQTKPTPPPNLTLPAPASPHRRRNDRAADEAPPSNASLSSELASVICPSLAYSNTLFFSSSGYNVQVFVEDNESEERLVNRFRREVMRTGVIQECKRRRYFENKQDEKXRR

SEQ ID NO: 10071 - protein, 156 aa, Zea mays
  misc_feature (112)..(114): Xaa can be any naturally occurring amino acid
  misc_feature (116)..(116): Xaa can be any naturally occurring amino acid
  misc_feature (124)..(125): Xaa can be any naturally occurring amino acid
  Coding DNA Sequence Number=SeqID_3910
  Subcellular localization annotation: CTP_CleavageSite=4; ConfidenceScore=5.25e-01
PPCQPMQRPSARLFDRVRLPPLPCTVPLPPSQRHTHFLFSPIQCHYTTILLRASGSARTRTTPPLVPASNSPPRARIAIRDLPRGYRGGGARACSVIRESAPRWPGVEAAVXXXIXTTLRRAPXXTSSLGAPTGSPGLPRGAGAGLLGVRRFLGLL

SEQ ID NO: 10072 - protein, 131 aa, Zea mays
  Coding DNA Sequence Number=SeqID_3912
  Gene Ontology: Mol. function=structural constituent of ribosome; Cellular component=cytosolic small ribosomal subunit; Biological process=negative regulation of transcription, DNA-dependent
  Homolog annotation: Hit_ID=Q9SIH0; Match level="QueryCoverage=100%, HitCoverage=87%, E-value=2e-55, Identity=85%"; Hit description=40S ribosomal protein S14-1
  Pfam annotation: Domain name=Ribosomal_S11; Domain location=28-131; Score=186.4; E_value=7.1e-53; Accession=PF00411.9; Description =Ribosomal protein S11
MSRRKTREPKEETVTLGPAVRDGEQVFGVVHIFASFNDTFIHVTDLSGRETLVRITGGMKVKADRDESSPYAAMLAAQDVAQRCKELGITAMHVKLRATGGNKTKTPGPGAQSALRALARSGMKIGRIEDV

SEQ ID NO: 10073 - protein, 89 aa, Zea mays
  Coding DNA Sequence Number=SeqID_3913
KPPTLGFPFQFWGLDSELGVFGHTHLKGTRLAEPGELPPHNCCPWGPPLGRRNPQSHPTHSATRIWATPSSIFILNVTHFVSYDEFVLN

SEQ ID NO: 10074 - protein, 196 aa, Zea mays
  misc_feature (51)..(51): Xaa can be any naturally occurring amino acid
  misc_feature (96)..(96): Xaa can be any naturally occurring amino acid
  Coding DNA Sequence Number=SeqID_3914
  Homolog annotation: Hit_ID=Q8GRM2; Match level="QueryCoverage=94%, HitCoverage=13%, E-value=3e-75, Identity=78%"; Hit description=COP1 -interacting protein 7 (CIP7)-like
PCNGGGGQLPPYMNDNTAADSFAASPSGSPPWNSHSLDEITDADVSRMRKXWGSAQMPFVGVSASQQPRKDVSKGLKNLWKFGWKTRGGDGLVNDXWVSASTASVCVGDMEDGRDLVVGSSVVFRTARMGYLASCDGFAGNEVFSEQEQSLRSSIPNPPANFRLREDQLTGSSLKAPRSFFSLSTFRSKGGDARLR

SEQ ID NO: 10075 - protein, 94 aa, Zea mays
  misc_feature (56)..(56): Xaa can be any naturally occurring amino acid
  Coding DNA Sequence Number=SeqID_3915
HLQDSIETTDTASVSKDCVSLDIFAISCLAVNIHKEVTTCCRMLSQGLDFIAYQKXWSGIRRANAKTICSLLFHNKDRRLRRKDTRTPMVGSNS

SEQ ID NO: 10076 - protein, 70 aa, Zea mays
  misc_feature (51)..(51): Xaa can be any naturally occurring amino acid
  Coding DNA Sequence Number=SeqID_3917
  Subcellular localization annotation: CTP_CleavageSite=27; ConfidenceScore=5.29e-01
DFFSHPALTILSLIFPSRRRTFDFSSCASQELPRMPLSTPAFQPLTAGSIXLCALGVLHSSVLCSFFRQP

SEQ ID NO: 10077 - protein, 57 aa, Zea mays
  Coding DNA Sequence Number=SeqID_3919
  Gene Ontology: Mol. function=phosphotransferase activity, phosphate group as acceptor; Cellular component=chloroplast
  Homolog annotation: Hit_ID=Q195N6; Match level="QueryCoverage=82%, HitCoverage=11%, E-value=4e-16, Identity=89%"; Hit description =Pyruvate, phosphate dikinase regulatory protein, chloroplast precursor
MKAMVLDTKLNQIFAQNPSWPVKAVTGKAIEETAAVILGILHDRKQKCSMPRRSKLY

SEQ ID NO: 10078 - protein, 87 aa, Zea mays
  Coding DNA Sequence Number=SeqID_3920
  Subcellular localization annotation: CTP_CleavageSite=43; ConfidenceScore=5.41e-01
SSRGTARKRLSSSSSPTEHQTKHPQHDERRGGSPVATKFSQRRSEMRSQALFFLTIALLTVLARSSNRHHHHHLSHVQSRGMQEAAS

SEQ ID NO: 10079 - protein, 175 aa, Zea mays
  Coding DNA Sequence Number=SeqID_3922
  Gene Ontology: Mol. function=transferase activity; Cellular component= chloroplast; Biological process=amino acid biosynthetic process
  Homolog annotation: Hit_ID=A3RL74; Match level="QueryCoverage=72%, HitCoverage=21%, E-value=3e-45, Identity=74%"; Hit description =Aspartokinase
  Subcellular localization annotation: CTP_CleavageSite=54; ConfidenceScore=5.73e-01
GVHSRTVLPSHDSSARDSPPRARSPRRRPRGRSRAQPPRPQITRLPLPRGLAVRCQTGSTAAPFLKTEEAPAAAAGARNAQAGFTFIMKFGGSSLTSAERMQEVAGLILSFLDETPVVILSAMGKTTNNLRLAGEKAVSCGGGGASEIPELTVIRELHLRTIDELGLDKSIVSGM

SEQ ID NO: 10080 - protein, 286 aa, Zea mays
  Coding DNA Sequence Number=SeqID_3923
  Gene Ontology: Mol. function=manganese ion binding; Cellular component=cellular_component; Biological process=defense response
  Homolog annotation: Hit_ID=Q42372; Match level="QueryCoverage=100%, HitCoverage=100%, E-value=1e-145, Identity=91%"; Hit description =Bark agglutinin I polypeptide B precursor
  Pfam annotation: Domain name=Lectin_legB; Domain location=33-264; Score=317.9; E_value=1.8e-92; Accession=PF00139.10; Description =Legume lectin domain
  Subcellular localization annotation: CTP_CleavageSite=75; ConfidenceScore=5.53e-01
MASYKFKTQNSFLLLLSISFFFLLLLNKVNSTGSLSFSFPKFKHSQPDLIFQSDALVTSKGVLQLTTVNDGRPVYDSIGRVLYAAPFQIWDSTTGNVASFVTSFSFIIKAPNEGKTADGLVFFLAPVGSTQPLKGGRLLGLFKDESYNKSNQIVAVEFDTFRNVAWDPNGIHMGIDVNSIQSVRTVRWDWANGEVANVFISYEASTKSLTASLVYPSLEKSFILSAIVDVKDVLPEWVRVGFSATTGLAAGYVQTNDVLSWSFESNLPGGNSAASVKNAGLSTYAA

SEQ ID NO: 10081 - protein, 97 aa, Zea mays
  Coding DNA Sequence Number=SeqID_3924
HYKGKVRRQYRIIGSVGYKLTRANGHRTWLHIEQSFWRYSLVHHRLVLVGLGPLLLWSMLLHFPHVGAALLAEEGTEEGGVHVVDHVLLHPPAAAES

SEQ ID NO: 10082 - protein, 290 aa, Zea mays
  misc_feature (41)..(41): Xaa can be any naturally occurring amino acid
  misc_feature (180)..(180): Xaa can be any naturally occurring amino acid
  misc_feature (208)..(209): Xaa can be any naturally occurring amino acid
  misc_feature (268)..(268): Xaa can be any naturally occurring amino acid
  misc_feature (275)..(276): Xaa can be any naturally occurring amino acid
  misc_feature (281)..(284): Xaa can be any naturally occurring amino acid
  Coding DNA Sequence Number=SeqID_3925
  Gene Ontology: Mol. function=transporter activity; Cellular component= integral to membrane; Biological process=response to stress
  Homolog annotation: Hit_ID=P25794; Match level="QueryCoverage=100%, HitCoverage=100%, E-value=1e-148, Identity=90%"; Hit description =Probable aquaporin PIP-type 7a
  Pfam annotation: Domain name=MIP; Domain location=48-278; Score =412.0; E_value=8.6e-121; Accession=PF00230.10; Description=Major intrinsic protein
MEGKEQDVSLGANKFPERQPLGIAAQSQDEPKDYQEPPPAXPLFEPSELTSWSFYRAGIAEFVATFLFLYITILTVMGVVRADSKCKTVGIQGIAWSFGGMIFALVYCTAGISGGHINPAVTFGLFLARKLSLTRALFYMVMQCLGAICGAGVVKGFEGKTRYGVLNGGANFVNPGYTKXDGLGAEIVGTFILVYTVFSATDAKRSAXXSHVPILAPLPIGFAVFLVHLATIPITGTGFNPARSLGAAIIFNKDRGWDDHWIFWVGPXIGAALAXXYHQVXXXXMPFKSK

SEQ ID NO: 10083 - protein, 88 aa, Zea mays
  misc_feature (20)..(20): Xaa can be any naturally occurring amino acid
  misc_feature (50)..(50): Xaa can be any naturally occurring amino acid
  Coding DNA Sequence Number=SeqID_3926
  Gene Ontology: Cellular component=ribonucleoprotein complex
  Homolog annotation: Hit_ID=P47909; Match level="QueryCoverage=98%, HitCoverage=95%, E-value=1e-09, Identity=50%"; Hit description=30S ribosomal protein S31, mitochondrial precursor
  Subcellular localization annotation: CTP_CleavageSite=25; ConfidenceScore=5.49e-01
MAMRLAAAATFVRRLVPARXPVRILAAASTAQSGRAVTCGRGRTMQTKRXKRFKGSLRQRTHPYPQKKIDRIKDRVEVPRPPPCRLPS

SEQ ID NO: 10084 - protein, 239 aa, Zea mays
  misc_feature (42)..(43): Xaa can be any naturally occurring amino acid
  misc_feature (48)..(48): Xaa can be any naturally occurring amino acid
  misc_feature (114)..(114): Xaa can be any naturally occurring amino acid
  misc_feature (207)..(207): Xaa can be any naturally occurring amino acid
  misc_feature (232)..(232): Xaa can be any naturally occurring amino acid
  Coding DNA Sequence Number=SeqID_3927
  Gene Ontology: Mol. function=manganese ion binding; Cellular component=membrane; Biological process=defense response
  Homolog annotation: Hit_ID=Q41159; Match level="QueryCoverage=99%, HitCoverage=83%, E-value=1e-104, Identity=81%"; Hit description=Bark agglutinin I polypeptide A precursor
  Pfam annotation: Domain name=Lectin_legB; Domain location=33-238; Score=174.4; E_value=3e-49; Accession=PF00139.10; Description=Legume lectin domain
  Subcellular localization annotation: CTP_CleavageSite=75; ConfidenceScore=5.66e-01
MASYNFKTQNSFPLLLSISFFFLLLLNKVNSTGSLSFSFPKXXPNQPXLILQGDALVTSTGVLQLTNVVNGVPSRKSLGRALYAAPFQIWDSTTGNVASFVTSFSFIIQAPNPXTTADGLAFFLAPVDTQPLDLGGMLGIFKNGYFNKSNQLVAVEFHTFSNRHWDPTGRLLGINVNSIVFVKTVPWNWANGEVANVFISYEASTKXLTASLVYPSLETSLIIHAIADAKDXLSEWVWP

SEQ ID NO: 10085 - protein, 157 aa, Zea mays
  Coding DNA Sequence Number=SeqID_3928
  Gene Ontology: Mol. function=hydrolase activity; Cellular component =ribosome
  Homolog annotation: Hit_ID=A7PZK0; Match level="QueryCoverage=85%, HitCoverage=57%, E-value=5e-52, Identity=71%"; Hit description =Chromosome chr15 scaffold_40, whole genome shotgun sequence
MQRLRSSQLLRRPLLESRRLGGGYCTSSSSEKIVASVLFERLRVVIPKPDPAVYAFQEFKFNWQQQFRRRYPDEFLDIAKNRAKGEYQMDYVPAPRITEADKTNDRKSLYRALDKKLYLLIFGKPFGATSDKPVWHFPEKVYDSEPTLRKCAESALK

SEQ ID NO: 10086 - protein, 189 aa, Zea mays
  misc_feature (15)..(15): Xaa can be any naturally occurring amino acid
  misc_feature (170)..(170): Xaa can be any naturally occurring amino acid
  Coding DNA Sequence Number=SeqID_3929
  Homolog annotation: Hit_ID=Q3KI20; Match level="QueryCoverage=96%, HitCoverage=14%, E-value=1e-62, Identity=61%"; Hit description =Putative uncharacterized protein precursor
WVPGPPHLEVSGLQXSVKEDQDGHWALQGLPVQDDQPLDPQQLLTRMQMVKRVSLLDSQVTLQPFEQAPLTLTYVGLSLHTGNTRQRLDARLTLPDGQPLALSLRSRIRASAWKEGEVEAYLSLPQSDWAKWIPARLTQQWKLTQFKAGGEFWLNWGKGTVQSAVVRLNXPQVKGSYADRKPVHIENLA

SEQ ID NO: 10087 - protein, 195 aa, Zea mays
  Coding DNA Sequence Number=SeqID_392
NLPRVDCCWLRNVSGSMFENIFVPALERLQPSPPDPLFPVLDPCLSHLLQVWSLLFTTRIRSVLAPLLFLSLSSLPIYSIRMVRSDAMSSDAARSSASDSTSSQAAGRPSQREILLLGAHRPFDQVSSPAGEHRSFFNISGDHGVGGAGVRSPFVAPGRWFHMCMVNLCDLFCSKLGFSKVHVSVSSFSYSNLQL

SEQ ID NO: 10088 - protein, 42 aa, Zea mays
  Coding DNA Sequence Number=SeqID_394
  Homolog annotation: Hit_ID=A8MVS2; Match level="QueryCoverage=71%, HitCoverage=32%, E-value=4e-09, Identity=93%"; Hit description =Uncharacterized protein ENSP00000382756
LRGQARWLMPVIPALWEAEAGGSPEVESSRPAWAGMVRPRLY

SEQ ID NO: 10089 - protein, 42 aa, Zea mays; identical to SEQ ID NO: 10088
  Coding DNA Sequence Number=SeqID_395
  Homolog annotation: Hit_ID=A8MVS2; Match level="QueryCoverage=71%, HitCoverage=32%, E-value=4e-09, Identity=93%"; Hit description =Uncharacterized protein ENSP00000382756

SEQ ID NO: 10090 - protein, 262 aa, Zea mays
  Coding DNA Sequence Number=SeqID_396
  Gene Ontology: Mol. function=aspartic-type endopeptidase activity; Cellular component=chromatin; Biological process=DNA integration
  Homolog annotation: Hit_ID=Q10RM4; Match level="QueryCoverage=84%, HitCoverage=16%, E-value=2e-65, Identity=54%"; Hit description =Retrotransposon protein, putative, unclassified
  Pfam annotation: Domain name=zf-CCHC; Domain location=227-244; Score =35.5; E_value=1.9e-07; Accession=PF00098.13; Description=Zinc knuckle
MSLVPHGGGASVMSMAYPVLVPASYTAWAIKVEANLDAQGLWEAVAPAAGTTVDVQKSKTARAVLLQALPEDILLQVSSKLTAKEVWDSLKSRYVGADRVKSARLATLKGEFDRLFMEDGEALDVYAGKIGGMAARYIALGATLDDATMVKKLLDTVPDRLYPAVAGIEQFCDVDKMPFEEALGRLKAFEERCQRRSRTSGSERRDDQLMLTETEWKARQKKKSTIGKCFNCGNRGHFARDCPKKKEEEALLAKADEEASLF

SEQ ID NO: 10091 - protein, 223 aa, Zea mays
  misc_feature (1)..(1): Xaa can be any naturally occurring amino acid
  misc_feature (58)..(58): Xaa can be any naturally occurring amino acid
  misc_feature (94)..(94): Xaa can be any naturally occurring amino acid
  Coding DNA Sequence Number=SeqID_397
  Gene Ontology: Mol. function=protein-tyrosine kinase activity; Cellular component=integral to membrane; Biological process=protein amino acid phosphorylation
  Homolog annotation: Hit_ID=A2WXZ2; Match level="QueryCoverage=99%, HitCoverage=56%, E-value=2e-81, Identity=69%"; Hit description =Putative uncharacterized protein
  Pfam annotation: Domain name=Pkinase; Domain location=1-223; Score= -53.6; E_value=2.1e-05; Accession=PF00069.15; Description=Protein kinase domain
  Pfam annotation: Domain name=Pkinase_Tyr; Domain location=1-223; Score=-39.7; E_value=5.7e-10; Accession=PF07714.7; Description =Protein tyrosine kinase
  Pfam module annotation: Pfam domain module=Pkinase::Pkinase_Tyr; Domain location=1-223::1-223
XLKHENFVDMLGYYIERDLHIVSYKFATMGSLHDLLHGRKGVQGAQAGPVLRWMQRVXIAVDAAKGLEYLHGKVQPSIVHRDIRSSNILFGGRXITEDFKAKIADFSLSNQTSYMSVRLHISSPRAYGYHAPEYVMTGKLTQKSDVYSFGIVLLELLTGRKPIDHTMPIDQHNLRAWTTPMLTEEKVKQCVDPRLMGVYPAKGVAKLAAVAALCVQSDAKLRP

SEQ ID NO: 10092 - protein, 197 aa, Zea mays
  misc_feature (26)..(26): Xaa can be any naturally occurring amino acid
  misc_feature (45)..(45): Xaa can be any naturally occurring amino acid
  misc_feature (87)..(87): Xaa can be any naturally occurring amino acid
  Coding DNA Sequence Number=SeqID_398
  Gene Ontology: Mol. function=3'-5'-exoribonuclease activity; Biological process=RNA processing
  Homolog annotation: Hit_ID=A2YQN5; Match level="QueryCoverage=81%, HitCoverage=87%, E-value=2e-37, Identity=45%"; Hit description =Putative uncharacterized protein
ASLAEDADWPRADGRSFHDCRPAFMXTGPITAASGSAYAEFGKTXIVSVFGPRESKKAMMHTDVGRLNCNGADNKEYSLILYKALEXCFGKNIIIDPTSDEEARQDGSLVVAFMPVRKEITQLALTGEWSDGIITNQAVELCMDACSKHGDILRDRLNDAGTLTTSEWRGRYNTCKSRYPWLYKFCRQGRLMGLMFE

SEQ ID NO: 10093 - protein, 134 aa, Zea mays
  misc_feature (15)..(15): Xaa can be any naturally occurring amino acid
  misc_feature (20)..(20): Xaa can be any naturally occurring amino acid
  Coding DNA Sequence Number=SeqID_399
  Gene Ontology: Mol. function=structural constituent of ribosome; Cellular component=intracellular; Biological process=translation
  Homolog annotation: Hit_ID=Q9LWD2; Match level="QueryCoverage=59%, HitCoverage=56%, E-value=6e-19, Identity=62%"; Hit description =Putative uncharacterized protein P0483F08.18
NKKLDGPHSQGQLMXMTMMXVPPSLPREHSLNKEDRLLRFCWLVVKHRDAVYGLEFVNEDGGRNELSGFSLAHRKDDYDTELASDDEDSDSDSDTTSMRSRRRSRTAWLGFCSLICVGRCIFCSLIEYVNLLLL

SEQ ID NO: 10094 - protein, 200 aa, Zea mays
  Coding DNA Sequence Number=SeqID_400
QIKSPRGSLGGRRQDLPDSHRWIWGGRDRQGCHGMARRHGDAPRHAGSGRTFGEAWGPYLDQACVGTGADPSVGRFERGTAHNGMGDSAGLRRPLGVVELANARAATRKTTRWCLRRSSGGAVAALLLPARATEWSDGDGGLPGCGVWVLCYVLPAMVRGKLRGRKPWLASPELTTTTLSVVVFLGSIVVGASSSQWEFS

SEQ ID NO: 10095 - protein, 90 aa, Zea mays
  misc_feature (53)..(53): Xaa can be any naturally occurring amino acid
  misc_feature (73)..(73): Xaa can be any naturally occurring amino acid
  misc_feature (77)..(79): Xaa can be any naturally occurring amino acid
  misc_feature (89)..(89): Xaa can be any naturally occurring amino acid
  Coding DNA Sequence Number=SeqID_402
DCLSNCKPVSSSLASPMHRRSASLELPSAFGCNDKTGRDRTILQIRLFGSGSXVGTELSQYYLQMFLKIGGRXRTSXXXSVLAILQPNXL

SEQ ID NO: 10096 - protein, 142 aa, Zea mays
  Coding DNA Sequence Number=SeqID_404
  Subcellular localization annotation: CTP_CleavageSite=52; ConfidenceScore=5.08e-01
HLSPSFSLLACSKLPSFDRGISPWLHLPVLSLTVAPPSTHLPRAQLHFLHFPAMAPGAGSLLLLVRGLEALIGGRHRLLPPSETPHRAPIVAPLLAPLLAIAAPWCSDSPVIAPAEIPPQYRSPNPRGTGHVWDMGGSGSDG

SEQ ID NO: 10097 - protein, 157 aa, Zea mays
  misc_feature (53)..(53): Xaa can be any naturally occurring amino acid
  Coding DNA Sequence Number=SeqID_406
  Gene Ontology: Mol. function=structural constituent of ribosome; Cellular component=intracellular; Biological process=translation
  Homolog annotation: Hit_ID=Q6AVT7; Match level="QueryCoverage=85%, HitCoverage=83%, E-value=1e-31, Identity=59%"; Hit description =Putative ribosomal protein
  Subcellular localization annotation: CTP_CleavageSite=7; ConfidenceScore=5.17e-01
MRRPVVRRRQLAARFPTKTLMVSRLLHLCRLITPHFTAASFSTAISPTLHVSXLVNMTCGLTLVKAFSLANALRDHLDVDQMPPLAIPTGDAKQLHGGGVGPDAVGEDAKAKEKEAFDVKLEGFDAAAKLKIIKELRTFTNLGKECPCLFGRAPLAP

SEQ ID NO: 10098 - protein, 152 aa, Zea mays
  Coding DNA Sequence Number=SeqID_407
  Subcellular localization annotation: CTP_CleavageSite=49; ConfidenceScore=5.77e-01
VQWGHLPLRNASGLSFIASFARRARSSLFSFSSLHSATRLIFCSSSRCCSAASSSLLFSILSLSSASHFLRLSNHFLSFSDISVSIHCSKSHSGGGVWSPGRLRSTSWAAQASNCLASCAAAPWADGRTRTTEVRRRAQVGWRARVERSARA

SEQ ID NO: 10099 - protein, 117 aa, Zea mays
  Coding DNA Sequence Number=SeqID_408
  Subcellular localization annotation: CTP_CleavageSite=26; ConfidenceScore=5.36e-01
ANPSDARTGCSPRHTATATGTTPVQRCAHSSPSSPAVLVVPDPTLAQRRQLPWWIEGSYHAPLLGFLLPRMFHPSTEGFGTPILARGYANLKNHPGSWNLKCQVVQEEPHSEEFDSI

SEQ ID NO: 10100 - protein, 103 aa, Zea mays
  Coding DNA Sequence Number=SeqID_3930
TSRGRGPERYITDPVAGLVRIGTVAGAERQHNGVQRAQGQVPELLDPKIVPSRRRDLVLVIAGRPARDPRRPPRVLGRRRRGRAHRSAAAREETLERRRRQSH

SEQ ID NO: 10101 - protein, 175 aa, Zea mays
  Coding DNA Sequence Number=SeqID_3932
QLLIIVMPFPDTGQDQLTGDHIWRGRQRKIDKPVTASTVKTSLSIQEFGHSYFLLQQIGLKGKGKSLKQPYNSFKHAPAPEGVLIRAQWWSFVSNKPSGPAWELHCMRMCQIWVRRRHHRSGREALWTACSPARKGCCCCRLHSVSLREKKSPSATAAAAASSERSASIMFTLCT

SEQ ID NO: 10102 - protein, 73 aa, Zea mays
  Coding DNA Sequence Number=SeqID_3934
LNMFQAAKEVIVHMTNAKNIISLSGRSCKARGTIGAFLGGLALVMLGLTNVEAVEASDSVLGLGGGGAYVADS

SEQ ID NO: 10103 - protein, 243 aa, Zea mays
  Coding DNA Sequence Number=SeqID_3936
  Homolog annotation: Hit_ID=A9P9U9; Match level="QueryCoverage=100%, HitCoverage=100%, E-value=2e-43, Identity=43%"; Hit description =Putative uncharacterized protein
  Pfam annotation: Domain name=DUF1685; Domain location=103-190; Score=- 21.3; E_value=0.04; Accession=PF07939.2; Description=Protein of unknown function (DUF1685)
MAAEHVLRLLDSFWFEASILSNKTLSNSISHDHNKVVEEVLPLDDAKLLLVPTPTLEVRSYSDQNLDSTTCLLCDYSQSPNSVLTPQRLRTIFSEREIREFSSGNHGKEGMSIKRKQKSFGHGRRARKVRTSRSLSELEFKELKGFMDLGFVFSEEDKDSKLASLIPGLQRLGREEDEEGQGDDQSVVSDNNNKPYLSEAWDVLDQREMGNPLLNWRVPARGNEIDMKDNLRFWAHTVASIVR

SEQ ID NO: 10104 - protein, 62 aa, Zea mays
  misc_feature (10)..(10): Xaa can be any naturally occurring amino acid
  misc_feature (24)..(24): Xaa can be any naturally occurring amino acid
  misc_feature (32)..(32): Xaa can be any naturally occurring amino acid
  misc_feature (37)..(37): Xaa can be any naturally occurring amino acid
  misc_feature (40)..(40): Xaa can be any naturally occurring amino acid
  misc_feature (46)..(47): Xaa can be any naturally occurring amino acid
  misc_feature (51)..(51): Xaa can be any naturally occurring amino acid
  Coding DNA Sequence Number=SeqID_3937
ILTHFTMYRXVKLPLLPHQAESPXPVQVVVPXDLVAXLRXLHLHAXXLRAXEAEPVRRLQLL

SEQ ID NO: 10105 - protein, 74 aa, Zea mays
  misc_feature (3)..(3): Xaa can be any naturally occurring amino acid
  Coding DNA Sequence Number=SeqID_3939
MHXHTVPLPPSASTPLADRSSHSHAATASWTAGDGFVQSREDRAMWDAETTLLAQNYSHTRTTHTLTSVSHTHT

SEQ ID NO: 10106 - protein, 267 aa, Zea mays
  misc_feature (135)..(135): Xaa can be any naturally occurring amino acid
  misc_feature (169)..(169): Xaa can be any naturally occurring amino acid
  misc_feature (181)..(181): Xaa can be any naturally occurring amino acid
  misc_feature (223)..(223): Xaa can be any naturally occurring amino acid
  Coding DNA Sequence Number=SeqID_3941
  Gene Ontology: Mol. function=magnesium ion binding; Cellular component=integral to membrane; Biological process=photosynthesis, light harvesting
  Homolog annotation: Hit_ID=Q1EP45; Match level="QueryCoverage=94%, HitCoverage=95%, E-value=1e-114, Identity=83%"; Hit description =Chlorophyll A-B binding protein (CAB), putative
  Pfam annotation: Domain name=Chloroa_b-bind; Domain location=62-234; Score=204.8; E_value=2e-58; Accession=PF00504.12; Description =Chlorophyll A-B binding protein
  Subcellular localization annotation: CTP_CleavageSite=30; ConfidenceScore=5.59e-01
MAAASSMALSSPSLAGKAVKLGPSAPEVGRVSMRKTVTKQVSSGSPWYGPDRVKYLGPFSGEPPSYLTGEFPGDYGWDTAGLSADPETFAKNRELEVIHSRWAMLGALGCVFPELLSRNGVKFGEAVWFKAGSQXIFSEGGLDYLGNPSLVHAQSILAIWATQVILMGXAVEGYRIAGGPXSVRSLTQSTLVAASTHWGLADDPEAFAELKVKELKNGRLAMXFSMFGFFVQAIVTGKGPLENLADHLADPVNHNAWAYATNFVPGK

SEQ ID NO: 10107 - protein, 187 aa, Zea mays
  misc_feature (3)..(3): Xaa can be any naturally occurring amino acid
  misc_feature (16)..(16): Xaa can be any naturally occurring amino acid
  Coding DNA Sequence Number=SeqID_3942
  Gene Ontology: Mol. function=carbon-oxygen lyase activity, acting on polysaccharides; Biological process=carbohydrate metabolic process
  Homolog annotation: Hit_ID=Q2GTH4; Match level="QueryCoverage=96%, HitCoverage=34%, E-value=1e-62, Identity=65%"; Hit description =Putative uncharacterized protein
  Subcellular localization annotation: CTP_CleavageSite=55; ConfidenceScore=5.30e-01
WLXKVVHWYTSAAQYXTYASSAGAFTSPLMKPGTYTMVLYQTEYKVATASVTVTRGSTATKNIAATTETKQSLWKIGEFDGQPFEFRNGDKILRMHPSDTRMSSWGRSTYTVGSSNLRDFPLALFKDVNQPQTIRFSLGSAPGAATLRIATTLSHAGARPQVTVNGWSGAVPAAPTKIDSRGGPVPN

SEQ ID NO: 10108 - protein, 185 aa, Zea mays
  misc_feature (166)..(166): Xaa can be any naturally occurring amino acid
  Coding DNA Sequence Number=SeqID_3943
  Gene Ontology: Mol. function=translation elongation factor activity; Cellular component=cytoplasm; Biological process=translation
  Homolog annotation: Hit_ID=UPI0000EB1AEF; Match level="QueryCoverage =95%, HitCoverage=22%, E-value=2e-73, Identity=83%"; Hit description =UPI0000EB1AEF related cluster
  Pfam annotation: Domain name=GTP_EFTU; Domain location=12-185; Score =152.4; E_value=1.2e-42; Accession=PF00009.17; Description=Elongation factor Tu GTP binding domain
  Pfam annotation: Domain name=MMR_HSR1; Domain location=15-156; Score=- 6.7; E_value=0.0044; Accession=PF01926.13; Description=GTPase of unknown function
  Pfam module annotation: Pfam domain module=GTP_EFTU::MMR_HSR1; Domain location=12-185::15-156
QITSGSIMDKKANIRNMSVIAHVDHGKSTLTDSLVCKAGIIASARAGETRFTDTRKDEQERCITIKSTAISLFYELSENDLAFIKQSKDGSGFLINLIDSPGHVDFSSEVTAALRVTDGALVVVDCVSGVCVQTGTVLRPAIAERIRPVLMMKQMDRALLELQLEXEELYQTFQRIVENVNGDYS

SEQ ID NO: 10109 - protein, 180 aa, Zea mays
  misc_feature (112)..(112): Xaa can be any naturally occurring amino acid
  misc_feature (165)..(165): Xaa can be any naturally occurring amino acid
  Coding DNA Sequence Number=SeqID_3944
  Homolog annotation: Hit_ID=Q7XBE0; Match level="QueryCoverage=76%, HitCoverage=14%, E-value=8e-57, Identity=86%"; Hit description =Putative gypsy-type retrotransposon
QSWHLVAGFSQLTSPPPPHLQNCALPYCVPITCLVFEGVDFCLQEEKRIFAASRDSLDRLYRDSSNSLTILERSHHFTMEELDNQRCKLQESVDEVTRLKQLISAKDATIKXLRASKKSIVQELETARLAAKVAEETSVTLRAQRDRAMDKAIRAERILMRRPGXWVVPEDIRADVNAAP

SEQ ID NO: 10110 - protein, 103 aa, Zea mays
  misc_feature (70)..(70): Xaa can be any naturally occurring amino acid
  Coding DNA Sequence Number=SeqID_3945
  Gene Ontology: Mol. function=serine carboxypeptidase activity; Biological process=proteolysis
  Homolog annotation: Hit_ID=Q9XE83; Match level="QueryCoverage=98%, HitCoverage=14%, E-value=4e-16, Identity=51%"; Hit description =Serine carboxypeptidase-like protein
MSEDKVRTKDSCWSVGTIYDPRELPGVSIAGPGVDRFHRRVWVRGSSIWCMAAVGSEWSHGMVYDDTRHXTWPRGEVPGLGLNDEDVSLLWGWIAISPGPGRS

SEQ ID NO: 10111 - protein, 75 aa, Zea mays
  Coding DNA Sequence Number=SeqID_3946
TEVWSFNYTFRKITSLTEQQVIKETVRLFLRRYTKQTTVMRFHRTCHNNIERSFDRPFFCFFFFFIILTTRSLKD

SEQ ID NO: 10112 - protein, 25 aa, Zea mays
  Coding DNA Sequence Number=SeqID_3948
LEPKISWRHLNNISNSLIISYFLVN

SEQ ID NO: 10113 - protein, 37 aa, Zea mays
  Coding DNA Sequence Number=SeqID_3950
  Homolog annotation: Hit_ID=Q5U1M3; Match level="QueryCoverage=89%, HitCoverage=9%, E-value=3e-08, Identity=81%"; Hit description=Class III peroxidase 70 precursor
RPGRKFAKAMVKMGKVQVLTGDEGEIREKCFAVNPHY

SEQ ID NO: 10114 - protein, 171 aa, Zea mays
  misc_feature (6)..(6): Xaa can be any naturally occurring amino acid
  misc_feature (13)..(13): Xaa can be any naturally occurring amino acid
  misc_feature (15)..(16): Xaa can be any naturally occurring amino acid
  misc_feature (21)..(21): Xaa can be any naturally occurring amino acid
  misc_feature (23)..(23): Xaa can be any naturally occurring amino acid
  misc_feature (44)..(44): Xaa can be any naturally occurring amino acid
  misc_feature (46)..(46): Xaa can be any naturally occurring amino acid
  misc_feature (69)..(69): Xaa can be any naturally occurring amino acid
  Coding DNA Sequence Number=SeqID_3951
  Homolog annotation: Hit_ID=Q48BN1; Match level="QueryCoverage=96%, HitCoverage=41%, E-value=6e-53, Identity=66%"; Hit description =YeeE/YedE family protein
  Pfam annotation: Domain name=DUF395; Domain location=95-159; Score =82.8; E_value=1.1e-21; Accession=PF04143.5; Description=YeeEYedE family (DUF395)
GPCRWXGSIGLAXLXXTLALXGXPWGITRRRAWGAKVANGLGVXVXSWAFCKCRQCQSPAAPVWEDITXSVMDIGIVLGALLAAGLAGRFAPSLKIPARSLVAAVIGGLLLGYGSRLAYGCNIGAYFSGIASGSLHGWVWLVAAFIGNSVGVRLRPFFFAGERPQVALSGC

SEQ ID NO: 10115 - protein, 112 aa, Zea mays
  Coding DNA Sequence Number=SeqID_3952
  Gene Ontology: Mol. function=C4-dicarboxylate transmembrane transporter activity; Cellular component=integral to membrane; Biological process=C4-dicarboxylate transport
  Homolog annotation: Hit_ID=P0ABP4; Match level="QueryCoverage=67%, HitCoverage=16%, E-value=3e-27, Identity=84%"; Hit description =Anaerobic C4-dicarboxylate transporter dcuC
QLRPPSFGSASIILMLVLVILTMLAAVTTGSGNAPFYAFVEMIPKLAHSSGINPAYLTIPMLQASNLGRTLSPVSGVVVAVAGMAKISPFEVVKRTSVPVLVGLVKNKLHCF

SEQ ID NO: 10116 - protein, 62 aa, Zea mays
  Coding DNA Sequence Number=SeqID_3953
MKGRDSEGANMSGRNDGGGQGSAPRGLHPTGSFGNLPTSRGQVKNNLIKDIIFGATNPPPRT

SEQ ID NO: 10117 - protein, 99 aa, Zea mays
  Coding DNA Sequence Number=SeqID_3955
  Gene Ontology: Mol. function=NADH dehydrogenase (ubiquinone) activity; Cellular component=mitochondrial respiratory chain complex I; Biological process=mitochondrial electron transport, NADH to ubiquinone
  Homolog annotation: Hit_ID=Q9FIJ2; Match level="QueryCoverage=93%, HitCoverage=95%, E-value=7e-35, Identity=73%"; Hit description=NADH dehydrogenase 10.5K chain-like protein
  Pfam annotation: Domain name=L51_S25_CI-B8; Domain location=20-93; Score=94.8; E_value=2.7e-25; Accession=PF05047.6; Description =Mitochondrial ribosomal protein L51  S25  CI-B8 domain
MAWRASLSRSLKEIRVLFCQSSPASAAAREFVKKNYGDIKARNPSLPFLVRECSGVQPQLWARYDMGVERCVNLDGLTEAQIDKKLEELAKAGESLKTK

SEQ ID NO: 10118 - protein, 65 aa, Zea mays
  Coding DNA Sequence Number=SeqID_3956
  Gene Ontology: Mol. function=pyridoxal phosphate binding
  Homolog annotation: Hit_ID=A2YSB7; Match level="QueryCoverage=95%, HitCoverage=9%, E-value=1e-20, Identity=75%"; Hit description =Putative uncharacterized protein
TSGVGSIFGPECEKRGMLLRVAGGSIILSPPLVMTPHEVEEIISQFGDALKATKERIGELKSRKN

SEQ ID NO: 10119 - protein, 100 aa, Zea mays
  misc_feature (1)..(31): Xaa can be any naturally occurring amino acid
  Coding DNA Sequence Number=SeqID_3957
XXXXXXXXXXXXXXXXXXXXXXXXXXXXXXXRAWLFFVLLPNACGTAFLTPFFLHSFDNTKLHFSNEDRRRDKINNTLPNIYTLEYDKCRNSSSLNSVKK

SEQ ID NO: 10120 - protein, 218 aa, Zea mays
  misc_feature (185)..(185): Xaa can be any naturally occurring amino acid
  Coding DNA Sequence Number=SeqID_3959
  Gene Ontology: Mol. function=structural constituent of ribosome; Cellular component=ribonucleoprotein complex; Biological process =translation
  Homolog annotation: Hit_ID=Q0UMS2; Match level="QueryCoverage=100%, HitCoverage=100%, E-value=1e-105, Identity=89%"; Hit description =Ribosomal protein L1
  Pfam annotation: Domain name=Ribosomal_L1; Domain location=10-214; Score=191.8; E_value=1.7e-54; Accession=PF00687.11; Description =Ribosomal protein L1pL10e family
MSKISVAGVRSNVQELLEYSNETKKRNFLETVELQIGLKNYDPQRDKRFSGTVKLPTVPRPRMALCVLGDQHDIDRAKHHGVDAMSTEDLKKLNKNKKLIKKLARKYDAFIASDALIKQIPRLLGPGLSKAGKFPTPVSHAEDLANKMTDVKSTIKFQLKKVLCMGVAVGNVGMTEDELIGNIMXLAINYLVSLLKKGWQNVGSLTIKATMSPPKRLY

SEQ ID NO: 10121 - protein, 95 aa, Zea mays
  Coding DNA Sequence Number=SeqID_3960
  Gene Ontology: Cellular component=integral to membrane; Biological process=photosynthesis
  Homolog annotation: Hit_ID=Q9BBR9; Match level="QueryCoverage=85%, HitCoverage=40%, E-value=5e-13, Identity=50%"; Hit description =Photosystem I assembly protein ycf4
  Pfam annotation: Domain name=Ycf4; Domain location=10-95; Score= -89.6; E_value=0.00021; Accession=PF02392.7; Description=Ycf4
MFWISKDTCHTEEIRVDFVTGCRKPIDFFSASISLFGSLGGLLVAASSYDGMNYLYFISYEFDPGLISFLPQGATIMVYSTMFLFLSFSWWLLIF

SEQ ID NO: 10122 - protein, 110 aa, Zea mays
  Coding DNA Sequence Number=SeqID_3961
  Subcellular localization annotation: CTP_CleavageSite=99; ConfidenceScore=5.56e-01
DRSRPAAAFFFFFLPKVNAYKNTRIAQQPAHPKTKSNISRFVRGRATSCAQQPAPRTKINIFRFGRGLQGPRRTRTPSITNYDVHSPTWGDGKPTHPPSAMWAIGLGHEP

SEQ ID NO: 10123 - protein, 195 aa, Zea mays
  misc_feature (2)..(5): Xaa can be any naturally occurring amino acid
  misc_feature (8)..(8): Xaa can be any naturally occurring amino acid
  misc_feature (10)..(10): Xaa can be any naturally occurring amino acid
  misc_feature (13)..(16): Xaa can be any naturally occurring amino acid
  misc_feature (21)..(23): Xaa can be any naturally occurring amino acid
  misc_feature (25)..(25): Xaa can be any naturally occurring amino acid
  misc_feature (27)..(27): Xaa can be any naturally occurring amino acid
  misc_feature (29)..(33): Xaa can be any naturally occurring amino acid
  misc_feature (35)..(45): Xaa can be any naturally occurring amino acid
  misc_feature (47)..(47): Xaa can be any naturally occurring amino acid
  misc_feature (50)..(50): Xaa can be any naturally occurring amino acid
  misc_feature (52)..(56): Xaa can be any naturally occurring amino acid
  misc_feature (58)..(58): Xaa can be any naturally occurring amino acid
  misc_feature (60)..(61): Xaa can be any naturally occurring amino acid
  misc_feature (64)..(66): Xaa can be any naturally occurring amino acid
  misc_feature (73)..(73): Xaa can be any naturally occurring amino acid
  misc_feature (75)..(75): Xaa can be any naturally occurring amino acid
  misc_feature (77)..(77): Xaa can be any naturally occurring amino acid
  misc_feature (82)..(83): Xaa can be any naturally occurring amino acid
  misc_feature (88)..(91): Xaa can be any naturally occurring amino acid
  misc_feature (95)..(95): Xaa can be any naturally occurring amino acid
  misc_feature (100)..(100): Xaa can be any naturally occurring amino acid
  misc_feature (118)..(118): Xaa can be any naturally occurring amino acid
  misc_feature (121)..(121): Xaa can be any naturally occurring amino acid
  Coding DNA Sequence Number=SeqID_3962
EXXXXIIXNXYPXXXXKWKVXXXLXNXNXXXXXSXXXXXXXXXXXFXVNXHXXXXXSXTXXSPXXXRTHNKRXNXTXDTVSXXLANVXXXXGGRXAVEFXQQPDQALWRDRIVRLPQXVVXCLRAGEIRHLSQHQHDEPDRAPQRADARPDQSEWRFLQRGGRIHAAGHQSGQLFPYRGRRAGTAVDADRCEVAS

SEQ ID NO: 10124 - protein, 106 aa, Zea mays
  Coding DNA Sequence Number=SeqID_3964
PGCAADGSDLRRDDPPLPSTGTCFTPSHPTDSTHPPARCLRRISSDSDPPDHDHPAPPASQDHDIKGNGGARHIPHQLRGRERMTPCKGLLLLALYCAVHLTRASN

SEQ ID NO: 10125 - protein, 71 aa, Zea mays
  Coding DNA Sequence Number=SeqID_3966
QVLPGGVLPFLRAPADHHSGYNCWGIQLGMYTTGEAYRLARYLYQLDHEGNQCDWDKFFRTFWYLWQISPS

SEQ ID NO: 10126 - protein, 44 aa, Zea mays
  Coding DNA Sequence Number=SeqID_3968
KFKLYYLTFSRSVQTHLRLTRGEEAGPWASVAFSSYKSVTAVQR

SEQ ID NO: 10127 - protein, 140 aa, Zea mays
  Coding DNA Sequence Number=SeqID_3970
  Gene Ontology: Mol. function=structural constituent of ribosome; Cellular component=ribonucleoprotein complex; Biological process =translation
  Homolog annotation: Hit_ID=P49690; Match level="QueryCoverage=100%, HitCoverage=100%, E-value=8e-74, Identity=97%"; Hit description=60S ribosomal protein L23
  Pfam annotation: Domain name=Ribosomal_L14; Domain location=19-140; Score=193.5; E_value=5.3e-55; Accession=PF00238.10; Description =Ribosomal protein L14pL23e
MSKRGRGGSAGNKFRMSLGLPVAATVNCADNTGAKNLYIISVKGIKGLLNRLPSACVGDMVMATVKKGKPDLRKKVLPAVIVRQRKPWRRKDGVYMYFEDNAGVIVNPKGEMKGSAITGPIGKECADLWPRIASAANAIV

SEQ ID NO: 10128 - protein, 110 aa, Zea mays
  misc_feature (28)..(28): Xaa can be any naturally occurring amino acid
  misc_feature (36)..(48): Xaa can be any naturally occurring amino acid
  misc_feature (50)..(110): Xaa can be any naturally occurring amino acid
  Coding DNA Sequence Number=SeqID_3971
CEDDRDRASLVSIQYIAQCTLNLNQSLXAPSARVEXXXXXXXXXXXXXLXXXXXXXXXXXXXXXXXXXXXXXXXXXXXXXXXXXXXXXXXXXXXXXXXXXXXXXXXXXXX

SEQ ID NO: 10129 - protein, 249 aa, Zea mays
  misc_feature (28)..(28): Xaa can be any naturally occurring amino acid
  misc_feature (33)..(33): Xaa can be any naturally occurring amino acid
  misc_feature (36)..(36): Xaa can be any naturally occurring amino acid
  misc_feature (38)..(38): Xaa can be any naturally occurring amino acid
  misc_feature (42)..(42): Xaa can be any naturally occurring amino acid
  misc_feature (47)..(47): Xaa can be any naturally occurring amino acid
  misc_feature (51)..(51): Xaa can be any naturally occurring amino acid
  misc_feature (54)..(54): Xaa can be any naturally occurring amino acid
  misc_feature (58)..(58): Xaa can be any naturally occurring amino acid
  misc_feature (64)..(64): Xaa can be any naturally occurring amino acid
  misc_feature (76)..(77): Xaa can be any naturally occurring amino acid
  misc_feature (80)..(80): Xaa can be any naturally occurring amino acid
  misc_feature (85)..(86): Xaa can be any naturally occurring amino acid
  misc_feature (96)..(96): Xaa can be any naturally occurring amino acid
  misc_feature (104)..(104): Xaa can be any naturally occurring amino acid
  misc_feature (120)..(121): Xaa can be any naturally occurring amino acid
  misc_feature (125)..(126): Xaa can be any naturally occurring amino acid
  misc_feature (131)..(131): Xaa can be any naturally occurring amino acid
  misc_feature (134)..(134): Xaa can be any naturally occurring amino acid
  misc_feature (136)..(138): Xaa can be any naturally occurring amino acid
  misc_feature (144)..(144): Xaa can be any naturally occurring amino acid
  misc_feature (149)..(149): Xaa can be any naturally occurring amino acid
  misc_feature (155)..(155): Xaa can be any naturally occurring amino acid
  misc_feature (157)..(157): Xaa can be any naturally occurring amino acid
  misc_feature (162)..(163): Xaa can be any naturally occurring amino acid
  misc_feature (167)..(168): Xaa can be any naturally occurring amino acid
  misc_feature (171)..(171): Xaa can be any naturally occurring amino acid
  misc_feature (174)..(176): Xaa can be any naturally occurring amino acid
  misc_feature (178)..(178): Xaa can be any naturally occurring amino acid
  misc_feature (184)..(184): Xaa can be any naturally occurring amino acid
  misc_feature (186)..(187): Xaa can be any naturally occurring amino acid
  misc_feature (190)..(191): Xaa can be any naturally occurring amino acid
  misc_feature (193)..(193): Xaa can be any naturally occurring amino acid
  misc_feature (199)..(199): Xaa can be any naturally occurring amino acid
  misc_feature (201)..(202): Xaa can be any naturally occurring amino acid
  misc_feature (204)..(205): Xaa can be any naturally occurring amino acid
  misc_feature (211)..(213): Xaa can be any naturally occurring amino acid
  misc_feature (215)..(215): Xaa can be any naturally occurring amino acid
  misc_feature (217)..(218): Xaa can be any naturally occurring amino acid
  misc_feature (221)..(223): Xaa can be any naturally occurring amino acid
  misc_feature (225)..(226): Xaa can be any naturally occurring amino acid
  misc_feature (232)..(232): Xaa can be any naturally occurring amino acid
  misc_feature (234)..(234): Xaa can be any naturally occurring amino acid
  misc_feature (237)..(240): Xaa can be any naturally occurring amino acid
  misc_feature (242)..(242): Xaa can be any naturally occurring amino acid
  misc_feature (244)..(246): Xaa can be any naturally occurring amino acid
  Coding DNA Sequence Number=SeqID_3973
  Gene Ontology: Mol. function=nutrient reservoir activity
  Homolog annotation: Hit_ID=Q07320; Match level="QueryCoverage=44%, HitCoverage=41%, E-value=2e-15, Identity=48%"; Hit description=Zein
  Pfam annotation: Domain name=Zein; Domain location=2-249; Score=62.8; E_value=1.2e-15; Accession=PF01559.7; Description=Zein seed storage protein
PHKAPRETPGGAHKPQPGPQPPRGGGGXEHPAXQAXRXQQAXAASAXQQPXAQXQQQXGAQRTXQTNATQQQQQQXXPAXSHPAXXNPGTHLQQQXPATNPPAXGQTKPADQQQQQRATXXGQRXXQPARXEPXAXXXQQQQRXATSPXARGKAXTXRQQQXXQQQXXQQXGPXXXQXAGANPXAXXQQXXPXNQRTGXNXXAXXQQRQQXXXPXAXXNPXXXAXXQQQQGXPXNQXXXXNXAXXXQQP

SEQ ID NO: 10130 - protein, 73 aa, Zea mays
  Coding DNA Sequence Number=SeqID_3974
  Gene Ontology: Mol. function=pyridoxal phosphate binding; Biological process=electron transport
  Homolog annotation: Hit_ID=Q0MRQ7; Match level="QueryCoverage=87%, HitCoverage=19%, E-value=2e-27, Identity=85%"; Hit description =Molybdenum cofactor sulfurase-like protein 1
  Pfam annotation: Domain name=MOSC; Domain location=1-71; Score=-15.0; E_value=0.011; Accession=PF03473.7; Description=MOSC domain
ACLQGSLDALNEILKEPVPMNRFRPNILVDGCNPYSEDLWKTIKINNLTFLGVKLCNRCKVPALSRDETCTDQ

SEQ ID NO: 10131 - protein, 203 aa, Zea mays
  Coding DNA Sequence Number=SeqID_3975
  Gene Ontology: Mol. function=transferase activity, transferring acyl groups, acyl groups converted into alkyl on transfer; Cellular component=intracellular; Biological process=carboxylic acid metabolic process
  Homolog annotation: Hit_ID=A4YYU2; Match level="QueryCoverage=92%, HitCoverage=49%, E-value=2e-72, Identity=75%"; Hit description =Homocitrate synthase
  Pfam annotation: Domain name=HMGL-like; Domain location=20-202; Score= 120.8; E_value=4.1e-33; Accession=PF00682.9; Description=HMGL-like
MSLLNDKRPRSIVLNDTTLRDGEQAPGVAFTTAEKVSIAGALARAGIVEIEAGTPAMGEEEIAAIRAIVDADLPASIIGWCRMRTADVDAAIQAGVSMVNVSIPASDVQIAAKLGGSRQAALDQVRRVVGYARDKGLDVAVGGEDSSRADVGFLVELIATAKAAGARRFRIADTLSVLDPDASFTLLAALRATTDLEGGPGTN

SEQ ID NO: 10132 - protein, 104 aa, Zea mays
  Coding DNA Sequence Number=SeqID_3976
  Gene Ontology: Mol. function=structural constituent of ribosome; Cellular component=ribonucleoprotein complex; Biological process =translation
  Homolog annotation: Hit_ID=Q08069; Match level="QueryCoverage=100%, HitCoverage=47%, E-value=3e-33, Identity=73%"; Hit description=40S ribosomal protein S8
  Pfam annotation: Domain name=Ribosomal_S8e; Domain location=4-82; Score=-56.0; E_value=0.088; Accession=PF01201.12; Description =Ribosomal protein S8e
YGVAIGRKKKPPAAKKDNAEGQKVEAPPEEPKKSTHVPRKLKKPKEGGPLAPPIEEQFASGRLLACISSRPGQCGRADGYTLEGKELGFPMKKPQRKKGKSPVA

SEQ ID NO: 10133 - protein, 85 aa, Zea mays
  Coding DNA Sequence Number=SeqID_3977
RTQLALAREQERTDHRIQPSRLLQDPLIINTQQERTTTHASGKSLAESSHYVRHSIKKISGSSLETEQFSCTVRYVKQLHRLRSH

SEQ ID NO: 10134 - protein, 131 aa, Zea mays
  Coding DNA Sequence Number=SeqID_3978
  Gene Ontology: Mol. function=structural constituent of ribosome; Cellular component=ribonucleoprotein complex; Biological process =translation
  Homolog annotation: Hit_ID=Q9SK22; Match level="QueryCoverage=100%, HitCoverage=89%, E-value=1e-62, Identity=89%"; Hit description=40S ribosomal protein S16-1
  Pfam annotation: Domain name=Ribosomal_S9; Domain location=14-131; Score=215.3; E_value=1.4e-61; Accession=PF00380.9; Description =Ribosomal protein S9S16
MATQAAKQSVQCFGRKKTAVAVTHCKPGCGMIKLNGSPIELFNPEILRFKIFEPVLLLGKHRFAGVDMRIRVKGGGHTSQVYAIRQSIAKALVAFYQKYVDEQSKKEVKDILIRYDRTLLVADPRRCEPKK

SEQ ID NO: 10135 - protein, 213 aa, Zea mays
  misc_feature (48)..(213): Xaa can be any naturally occurring amino acid
  Coding DNA Sequence Number=SeqID_3979
  Subcellular localization annotation: CTP_CleavageSite=28; ConfidenceScore=5.18e-01
NSGSGVLASTTVGQATILANHNREDKARSSIPSSTFHRTQRERGITAXXXXXXXXXXXXXXXXXXXXXXXXXXXXXXXXXXXXXXXXXXXXXXXXXXXXXXXXXXXXXXXXXXXXXXXXXXXXXXXXXXXXXXXXXXXXXXXXXXXXXXXXXXXXXXXXXXXXXXXXXXXXXXXXXXXXXXXXXXXXXXXXXXXXXXXXXXXXXXXXXXXXXX

SEQ ID NO: 10136 - protein, 165 aa, Zea mays
  misc_feature (12)..(12): Xaa can be any naturally occurring amino acid
  misc_feature (14)..(15): Xaa can be any naturally occurring amino acid
  misc_feature (17)..(18): Xaa can be any naturally occurring amino acid
  misc_feature (20)..(21): Xaa can be any naturally occurring amino acid
  misc_feature (25)..(26): Xaa can be any naturally occurring amino acid
  misc_feature (28)..(28): Xaa can be any naturally occurring amino acid
  misc_feature (31)..(31): Xaa can be any naturally occurring amino acid
  misc_feature (33)..(33): Xaa can be any naturally occurring amino acid
  misc_feature (36)..(37): Xaa can be any naturally occurring amino acid
  misc_feature (55)..(55): Xaa can be any naturally occurring amino acid
  misc_feature (60)..(60): Xaa can be any naturally occurring amino acid
  misc_feature (62)..(64): Xaa can be any naturally occurring amino acid
  misc_feature (66)..(69): Xaa can be any naturally occurring amino acid
  misc_feature (74)..(74): Xaa can be any naturally occurring amino acid
  misc_feature (76)..(76): Xaa can be any naturally occurring amino acid
  misc_feature (78)..(78): Xaa can be any naturally occurring amino acid
  misc_feature (80)..(81): Xaa can be any naturally occurring amino acid
  misc_feature (85)..(86): Xaa can be any naturally occurring amino acid
  misc_feature (92)..(94): Xaa can be any naturally occurring amino acid
  misc_feature (102)..(102): Xaa can be any naturally occurring amino acid
  misc_feature (104)..(105): Xaa can be any naturally occurring amino acid
  misc_feature (109)..(109): Xaa can be any naturally occurring amino acid
  misc_feature (114)..(117): Xaa can be any naturally occurring amino acid
  misc_feature (119)..(120): Xaa can be any naturally occurring amino acid
  misc_feature (122)..(123): Xaa can be any naturally occurring amino acid
  misc_feature (129)..(129): Xaa can be any naturally occurring amino acid
  misc_feature (140)..(141): Xaa can be any naturally occurring amino acid
  misc_feature (143)..(143): Xaa can be any naturally occurring amino acid
  misc_feature (150)..(150): Xaa can be any naturally occurring amino acid
  misc_feature (156)..(159): Xaa can be any naturally occurring amino acid
  misc_feature (161)..(161): Xaa can be any naturally occurring amino acid
  misc_feature (163)..(163): Xaa can be any naturally occurring amino acid
  Coding DNA Sequence Number=SeqID_3981
  Gene Ontology: Mol. function=nutrient reservoir activity
  Homolog annotation: Hit_ID=P04700; Match level="QueryCoverage=100%, HitCoverage=62%, E-value=5e-14, Identity=37%"; Hit description=Zein -alpha PZ22.1/22A1 precursor
  Subcellular localization annotation: CTP_CleavageSite=72; ConfidenceScore=5.17e-01
QQQQGRPTQSHXAXXNXXTXXQQQXXAXNPXAXANXXADQQQQQRRQGVPERRQXARGNXAXXXQXXXXSPRAXGXAXTXXQQQXXQQKGPXXXQRAGANPXAXXQQKXPNNQXXXXNXXAXXQQRQQXPKPKAGANPRXXTXRQQQQQXPPDNQXXXXNXAXQQ

SEQ ID NO: 10137 - protein, 163 aa, Zea mays
  Coding DNA Sequence Number=SeqID_3982
  Gene Ontology: Biological process=response to stress
  Homolog annotation: Hit_ID=Q75M01; Match level="QueryCoverage=74%, HitCoverage=72%, E-value=3e-28, Identity=50%"; Hit description =Putative uncharacterized protein P0676G05.12
  Pfam annotation: Domain name=ABA_WDS; Domain location=26-103; Score =6.0; E_value=0.054; Accession=PF02496.6; Description=ABAWDS induced protein
MSEEKHHHHLFHHRKAEEEEGASGEVDYEKKEKHHQHMEQLVQLGAIAAAEYALTETILWESTPSPLIPLSEFSDPIIARKYGPQADMETLELLNTTATQKEIMVAVRVLRRDPREKLCQVIHDTPLSCLAIASRGLGKLKRVLLRSLTDYVVNTATCPCPRC

SEQ ID NO: 10138 - protein, 62 aa, Zea mays
  misc_feature (23)..(23): Xaa can be any naturally occurring amino acid
  misc_feature (26)..(26): Xaa can be any naturally occurring amino acid
  misc_feature (37)..(37): Xaa can be any naturally occurring amino acid
  misc_feature (42)..(42): Xaa can be any naturally occurring amino acid
  misc_feature (44)..(45): Xaa can be any naturally occurring amino acid
  misc_feature (47)..(47): Xaa can be any naturally occurring amino acid
  misc_feature (51)..(51): Xaa can be any naturally occurring amino acid
  Coding DNA Sequence Number=SeqID_3983
SNTRTITAFRPANLPWRRITALXGLXKIHHSSGGGCXAAAPXVXXGXWKKXERCAREGRGLI

SEQ ID NO: 10139 - protein, 150 aa, Zea mays
  Coding DNA Sequence Number=SeqID_3985
HPWRSSERCRSTSRPPSTYLRGSATLPDLVPALALPAPELLLLGRLMQLHRYASRLRTSRPCASPPETAALAAAGASATGTTTPNRKTSCCDPCLHTIGSAYYHWPTGMRRSRKITASCRHRSRPCPGCPSSTRALSCWSTTCAGACYEE

SEQ ID NO: 10140 - protein, 148 aa, Zea mays
  misc_feature (109)..(109): Xaa can be any naturally occurring amino acid
  misc_feature (143)..(143): Xaa can be any naturally occurring amino acid
  Coding DNA Sequence Number=SeqID_3986
  Gene Ontology: Mol. function=threonine endopeptidase activity; Cellular component=proteasome core complex; Biological process =ubiquitin-dependent protein catabolic process
  Homolog annotation: Hit_ID=A1CM55; Match level="QueryCoverage=100%, HitCoverage=56%, E-value=8e-74, Identity=93%"; Hit description =Proteasome subunit alpha type
  Pfam annotation: Domain name=Proteasome; Domain location=29-147; Score=20.2; E_value=4.4e-08; Accession=PF00227.16; Description =Proteasome A-type and B-type
MFRNNYDNDSVTFSPQGRIFQVEYAQEAVKQGSVVVGLVSKTHAVLVGLKRNAEELSSYQKKVIEIDSHMGIAIAGLSSDARVLSNFMKQQSLGSRMTYGRAIPLDRIXTQIGDRAQTNTQHYGKRPYGVGLLVAGVDEAGPXLFEFQ

SEQ ID NO: 10141 - protein, 75 aa, Zea mays
  Coding DNA Sequence Number=SeqID_3987
  Gene Ontology: Mol. function=metal ion binding; Biological process =response to stress
  Homolog annotation: Hit_ID=A5JSU2; Match level="QueryCoverage=73%, HitCoverage=69%, E-value=4e-23, Identity=83%"; Hit description =Metallothionein type 2
  Pfam annotation: Domain name=Metallothio_2; Domain location=1-74; Score=147.5; E_value=3.6e-41; Accession=PF01439.8; Description =Metallothionein
GGNCGCGSGCKCGSGCGGCKMYPDLSYTDQTTTETLVLGLAPVKAQFEGAEMGVGAENGGCKCGDNCTCDPCNCK

SEQ ID NO: 10142 - protein, 211 aa, Zea mays
  misc_feature (123)..(211): Xaa can be any naturally occurring amino acid
  Coding DNA Sequence Number=SeqID_3988
  Gene Ontology: Mol. function=sequence-specific DNA binding; Cellular component=nucleus; Biological process=regulation of transcription, DNA-dependent
  Homolog annotation: Hit_ID=Q9ZR65; Match level="QueryCoverage=34%, HitCoverage=32%, E-value=2e-33, Identity=91%"; Hit description =Putative MADS-domain transcription factor
SRKFLISQTQHMLDQLTDLQRREQMLCEANKCLRRKLEETSNQVHGQVWEHGANLLGYERHSPQQQAPSHVGNGLFFHPWKLQQSHPADRFALTYEYFCRWHPEMDLGQRINKDAMGNHLLLXXXXXXXXXXXXXXXXXXXXXXXXXXXXXXXXXXXXXXXXXXXXXXXXXXXXXXXXXXXXXXXXXXXXXXXXXXXXXXXXXXXXXXXXX

SEQ ID NO: 10143 - protein, 64 aa, Zea mays
  Coding DNA Sequence Number=SeqID_3989
GAVLCVFFCVEHKKLANWYKVSHAIAGIRFTSQHWIRSQLLSFCFVATPRPIIDFRFIVIHCHS

SEQ ID NO: 10144 - protein, 174 aa, Zea mays
  Coding DNA Sequence Number=SeqID_3991
DCSQIQTELLHEHGKEHATIHAASATRWPPFIPPPPRPASSRRASPPLPRRPPPRAAPFARQLLHLRLPRLGRRHSASGPSARASPHPGSHAPPPPPRPPSPHSPTRPAASTRTTLTLNAPRRLGTGPSSGLHPHHRSVAFAGRRTISSPPPVLRRVARATCVPPRLCLPRLKI

SEQ ID NO: 10145 - protein, 151 aa, Zea mays
  Coding DNA Sequence Number=SeqID_3993
  Subcellular localization annotation: CTP_CleavageSite=12; ConfidenceScore=5.41e-01
GALPVQGPRRIQAPRVGFFGHCQPPPGVFQSPFFPIKTRRPPFRAPCLKTPPFLAWPKKNPRPPSFRSCKRCFPVPYARTGRPNNGVIRRVCVFWFGGGGRGIRGPCAPFGFGSRGVPLGVFFFCQKKKGLGWGGPLARPPGFFSPFFYPL

SEQ ID NO: 10146 - protein, 147 aa, Zea mays
  misc_feature (81)..(81): Xaa can be any naturally occurring amino acid
  misc_feature (123)..(123): Xaa can be any naturally occurring amino acid
  misc_feature (136)..(137): Xaa can be any naturally occurring amino acid
  misc_feature (143)..(144): Xaa can be any naturally occurring amino acid
  Coding DNA Sequence Number=SeqID_3994
  Gene Ontology: Mol. function=small conjugating protein ligase activity; Cellular component=cytosol; Biological process=regulation of protein metabolic process
  Homolog annotation: Hit_ID=P35132; Match level="QueryCoverage=100%, HitCoverage=99%, E-value=1e-72, Identity=87%"; Hit description=SUMO -conjugating enzyme UBC9
  Pfam annotation: Domain name=UQ_con; Domain location=5-142; Score =238.2; E_value=1.9e-68; Accession=PF00179.16; Description=Ubiquitin -conjugating enzyme
MASKRFLKELKDLQKDPPTSCSAGPVAEDMFHWQATIMGPADSPYAGGVFLVTIHFPPDYPFKPPKVAFRTKAFHPNINSXGSICLDILKEQGSPALTIPKALLSICSLLIDPNPDDPLVPEXAHMYKSDRAKYEXXARSWTXXYAM

SEQ ID NO: 10147 - protein, 120 aa, Zea mays
  Coding DNA Sequence Number=SeqID_3995
  Homolog annotation: Hit_ID=A2Z7W0; Match level="QueryCoverage=90%, HitCoverage=38%, E-value=3e-27, Identity=56%"; Hit description =Putative uncharacterized protein
FYCFGLILIDVFYGLKSGPFYSVFCYLRISFVFQPGLGFMKQLQQKLGRKHRKPLQTIYILHLTIGLRIIVMAMQIFVHGVVWKKGVYLNRLVQIFRYAPREQLTIPDFVFQSSCSTLCV

SEQ ID NO: 10148 - protein, 193 aa, Zea mays
  misc_feature (115)..(115): Xaa can be any naturally occurring amino acid
  misc_feature (146)..(146): Xaa can be any naturally occurring amino acid
  misc_feature (157)..(158): Xaa can be any naturally occurring amino acid
  misc_feature (167)..(167): Xaa can be any naturally occurring amino acid
  misc_feature (170)..(170): Xaa can be any naturally occurring amino acid
  misc_feature (172)..(172): Xaa can be any naturally occurring amino acid
  misc_feature (175)..(175): Xaa can be any naturally occurring amino acid
  misc_feature (179)..(179): Xaa can be any naturally occurring amino acid
  misc_feature (185)..(185): Xaa can be any naturally occurring amino acid
  Coding DNA Sequence Number=SeqID_3996
  Subcellular localization annotation: CTP_CleavageSite=77; ConfidenceScore=5.15e-01
MARRRSAPVRVVLNSSPSRIGEPSIDHARLRGLTVSVPGPSDPRRALPAPRRGRPPAVSRPRRESKQGKNAIEFSHVASKVVEGRSEFDTMRPAHDYRDRARLHSRHGRGRRCRXKHGGKVCTRFPPTQRLFHIGHASRLLNFGLXKTRRQCTCHGXXNPPRGPDSXGNXPXPLXGFWXKGLTLXIQRFTTGQ

SEQ ID NO: 10149 - protein, 75 aa, Zea mays
  Coding DNA Sequence Number=SeqID_3998
  Subcellular localization annotation: CTP_CleavageSite=9; ConfidenceScore=5.14e-01
NKVSTSGVRFVVGRGSPVARSFRWRANLWGRVWRGWSLGGHRCSLREFVTSPGSLCVLARVLEIWRRCAVVWTGN

SEQ ID NO: 10150 - protein, 170 aa, Zea mays
  Coding DNA Sequence Number=SeqID_4000
  Gene Ontology: Mol. function=unfolded protein binding; Cellular component=cytoplasm; Biological process=intracellular protein transport across a membrane
  Homolog annotation: Hit_ID=Q1N8S1; Match level="QueryCoverage=77%, HitCoverage=77%, E-value=2e-42, Identity=66%"; Hit description =Preprotein translocase subunit
  Pfam annotation: Domain name=SecB; Domain location=31-170; Score =88.8; E_value=1.7e-23; Accession=PF02556.5; Description=Preprotein translocase subunit SecB
TCKGFGPTALLLHQFLAKDCLHADQDNGTTIDTQPTGNGEDTAPAAGLISQYVKDFSFENPNAPAIFQNPNPPAIDVQFNIGTAQVGEEVHEVLLKIDVKAEAEGQTAFIVDLTYAGLFGLRNVPADAIQPFLLGEAPRLLFPFARRVLADCVRDGGFPPLLLEGGPVPN

SEQ ID NO: 10151 - protein, 210 aa, Zea mays
  misc_feature (196)..(196): Xaa can be any naturally occurring amino acid
  Coding DNA Sequence Number=SeqID_4001
  Gene Ontology: Mol. function=serine-type endopeptidase activity; Cellular component=intracellular; Biological process=protein modification process
  Homolog annotation: Hit_ID=P93501; Match level="QueryCoverage=92%, HitCoverage=88%, E-value=2e-92, Identity=91%"; Hit description =Ubiquitin-like protein
  Pfam annotation: Domain name=ubiquitin; Domain location=110-178; Score=138.0; E_value=2.6e-38; Accession=PF00240.13; Description =Ubiquitin family
  Pfam annotation: Domain name=ubiquitin; Domain location=34-102; Score= 138.0; E_value=2.6e-38; Accession=PF00240.13; Description=Ubiquitin family
  Pfam module annotation: Pfam domain module=ubiquitin::ubiquitin; Domain location=110-178::34-102
RSNPVPHPISPGNLRSKRSQGFLVLLLKMQIFVKTLTGKTITLEVESSDTIDNVKAKIQDKEGIPPDQQRLIFAGKQLEDGRTLADYNIQKESTLHLVLRLRGGMQIFVKTLTGKTITLEVESSDTIDNVKAKIQDKEGIPPDQQRLIFAGKQLEDGRTLADYNIQKESTLHLVLRLRGGMQIFVKTLTGKTITLXELSPPDTIDNVKAK

SEQ ID NO: 10152 - protein, 105 aa, Zea mays
  Coding DNA Sequence Number=SeqID_4002
  Gene Ontology: Mol. function=hydrolase activity, acting on acid anhydrides, in phosphorus-containing anhydrides; Biological process =nucleobase, nucleoside, nucleotide and nucleic acid metabolic process
  Homolog annotation: Hit_ID=A2SE82; Match level="QueryCoverage=72%, HitCoverage=9%, E-value=1e-25, Identity=71%"; Hit description =Putative uncharacterized protein
AKCTRRAQCTYCTQHAHPGGAHLTYEVAVRTLCEFTAKRGNLDMRFTPSPSAMEGMAGHRTIAARRGSSFQTELTLAGDYGLLHVRGRADGYDPEQNRLEGGPGT

SEQ ID NO: 10153 - protein, 243 aa, Zea mays
  misc_feature (150)..(243): Xaa can be any naturally occurring amino acid
  Coding DNA Sequence Number=SeqID_4003
VVGHMTRTKDECRGYQLVARSGDDDEQPSAVRTTTGQAKELACAQGRTEELTATCKQIDASEGAGIRDRGAANRAGRVRSEMEQRRPGVMAEGRTELGVGGWGTMGTSLRRRGCGELPTAQQGQGPTSGSGGGPLELDAGQARQREGLGXXXXXXXXXXXXXXXXXXXXXXXXXXXXXXXXXXXXXXXXXXXXXXXXXXXXXXXXXXXXXXXXXXXXXXXXXXXXXXXXXXXXXXXXXXXXXX

SEQ ID NO: 10154 - protein, 114 aa, Zea mays
  misc_feature (19)..(19): Xaa can be any naturally occurring amino acid
  misc_feature (29)..(29): Xaa can be any naturally occurring amino acid
  misc_feature (41)..(42): Xaa can be any naturally occurring amino acid
  misc_feature (46)..(46): Xaa can be any naturally occurring amino acid
  misc_feature (71)..(71): Xaa can be any naturally occurring amino acid
  misc_feature (78)..(78): Xaa can be any naturally occurring amino acid
  misc_feature (99)..(99): Xaa can be any naturally occurring amino acid
  Coding DNA Sequence Number=SeqID_4005
  Homolog annotation: Hit_ID=Q6ZDB7; Match level="QueryCoverage=93%, HitCoverage=14%, E-value=9e-25, Identity=57%"; Hit description =Putative pentatricopeptide (PPR) repeat-containing protein
  Pfam annotation: Domain name=PPR; Domain location=45-79; Score=21.3; E_value=0.0037; Accession=PF01535.11; Description=PPR repeat
  Pfam annotation: Domain name=PPR; Domain location=9-43; Score=9.7; E _value=0.54; Accession=PF01535.11; Description=PPR repeat
  Pfam module annotation: Pfam domain module=PPR::PPR; Domain location =45-79::9-43
LKLQSSASYVYDCFIRCLXKVDRLEEAKXFLVGMQSANLTXXSEDXYTCMIEWCYRMKLLKEALRFLDSMXKRNYLPXLKSYRVYYLCSFVREGSFHTXAKSIFGDILSKEYNR

SEQ ID NO: 10155 - protein, 91 aa, Zea mays
  Coding DNA Sequence Number=SeqID_4006
  Subcellular localization annotation: CTP_CleavageSite=60; ConfidenceScore=5.26e-01
GNSKMLTMITQKVSKDKVNRELVNPLVSSNVVRDSESQSARPVIGQRTLAFTWMLLRKVSSNTLGNLRLLVVLIRRPSPPALNTIIISTKL

SEQ ID NO: 10156 - protein, 125 aa, Zea mays
  Coding DNA Sequence Number=SeqID_4008
  Subcellular localization annotation: CTP_CleavageSite=31; ConfidenceScore=5.29e-01
PGVVSLSGLSSPTLASRRDLPAPLRGQVLLRAPRRSEPPLPHPPHSLLRRNNSNDVLFAACASPADAAAKSNAVVGLKLNDGGPGLIGSGKLAFGGGAGGGGTNKADRYNNNNLPNTDNKTVYNT

SEQ ID NO: 10157 - protein, 159 aa, Zea mays
  misc_feature (97)..(97): Xaa can be any naturally occurring amino acid
  misc_feature (127)..(128): Xaa can be any naturally occurring amino acid
  Coding DNA Sequence Number=SeqID_4010
  Gene Ontology: Mol. function=oxidoreductase activity; Cellular component=extracellular region; Biological process=response to oxidative stress
  Homolog annotation: Hit_ID=A7LBL0; Match level="QueryCoverage=91%, HitCoverage=43%, E-value=7e-42, Identity=62%"; Hit description =Peroxidase 16 protein
  Pfam annotation: Domain name=peroxidase; Domain location=1-123; Score= -44.3; E_value=0.00028; Accession=PF00141.13; Description=Peroxidase
RRGQGRGRGRERPTQTDMIALSGAHTIGVTHCDKFVRRIYTFKQRLAWNPPMNLDFLRSLRRVCPLSYSPTAFAMLDVTTPRVFDNAYFNNRRCSRXKGLLASDQVLFADRRSRPTVNRFAANQTAXXDAFANAMAKLGRVGVKTAADGEVRRVCTRVN

SEQ ID NO: 10158 - protein, 105 aa, Zea mays
  misc_feature (37)..(37): Xaa can be any naturally occurring amino acid
  misc_feature (68)..(68): Xaa can be any naturally occurring amino acid
  Coding DNA Sequence Number=SeqID_4011
  Gene Ontology: Mol. function=protein binding; Cellular component=RCAF complex; Biological process=female meiosis chromosome segregation
  Homolog annotation: Hit_ID=P59259; Match level="QueryCoverage=80%, HitCoverage=79%, E-value=9e-27, Identity=79%"; Hit description =Histone H4
  Pfam annotation: Domain name=Histone; Domain location=25-96; Score =41.7; E_value=2.6e-09; Accession=PF00125.14; Description=Core histone H2AH2BH3H4
MSGRGKGGKGLGKGGAKRHRKVLRDNIQGITKPAIRXRLARRGGIKRISGLIYEETRGVLKIFLENVXIRDAVTYTEHARRKTVTALDVVYALKRQGRTLYGFGG

SEQ ID NO: 10159 - protein, 229 aa, Zea mays
  misc_feature (170)..(170): Xaa can be any naturally occurring amino acid
  misc_feature (179)..(179): Xaa can be any naturally occurring amino acid
  misc_feature (181)..(181): Xaa can be any naturally occurring amino acid
  Coding DNA Sequence Number=SeqID_4012
  Gene Ontology: Mol. function=catalytic activity; Cellular component =phosphopyruvate hydratase complex; Biological process=metabolic process
  Homolog annotation: Hit_ID=A8RM82; Match level="QueryCoverage=78%, HitCoverage=47%, E-value=3e-58, Identity=55%"; Hit description =Putative uncharacterized protein
  Pfam annotation: Domain name=MR_MLE; Domain location=67-174; Score =124.8; E_value=2.5e-34; Accession=PF01188.11; Description=Mandelate racemase  muconate lactonizing enzyme, C-terminal domain
HWGPGPPSRRHYRILSNIDFHYGRCWPLDLALWDLAGKITGQPVWKLLGGLSNRVRAYASSGTLRDPGATAEAAERYLAEGFPALKLRFHRGDWRDDVKTLEAVRARVGNRLELMVDCNQGWRMSWDTEAPWSLKDAIAVARELERLGVYWMEEPLHRADYEGMRALRRXVDIRIAGGXIXRQAHELRELITEVAWMSADRLSGYRMASHHGQDTHCVTTPGPMYGLNP

SEQ ID NO: 10160 - protein, 59 aa, Zea mays
  Coding DNA Sequence Number=SeqID_4013
LGNQSLFVQMSEYNPPPTMPILAPHGCKFSVPPPPPPFPLGLVREFLCAFENYTLDLSM

SEQ ID NO: 10161 - protein, 149 aa, Zea mays
  misc_feature (46)..(46): Xaa can be any naturally occurring amino acid
  misc_feature (78)..(78): Xaa can be any naturally occurring amino acid
  Coding DNA Sequence Number=SeqID_4015
  Homolog annotation: Hit_ID=Q0UJG1; Match level="QueryCoverage=67%, HitCoverage=100%, E-value=2e-21, Identity=52%"; Hit description =Putative uncharacterized protein
MSSTEVPTGNAMENSYQSRIGQSEIPVLKDEAPIESTEYDNGGDSXQQLERDEKEAIDRDNIISERTPGAAKQPGAYXEPGDEEGLGDAADGIHGTSSGREVVGGSMDIWDLWRREQGGRLYHGLLTGRSKVIEGVPGEKKKKKGPPEG

SEQ ID NO: 10162 - protein, 70 aa, Zea mays
  Coding DNA Sequence Number=SeqID_4016
HNTDARHGATNVIQCHEHLVIYHTFQLRKSFIGSSWGIPLHSGSLHVFCRHLSRSTSRYTTFFFILSHFS

SEQ ID NO: 10163 - protein, 106 aa, Zea mays
  Coding DNA Sequence Number=SeqID_4018
  Gene Ontology: Mol. function=electron carrier activity; Cellular component=mitochondrial respiratory chain; Biological process =electron transport
  Homolog annotation: Hit_ID=Q4HVX7; Match level="QueryCoverage=100%, HitCoverage=97%, E-value=5e-57, Identity=97%"; Hit description =Cytochrome c
  Pfam annotation: Domain name=Cytochrom_C; Domain location=6-105; Score=114.6; E_value=2.9e-31; Accession=PF00034.11; Description =Cytochrome c
MAGGDIKKGANLFKTRCAQCHTVEKDGGNKIGPALHGLWGRKTGSVEGYSYTDANKQKGIEWNDDTLFEYLENPKKYIPGTKMAFGGLKKAKDRNDLIAYLKDSTK

SEQ ID NO: 10164 - protein, 116 aa, Zea mays
  Coding DNA Sequence Number=SeqID_4019
  Subcellular localization annotation: CTP_CleavageSite=25; ConfidenceScore=5.49e-01
CGVGSRDFWDNTSTQGGGSGHRNCVATASPPSRAGSFTTRRSERGYASLEEQSWSSTWEAQVYEEPVAEDPGVQQVEVAEQELIEGEEQVVQEEPYNGEYELIYVASLSQLCGSKE

SEQ ID NO: 10165 - protein, 114 aa, Zea mays
  Coding DNA Sequence Number=SeqID_4021
  Gene Ontology: Mol. function=protein serine/threonine kinase activity; Biological process=protein amino acid phosphorylation
  Homolog annotation: Hit_ID=A6MW92; Match level="QueryCoverage=63%, HitCoverage=18%, E-value=2e-12, Identity=47%"; Hit description =Barren inflorescence2
  Subcellular localization annotation: CTP_CleavageSite=37; ConfidenceScore=5.37e-01
GEERLSASSDTSLPRCFSLSSISFDCTPSAVLSMAATANPASSSTPARPHRSGDAVWVTIRLLRRIDGGDVGTVYLCATVFGFSITGGEHGAPVEGFTVTKRRGDFTEATGAGG

SEQ ID NO: 10166 - protein, 111 aa, Zea mays
  misc_feature (105)..(105): Xaa can be any naturally occurring amino acid
  Coding DNA Sequence Number=SeqID_4022
  Gene Ontology: Mol. function=transferase activity, transferring glycosyl groups; Biological process=carbohydrate biosynthetic process
  Homolog annotation: Hit_ID=Q7XYY1; Match level="QueryCoverage=52%, HitCoverage=16%, E-value=1e-16, Identity=79%"; Hit description =Galactinol synthase 3
MRQPTNSPPSPDQNSLVAPRTRQREMGPELMTAKMTAKAAAAAEAAAKPATRAYVTFLAGDDDYWKGVVALAKGLRKGRSAYPLRVTVLPDEAESHRRIHGTQGXCVVRKI

SEQ ID NO: 10167 - protein, 154 aa, Zea mays
  Coding DNA Sequence Number=SeqID_4023
  Subcellular localization annotation: CTP_CleavageSite=64; ConfidenceScore=5.42e-01
PHSPNVDPYPRQKLTLGIAPSPPPPTRHGCLPPGLQGSTRRAERRHSIPEGSGSSSNSFSFVTPCSTVAAQRATGRLSAADIANSLRYKLYDSTSSAFHNVVPALEGLHLSGHGSGGSASGTLSNAGVGSPSPCPNQAKSKENIQPNRYTVSVQ

SEQ ID NO: 10168 - protein, 133 aa, Zea mays
  misc_feature (1)..(2): Xaa can be any naturally occurring amino acid
  misc_feature (12)..(15): Xaa can be any naturally occurring amino acid
  misc_feature (18)..(18): Xaa can be any naturally occurring amino acid
  misc_feature (23)..(24): Xaa can be any naturally occurring amino acid
  misc_feature (52)..(52): Xaa can be any naturally occurring amino acid
  Coding DNA Sequence Number=SeqID_4025
XXVIPPPPCKKXXXXMPXISPLXXCDKKKQTHLQRPRFREKPGPCRSSDQAXLRTRPPANRQSSWRCSPPAKPRAAAASPAGDAGVEGGCVREDNGSNCYFGVSSFLNLDLSYPTPGHRPAPTRPPTRPPTRP

SEQ ID NO: 10169 - protein, 133 aa, Zea mays
  misc_feature (133)..(133): Xaa can be any naturally occurring amino acid
  Coding DNA Sequence Number=SeqID_4026
  Gene Ontology: Mol. function=DNA binding; Cellular component =chromosome; Biological process=DNA mediated transformation
  Homolog annotation: Hit_ID=Q9C681; Match level="QueryCoverage=99%, HitCoverage=99%, E-value=2e-51, Identity=81%"; Hit description =Probable histone H2A.1
  Pfam annotation: Domain name=CBFD_NFYB_HMF; Domain location=25-89; Score=20.9; E_value=0.0019; Accession=PF00808.13; Description =Histone-like transcription factor (CBFNF-Y) and archaeal histone
  Pfam annotation: Domain name=Histone; Domain location=19-92; Score =114.2; E_value=3.9e-31; Accession=PF00125.14; Description=Core histone H2AH2BH3H4
  Pfam module annotation: Pfam domain module=CBFD_NFYB_HMF::Histone; Domain location=25-89::19-92
  Subcellular localization annotation: CTP_CleavageSite=41; ConfidenceScore=5.21e-01
MAGRGKTLGSGAVKKATSRSSKAGLQFPVGRIARFLKKGKYAERVGAGAPVYLSAVLEYLAAEVLELAGNAARDNKKTRIVPRHIQLAVRNDEELSKLLGDVTIANGGVMPNIHNLLLPKKAGASSKPSGDDX

SEQ ID NO: 10170 - protein, 168 aa, Zea mays
  misc_feature (2)..(2): Xaa can be any naturally occurring amino acid
  misc_feature (6)..(6): Xaa can be any naturally occurring amino acid
  misc_feature (91)..(91): Xaa can be any naturally occurring amino acid
  Coding DNA Sequence Number=SeqID_4027
  Gene Ontology: Mol. function=zinc ion binding; Cellular component =nucleus; Biological process=regulation of transcription, DNA -dependent
  Homolog annotation: Hit_ID=Q10KA0; Match level="QueryCoverage=91%, HitCoverage=32%, E-value=5e-59, Identity=72%"; Hit description =Transposon protein, putative, unclassified
RXLGDXRPLGLLVGVNNHKKTTIFGAALLYDETTESFIWLFRTFLNVMSGKKPQTILTDEDAAMAKAIKIVLQGTHHRICVWHMNQNACKXSAVVEDYKKFNVEFQKCIYDQEEEGWENAGNQERTTFNLQGNQWLQRLFDKRYLWALVYGRNTFSADMVSTHRDESL

SEQ ID NO: 10171 - protein, 109 aa, Zea mays
  Coding DNA Sequence Number=SeqID_4028
LQDPNIVGSICMNAECKIIAVPVVYPDIYFLTDKFQEASFRHAPTREASGEPRHVDSASTCGLLISLRLRSREKAPWSSHAAGTVASLSCTAAQEASVGLDRLVNVAGI

SEQ ID NO: 10172 - protein, 107 aa, Zea mays
  Coding DNA Sequence Number=SeqID_4030
  Gene Ontology: Mol. function=DNA polymerase processivity factor activity; Cellular component=PCNA complex; Biological process =regulation of DNA replication
  Homolog annotation: Hit_ID=Q43266; Match level="QueryCoverage=83%, HitCoverage=33%, E-value=2e-32, Identity=82%"; Hit description =Proliferating cell nuclear antigen
  Pfam annotation: Domain name=PCNA_C; Domain location=9-98; Score =77.4; E_value=4.6e-20; Accession=PF02747.6; Description =Proliferating cell nuclear antigen, C-terminal domain
PRVRPRVRCENTAALCDNGRANIECKLNHTIDKPEEATIIEMQEPVSLTFALRYMNSFTKGVFTGPSKVTISLSSELPVVVEYKIAEMGFITFYLAPKIDDDEEMKP

SEQ ID NO: 10173 - protein, 137 aa, Zea mays
  Coding DNA Sequence Number=SeqID_4031
  Subcellular localization annotation: CTP_CleavageSite=83; ConfidenceScore=5.28e-01
PAGLGSSIRAAPLCQCAHHAKRTRMDPIARAAAASSHRASNRRPSKPSPITVARTPFGSKGNGSHAWRLPSWRMLTSTAAIPGANEPQERSTARESDTKSKDNNDNNDQDRLHDYHRNELPALLTASSRPIPQRKTQ

SEQ ID NO: 10174 - protein, 64 aa, Zea mays
  Coding DNA Sequence Number=SeqID_4033
  Gene Ontology: Mol. function=metal ion binding
  Homolog annotation: Hit_ID=Q84RC4; Match level="QueryCoverage=73%, HitCoverage=72%, E-value=1e-14, Identity=74%"; Hit description =Metallothionein-like protein
  Pfam annotation: Domain name=Metallothio_2; Domain location=3-62; Score=24.0; E_value=2.2e-07; Accession=PF01439.8; Description =Metallothionein
MSSSCGNCDCADKSQCGKGNNYGVNIVETEKSHIETVVMDVPAAEHDGCKCGTNCTCVNCTCGH

SEQ ID NO: 10175 - protein, 73 aa, Zea mays
  Coding DNA Sequence Number=SeqID_4034
FDFTYCFVFIWTNVLLCNMSFKNLVGTPGCLLDHLTETKGFCLTKIKYLVCFQFSYYGAHFGFRLVWSSPSAF

SEQ ID NO: 10176 - protein, 163 aa, Zea mays
  Coding DNA Sequence Number=SeqID_4036
  Gene Ontology: Mol. function=protein binding; Cellular component =nuclear speck; Biological process=mRNA processing
  Homolog annotation: Hit_ID=A2XXC3; Match level="QueryCoverage=98%, HitCoverage=24%, E-value=3e-35, Identity=50%"; Hit description =Putative uncharacterized protein
  Pfam annotation: Domain name=cwf21; Domain location=56-100; Score =84.4; E_value=3.8e-22; Accession=PF08312.2; Description=cwf21
  Subcellular localization annotation: CTP_CleavageSite=29; ConfidenceScore=5.26e-01
MYNGIGLQTARGSGTNGYAQSNKFFVKPRSTSGGGPGGPHRPLRPDAAGADGGGMRKPNKEILEHDRKRQVELKLLVLRDALEEHGYTEDEIEERVAEARKAAEAEAAAAVAAEEAGSGRGAGRPPLPGRGFADTQSNHVAERKEKQLETLRSALGLNVEYAN

SEQ ID NO: 10177 - protein, 144 aa, Zea mays
  misc_feature (1)..(1): Xaa can be any naturally occurring amino acid
  misc_feature (4)..(5): Xaa can be any naturally occurring amino acid
  misc_feature (8)..(12): Xaa can be any naturally occurring amino acid
  misc_feature (14)..(14): Xaa can be any naturally occurring amino acid
  misc_feature (16)..(16): Xaa can be any naturally occurring amino acid
  misc_feature (18)..(18): Xaa can be any naturally occurring amino acid
  misc_feature (20)..(23): Xaa can be any naturally occurring amino acid
  misc_feature (25)..(26): Xaa can be any naturally occurring amino acid
  misc_feature (28)..(29): Xaa can be any naturally occurring amino acid
  misc_feature (31)..(31): Xaa can be any naturally occurring amino acid
  misc_feature (33)..(33): Xaa can be any naturally occurring amino acid
  misc_feature (35)..(38): Xaa can be any naturally occurring amino acid
  misc_feature (40)..(41): Xaa can be any naturally occurring amino acid
  misc_feature (43)..(52): Xaa can be any naturally occurring amino acid
  misc_feature (54)..(57): Xaa can be any naturally occurring amino acid
  misc_feature (59)..(59): Xaa can be any naturally occurring amino acid
  misc_feature (61)..(62): Xaa can be any naturally occurring amino acid
  misc_feature (64)..(69): Xaa can be any naturally occurring amino acid
  misc_feature (71)..(73): Xaa can be any naturally occurring amino acid
  misc_feature (76)..(87): Xaa can be any naturally occurring amino acid
  misc_feature (89)..(103): Xaa can be any naturally occurring amino acid
  misc_feature (106)..(108): Xaa can be any naturally occurring amino acid
  misc_feature (110)..(116): Xaa can be any naturally occurring amino acid
  misc_feature (119)..(120): Xaa can be any naturally occurring amino acid
  misc_feature (122)..(123): Xaa can be any naturally occurring amino acid
  misc_feature (125)..(126): Xaa can be any naturally occurring amino acid
  misc_feature (130)..(133): Xaa can be any naturally occurring amino acid
  misc_feature (136)..(141): Xaa can be any naturally occurring amino acid
  misc_feature (143)..(144): Xaa can be any naturally occurring amino acid
  Coding DNA Sequence Number=SeqID_4037
XRGXXYFXXXXXCXLXLXSXXXXSXXFXXIXVXCXXXXIXXIXXXXXXXXXXIXXXXLXLXXFXXXXXXIXXXFLXXXXXXXXXXXXLXXXXXXXXXXXXXXXFCXXXFXXXXXXXIIXXYXXFXXLFLXXXXFSXXXXXXCXX

SEQ ID NO: 10178 - protein, 191 aa, Zea mays
  misc_feature (77)..(77): Xaa can be any naturally occurring amino acid
  misc_feature (82)..(82): Xaa can be any naturally occurring amino acid
  misc_feature (168)..(168): Xaa can be any naturally occurring amino acid
  Coding DNA Sequence Number=SeqID_4039
  Gene Ontology: Mol. function=[glutamate-ammonia-ligase] adenylyltransferase activity
  Homolog annotation: Hit_ID=A0HEC5; Match level="QueryCoverage=64%, HitCoverage=13%, E-value=2e-44, Identity=71%"; Hit description =Glutamate-ammonia ligase adenylyltransferase
  Pfam annotation: Domain name=GlnE; Domain location=48-191; Score= -101.9; E_value=0.0012; Accession=PF03710.6; Description=Glutamate -ammonia ligase adenylyltransferase
MLPARYVVWNCERDNNFTQETAMTMITPSSKLTLTKGNKSWSSTVAAALELVDPPGCRKWPARYLLQHPGVIDELAXEQLFXERFVAADFEHEMALRLAALESTGEDDDENLLNLLRRAHHAETFRTLARDVEGAITVEQVADDLSALADSVLRVTAQWCWKRLKQRXHRDTPNFAIIGYGKGGPGTGLNN

SEQ ID NO: 10179 - protein, 97 aa, Zea mays
  Coding DNA Sequence Number=SeqID_4040
  Gene Ontology: Mol. function=structural constituent of ribosome; Cellular component=ribonucleoprotein complex; Biological process =translation
  Homolog annotation: Hit_ID=Q949H0; Match level="QueryCoverage=100%, HitCoverage=50%, E-value=2e-38, Identity=81%"; Hit description=40S ribosomal protein S7
  Pfam annotation: Domain name=Ribosomal_S7e; Domain location=1-96; Score=1.6; E_value=3.2e-06; Accession=PF01251.8; Description =Ribosomal protein S7e
VATRFIVRPSKKGSTVQRPRTRTLTPFHDGILEDVVFPVEIVGKRVRYRLDGAKVIEIFLDLKERNNTEYKLETYTTVYRRLCGKDVVFEYHMIDIA

SEQ ID NO: 10180 - protein, 152 aa, Zea mays
  Coding DNA Sequence Number=SeqID_4041
  Gene Ontology: Mol. function=cation transmembrane transporter activity; Cellular component=membrane; Biological process=cation transport
  Homolog annotation: Hit_ID=A3AD18; Match level="QueryCoverage=45%, HitCoverage=18%, E-value=2e-24, Identity=79%"; Hit description =Putative uncharacterized protein
  Subcellular localization annotation: CTP_CleavageSite=47; ConfidenceScore=5.06e-01
MVLYVDSCFRCSWLSPWLLKHYMHLCKMNRSTSMCRLCLLSPVGWVAVSAVTSLSPLPFHADTLSSKKLSSRHYLIVSAVTNLLVNLLGVWFFRNYARVNIVYRNAEDMNYHSVCLHVLADSIRRYMHSQALLDSSLVHIILLYLAGCHTRY

SEQ ID NO: 10181 - protein, 92 aa, Zea mays
  misc_feature (46)..(46): Xaa can be any naturally occurring amino acid
  Coding DNA Sequence Number=SeqID_4042
  Gene Ontology: Mol. function=DNA binding; Cellular component=nuclear origin of replication recognition complex; Biological process=DNA replication
  Homolog annotation: Hit_ID=Q945C6; Match level="QueryCoverage=89%, HitCoverage=11%, E-value=3e-19, Identity=63%"; Hit description =Origin recognition complex subunit 3
IFCEAAITPALCHALPSFIQAQENRTPILLCLYEAGRHDTVQLLDXIFCEAASPDWQTENAPDILPICFYAWTLLRVKSGSANRFIAQVMNT

SEQ ID NO: 10182 - protein, 179 aa, Zea mays
  misc_feature (10)..(10): Xaa can be any naturally occurring amino acid
  Coding DNA Sequence Number=SeqID_4043
  Gene Ontology: Mol. function=transcription factor activity; Cellular component=intracellular; Biological process=regulation of transcription, DNA-dependent
  Homolog annotation: Hit_ID=A4Z1J7; Match level="QueryCoverage=95%, HitCoverage=45%, E-value=2e-61, Identity=66%"; Hit description =Putative uncharacterized protein
  Pfam annotation: Domain name=Fic; Domain location=64-179; Score=37.9; E_value=3.6e-08; Accession=PF02661.8; Description=Fic protein family
MDVLKSSEIXGEFLDVDQVRSSVARKLGMDMGGLVPADRHVEGVVEMTLDAIQGSQKKLSAKRLFDWHAALFPTGRSGMQKITVGAWRDNKKEDPMQVVSGAMGKEKVHFQAPDADLLDGEMKKFIAWFNEEQTMNGVLKAAVAHLWFITIHPFDDGNGRIARAISDLQLSRGGARYPI

SEQ ID NO: 10183 - protein, 143 aa, Zea mays
  Coding DNA Sequence Number=SeqID_4044
PNPRTRRCLGTPGDPPRHLLLYLHQIDAQDLQPRRTRRTRSLGRQLLIFDPSKLGNESRSRRSRTGQERAPGTSGDDRHGAAHPPAAGLTLGAEGRAGRHGRATLGCRARYAGWPHARENRGGWPGRAAGCHGRRLAGRRTPR

SEQ ID NO: 10184 - protein, 150 aa, Zea mays
  Coding DNA Sequence Number=SeqID_4046
  Gene Ontology: Mol. function=RNA-directed DNA polymerase activity; Biological process=RNA-dependent DNA replication
  Homolog annotation: Hit_ID=Q5KAY6; Match level="QueryCoverage=74%, HitCoverage=7%, E-value=3e-18, Identity=42%"; Hit description =Putative uncharacterized protein
SPPPPPKHPVGAPEPFKARSRPRPGQPVTKEAISAAITSIGKEKAPGLSGWTRGLLEIATSAPDASILSALRLLADMIRQGTAPGADLLCAARLVGLQKPDGGVRPIAVGDILYRVALKALLATNFQPGMLLPKPARRGKIPGGCLKTAH

SEQ ID NO: 10185 - protein, 169 aa, Zea mays
  misc_feature (23)..(23): Xaa can be any naturally occurring amino acid
  misc_feature (46)..(46): Xaa can be any naturally occurring amino acid
  misc_feature (49)..(49): Xaa can be any naturally occurring amino acid
  misc_feature (52)..(52): Xaa can be any naturally occurring amino acid
  misc_feature (60)..(60): Xaa can be any naturally occurring amino acid
  misc_feature (84)..(84): Xaa can be any naturally occurring amino acid
  misc_feature (87)..(87): Xaa can be any naturally occurring amino acid
  misc_feature (100)..(100): Xaa can be any naturally occurring amino acid
  misc_feature (104)..(104): Xaa can be any naturally occurring amino acid
  misc_feature (128)..(128): Xaa can be any naturally occurring amino acid
  misc_feature (130)..(130): Xaa can be any naturally occurring amino acid
  misc_feature (132)..(133): Xaa can be any naturally occurring amino acid
  misc_feature (140)..(141): Xaa can be any naturally occurring amino acid
  misc_feature (143)..(145): Xaa can be any naturally occurring amino acid
  misc_feature (148)..(148): Xaa can be any naturally occurring amino acid
  misc_feature (152)..(152): Xaa can be any naturally occurring amino acid
  misc_feature (156)..(156): Xaa can be any naturally occurring amino acid
  misc_feature (164)..(164): Xaa can be any naturally occurring amino acid
  misc_feature (166)..(166): Xaa can be any naturally occurring amino acid
  misc_feature (169)..(169): Xaa can be any naturally occurring amino acid
  Coding DNA Sequence Number=SeqID_4047
  Subcellular localization annotation: CTP_CleavageSite=51; ConfidenceScore=5.68e-01
VPPPPPPPGSPRLSEPRKAVYQXPFPVPRPPSSVPGSPSSSVVLWXRDXPCXDVRSPRMXTRNPDQPSPDPRERDTEADDVYKXGSXGKVYWWSFGYVQXFNFXFGLVSKGSLASSRILAGKRMMAGXCXGXXWTVTRGXXGXXXFQXNFQXNGAXWNGRKRKXQXIPX

SEQ ID NO: 10186 - protein, 79 aa, Zea mays
  Coding DNA Sequence Number=SeqID_4049
  Gene Ontology: Mol. function=RNA binding; Cellular component=voltage -gated potassium channel complex; Biological process=potassium ion transport
  Homolog annotation: Hit_ID=Q6K9R1; Match level="QueryCoverage=94%, HitCoverage=7%, E-value=2e-27, Identity=85%"; Hit description =Pumilio-like
FWTTDENEPVQAMMKDQFAFYVEQKALEIWDDQNRELILSRIKVHLNALKRYTYGKHIVARGEKLIAAGERLIGAPSCC

SEQ ID NO: 10187 - protein, 66 aa, Zea mays
  Coding DNA Sequence Number=SeqID_4050
FLLLIPYLNFADRKYWSYGDSSAQRFECQYELYICCISPCLGSACNRTVGRLLRDLYGMLKFLDKI

SEQ ID NO: 10188 - protein, 99 aa, Zea mays
  misc_feature (2)..(3): Xaa can be any naturally occurring amino acid
  misc_feature (5)..(8): Xaa can be any naturally occurring amino acid
  misc_feature (16)..(17): Xaa can be any naturally occurring amino acid
  misc_feature (59)..(59): Xaa can be any naturally occurring amino acid
  Coding DNA Sequence Number=SeqID_4052
TXXRXXXXKFLSASNXXSTQFRPEPALSWRCHGDHRGECRGNVVVMSIVMVITIYSHNXMVINKTPTSPRAMNTARDCEIEGLEKPRQEPRGPGRAQRR

SEQ ID NO: 10189 - protein, 96 aa, Zea mays
  Coding DNA Sequence Number=SeqID_4054
  Subcellular localization annotation: CTP_CleavageSite=22; ConfidenceScore=5.27e-01
LTQGSLGRPPRRLLPRHAGGPRASLVPAPHPSSPARRPFSSDTFPRSFAFTALDDDACHVNGGKKMKKRAVKPVKIGCDEKKEAEECVSVLKKKKK

SEQ ID NO: 10190 - protein, 151 aa, Zea mays
  Coding DNA Sequence Number=SeqID_4056
  Gene Ontology: Mol. function=chorismate mutase activity; Cellular component=chloroplast; Biological process=aromatic amino acid family biosynthetic process
  Homolog annotation: Hit_ID=A2X1M3; Match level="QueryCoverage=93%, HitCoverage=57%, E-value=5e-41, Identity=60%"; Hit description =Putative uncharacterized protein
LATGIDACGKMFLDEWLPLFTVDGDDGSYAQPVALDLACLQVLSQRIHMGKYVAEVKFKDAPQDYSRLIKEKDSISLMDMLTFKAVEEKVKKRVEKKARTFGQNVTLDDNATAGDSECKVDPKVLSKLYDQWVMPPPQHVEGQILVTFSRS

SEQ ID NO: 10191 - protein, 174 aa, Zea mays
  misc_feature (1)..(1): Xaa can be any naturally occurring amino acid
  misc_feature (4)..(5): Xaa can be any naturally occurring amino acid
  misc_feature (8)..(8): Xaa can be any naturally occurring amino acid
  misc_feature (10)..(10): Xaa can be any naturally occurring amino acid
  misc_feature (12)..(12): Xaa can be any naturally occurring amino acid
  misc_feature (14)..(16): Xaa can be any naturally occurring amino acid
  misc_feature (18)..(19): Xaa can be any naturally occurring amino acid
  misc_feature (22)..(25): Xaa can be any naturally occurring amino acid
  misc_feature (27)..(27): Xaa can be any naturally occurring amino acid
  misc_feature (32)..(32): Xaa can be any naturally occurring amino acid
  misc_feature (34)..(36): Xaa can be any naturally occurring amino acid
  misc_feature (38)..(39): Xaa can be any naturally occurring amino acid
  misc_feature (42)..(42): Xaa can be any naturally occurring amino acid
  misc_feature (44)..(45): Xaa can be any naturally occurring amino acid
  misc_feature (47)..(47): Xaa can be any naturally occurring amino acid
  misc_feature (49)..(50): Xaa can be any naturally occurring amino acid
  misc_feature (52)..(52): Xaa can be any naturally occurring amino acid
  misc_feature (54)..(55): Xaa can be any naturally occurring amino acid
  misc_feature (60)..(61): Xaa can be any naturally occurring amino acid
  misc_feature (63)..(65): Xaa can be any naturally occurring amino acid
  misc_feature (67)..(70): Xaa can be any naturally occurring amino acid
  misc_feature (72)..(73): Xaa can be any naturally occurring amino acid
  misc_feature (76)..(80): Xaa can be any naturally occurring amino acid
  misc_feature (82)..(83): Xaa can be any naturally occurring amino acid
  misc_feature (85)..(86): Xaa can be any naturally occurring amino acid
  misc_feature (88)..(89): Xaa can be any naturally occurring amino acid
  misc_feature (91)..(98): Xaa can be any naturally occurring amino acid
  misc_feature (100)..(100): Xaa can be any naturally occurring amino acid
  misc_feature (102)..(105): Xaa can be any naturally occurring amino acid
  misc_feature (107)..(107): Xaa can be any naturally occurring amino acid
  misc_feature (109)..(116): Xaa can be any naturally occurring amino acid
  misc_feature (119)..(123): Xaa can be any naturally occurring amino acid
  misc_feature (125)..(125): Xaa can be any naturally occurring amino acid
  misc_feature (128)..(129): Xaa can be any naturally occurring amino acid
  misc_feature (132)..(135): Xaa can be any naturally occurring amino acid
  misc_feature (140)..(152): Xaa can be any naturally occurring amino acid
  misc_feature (154)..(157): Xaa can be any naturally occurring amino acid
  misc_feature (160)..(164): Xaa can be any naturally occurring amino acid
  misc_feature (166)..(166): Xaa can be any naturally occurring amino acid
  misc_feature (171)..(173): Xaa can be any naturally occurring amino acid
  Coding DNA Sequence Number=SeqID_4057
XAAXXETXDXSXLXXXLXXVMXXXXRXSLHTXLXXXYXXAVXIXXHXSXXNXVXXPHRPXXTXXXAXXXXLXXNRXXXXXPXXDXXDXXAXXXXXXXXRXAXXXXSXSXXXXXXXXGLXXXXXYXLCXXPGXXXXRLPRXXXXXXXXXXXXXSXXXXRPXXXXXWXTRSGXXXC

SEQ ID NO: 10192 - protein, 86 aa, Zea mays
  misc_feature (25)..(25): Xaa can be any naturally occurring amino acid
  Coding DNA Sequence Number=SeqID_4058
  Homolog annotation: Hit_ID=O82157; Match level="QueryCoverage=53%, HitCoverage=47%, E-value=2e-09, Identity=67%"; Hit description=Early nodulin
  Pfam annotation: Domain name=ENOD93; Domain location=3-72; Score =56.0; E_value=1.3e-13; Accession=PF03386.5; Description=Early nodulin 93 ENOD93 protein
  Subcellular localization annotation: CTP_CleavageSite=8; ConfidenceScore=5.02e-01
PPVKKIVLLGPKNPPKPGPVVPVPXLVGPRAPPWAKGNFNYPAQALIIFPPCIAGFFTPADKPFLGNARQNPIGKLAKSPLCKNVA

SEQ ID NO: 10193 - protein, 125 aa, Zea mays
  misc_feature (3)..(4): Xaa can be any naturally occurring amino acid
  misc_feature (12)..(12): Xaa can be any naturally occurring amino acid
  Coding DNA Sequence Number=SeqID_4059
GLXXRWYKSAMXRTPLHTARDHLHYRETTKFDGFSRSRYGPRNKKPMQDLMYSGFEFENIKVKLWSTKRFLEIIKRECNPCTPQVHMRARPLHTRNGIWRPRLLMRRKHAERAHVCTLYLDPATT

SEQ ID NO: 10194 - protein, 195 aa, Zea mays
  misc_feature (93)..(93): Xaa can be any naturally occurring amino acid
  misc_feature (159)..(159): Xaa can be any naturally occurring amino acid
  Coding DNA Sequence Number=SeqID_4061
  Homolog annotation: Hit_ID=Q10LE2; Match level="QueryCoverage=48%, HitCoverage=41%, E-value=3e-16, Identity=55%"; Hit description =Expressed protein
RRRALPSEIERSRERERERLISAGLARQEAAAEEEDYGEDMAASESEEDVVAGHMPTVMVPKHINKRSLKNKALSVTLDKYALWAFATGFHKXRKKKRRKAAQKILQEKERKKKIQDRKRRKEEKEIALYGRVLTSDKNDGAGLENEDIGDDGEDVVVXQMPTVMVPKHINKRSLKNKALSVTLDKKALRDFVTG

SEQ ID NO: 10195 - protein, 87 aa, Zea mays
  Coding DNA Sequence Number=SeqID_4062
  Subcellular localization annotation: CTP_CleavageSite=33; ConfidenceScore=5.01e-01
RMVAPLELPISKRRAPPPWCSVFAVVINPPVVNAAPVSGLSRVSAIAHGGGCLSKNLYGLCRKSSLTWFHGPVVFWLPKTMVRPHMV

SEQ ID NO: 10196 - protein, 150 aa, Zea mays
  misc_feature (36)..(36): Xaa can be any naturally occurring amino acid
  misc_feature (43)..(43): Xaa can be any naturally occurring amino acid
  misc_feature (51)..(51): Xaa can be any naturally occurring amino acid
  misc_feature (62)..(62): Xaa can be any naturally occurring amino acid
  misc_feature (68)..(68): Xaa can be any naturally occurring amino acid
  Coding DNA Sequence Number=SeqID_4064
  Gene Ontology: Mol. function=structural constituent of ribosome; Cellular component=ribonucleoprotein complex; Biological process =translation
  Homolog annotation: Hit_ID=Q8LPJ7; Match level="QueryCoverage=75%, HitCoverage=81%, E-value=1e-25, Identity=62%"; Hit description=40S ribosomal protein S26-2
  Pfam annotation: Domain name=Ribosomal_S26e; Domain location=1-119; Score=186.9; E_value=5.2e-53; Accession=PF01283.9; Description =Ribosomal protein S26e
MTFKRRNGGRNKHNRGHVKPIRCSNCGKCCPKDKAXIKRFIVXRNIVEQGXLLVDVQEASVXYEGYTXLPKLYAKTQYCVSCAIHSHVVSARSRTNRRVRTPPPRFARRKEDTPKPAQPGQAPRPAGPAPAPPRAWRPSPPCPPPFKSLF

SEQ ID NO: 10197 - protein, 83 aa, Zea mays
  Coding DNA Sequence Number=SeqID_4065
PSSSLWWWSCSAALSSHHESSRCITAWGEQPTVVTKKGGKAAEAAGSTLLTIVVVMLVVTTTAAVNDALQQGSYYSPFMLSCC

SEQ ID NO: 10198 - protein, 159 aa, Zea mays
  misc_feature (71)..(71): Xaa can be any naturally occurring amino acid
  misc_feature (100)..(100): Xaa can be any naturally occurring amino acid
  Coding DNA Sequence Number=SeqID_4067
PDQPETWHDYRSDCAMIRFILLDNREANTRLPKYYVPLEDSQKHKVEYEVHRLVANRDPKFTNFVEFRTHXKVIYSEICWTAFFYYRVDITDNEFASLEXIPLLVEILDHFFSNACELDLVFNFPKVYLILDEFILAAELPEPSKKAIIERMAELEKLE

SEQ ID NO: 10199 - protein, 49 aa, Zea mays
  Coding DNA Sequence Number=SeqID_4068
PMAQHGTPRTWASEFVIELYLQGACFALVSHYLERAYKPIDVGGGQLVI

SEQ ID NO: 10200 - protein, 54 aa, Zea mays
  Coding DNA Sequence Number=SeqID_4070
  Subcellular localization annotation: CTP_CleavageSite=43; ConfidenceScore=5.32e-01
GIRPLFFFLAVTLSPQGRNQPFDVGKGSTSCCFVKRFFYVFASAFLEPNLVPVR

SEQ ID NO: 10201 - protein, 142 aa, Zea mays
  misc_feature (65)..(65): Xaa can be any naturally occurring amino acid
  misc_feature (69)..(69): Xaa can be any naturally occurring amino acid
  misc_feature (79)..(81): Xaa can be any naturally occurring amino acid
  misc_feature (86)..(87): Xaa can be any naturally occurring amino acid
  misc_feature (89)..(89): Xaa can be any naturally occurring amino acid
  misc_feature (93)..(93): Xaa can be any naturally occurring amino acid
  misc_feature (95)..(95): Xaa can be any naturally occurring amino acid
  misc_feature (99)..(100): Xaa can be any naturally occurring amino acid
  misc_feature (107)..(107): Xaa can be any naturally occurring amino acid
  misc_feature (109)..(109): Xaa can be any naturally occurring amino acid
  misc_feature (111)..(116): Xaa can be any naturally occurring amino acid
  misc_feature (120)..(120): Xaa can be any naturally occurring amino acid
  misc_feature (124)..(124): Xaa can be any naturally occurring amino acid
  Coding DNA Sequence Number=SeqID_4072
  Homolog annotation: Hit_ID=Q5S4W1; Match level="QueryCoverage=73%, HitCoverage=21%, E-value=2e-36, Identity=76%"; Hit description =Putative uncharacterized protein
SITKKRKSPEVSVGAPSGGRKGMNIIPHAANYLTFQTPSEMQTPLNNGVATNESSDLTSSVAKCXYDKXGTYSSSNTTXXXTPQQXXFXNSDXEXTPTXXTIVTIRXNXMXXXXXXIGTXTVAXEPGHHTYYYWTMHTTGIH

SEQ ID NO: 10202 - protein, 112 aa, Zea mays
  Coding DNA Sequence Number=SeqID_4073
PKKRLALGQSVFPPKTPKNIFLFYNNPRGARKDDPNATTDPHKKGGHPPTGMATDANHTNDRRRKAYSRGRLKKTTGDTLRGQICLLGLEGSFSEGTAESLRLWAQRISFPV

SEQ ID NO: 10203 - protein, 85 aa, Zea mays
  misc_feature (32)..(32): Xaa can be any naturally occurring amino acid
  misc_feature (34)..(34): Xaa can be any naturally occurring amino acid
  Coding DNA Sequence Number=SeqID_4074
  Subcellular localization annotation: CTP_CleavageSite=44; ConfidenceScore=5.17e-01
TTTFIVNRYNSNFFFNKCLAGHQAKKGLQPLXFXYTLGESSNTPAQRRAAFLSENLWTELEFLLFKTQGVAIALWVCGIIYSRHE

SEQ ID NO: 10204 - protein, 201 aa, Zea mays
  misc_feature (1)..(76): Xaa can be any naturally occurring amino acid
  Coding DNA Sequence Number=SeqID_4076
XXXXXXXXXXXXXXXXXXXXXXXXXXXXXXXXXXXXXXXXXXXXXXXXXXXXXXXXXXXXXXXXXXXXXXXXXXXXRRRRRQALDMGKYVELLGHGRAHPPRAPTPTARRPRASTYHPPAGGPAAARDGRKGDSATAARRRRRDAEAAGAQVRRLRDHPPHRRLGRLAWEWDARRQPSPDGGGDLSIFIATHCRASQSVLR

SEQ ID NO: 10205 - protein, 203 aa, Zea mays
  Coding DNA Sequence Number=SeqID_4078
  Gene Ontology: Mol. function=binding; Cellular component=mitochondrion
  Homolog annotation: Hit_ID=A2X8D4; Match level="QueryCoverage=92%, HitCoverage=86%, E-value=2e-35, Identity=46%"; Hit description =Putative uncharacterized protein
  Pfam annotation: Domain name=TPR_2; Domain location=109-142; Score =23.3; E_value=0.00092; Accession=PF07719.7; Description =Tetratricopeptide repeat
  Pfam annotation: Domain name=TPR_2; Domain location=143-176; Score =8.1; E_value=3; Accession=PF07719.7; Description=Tetratricopeptide repeat
  Pfam annotation: Domain name=TPR_4; Domain location=109-134; Score =15.0; E_value=0.29; Accession=PF07721.5; Description=Tetratricopeptid e repeat
  Pfam annotation: Domain name=TPR_4; Domain location=143-168; Score =12.1; E_value=1.4; Accession=PF07721.5; Description=Tetratricopeptide repeat
  Pfam module annotation: Pfam domain module=TPR_2::TPR_2::TPR_4::TPR _4; Domain location=109-142::143-176::109-134::143-168
  Subcellular localization annotation: CTP_CleavageSite=64; ConfidenceScore=5.64e-01
MTLSLSTSFLPIPAAVKAIASSAHPILSSLRMAASAAVLFAATSPALACTPSAPPSPLTPLTVTVSHDDAIPDASRLFEKLIIETACLARVGRADEARSRLATAGCGESYARLLAAQVLFVDGKLDEAIAAFEELAREDPADYRPLFCQGVLYLALGREAESESMLERCREVGGDALIIDPSVMITPNVETEFDGEKPEPAKV

SEQ ID NO: 10206 - protein, 118 aa, Zea mays
  Coding DNA Sequence Number=SeqID_4079
  Gene Ontology: Mol. function=nucleic acid binding; Cellular component= nucleus; Biological process=positive regulation of RNA export from nucleus
  Homolog annotation: Hit_ID=Q9XFD1; Match level="QueryCoverage=100%, HitCoverage=45%, E-value=8e-63, Identity=100%"; Hit description =Nuclear cap-binding protein
  Pfam annotation: Domain name=RRM_1; Domain location=36-107; Score =72.9; E_value=1.1e-18; Accession=PF00076.12; Description=RNA recognition motif. (a.k.a. RRM, RBD, or
MASLFKEQAKLSAYRDRRFSGTQEEFDEALRASTTVYIGNVSFYTTEEQLYELFSRAGEIKKIIMGLDKNTKTPCGFCFVLFYSREDTEDAVKYISGTILDDRPIRVDFDWGFQEGRQ

SEQ ID NO: 10207 - protein, 152 aa, Zea mays
  Coding DNA Sequence Number=SeqID_4080
  Homolog annotation: Hit_ID=A2YNJ9; Match level="QueryCoverage=59%, HitCoverage=54%, E-value=4e-13, Identity=49%"; Hit description =Putative uncharacterized protein
  Pfam annotation: Domain name=DUF1195; Domain location=44-152; Score =24.4; E_value=1.7e-05; Accession=PF06708.2; Description=Protein of unknown function (DUF1195)
  Subcellular localization annotation: CTP_CleavageSite=65; ConfidenceScore=5.24e-01
RGRPGLSAAANYKKAAHHAPGPAPSCSPAPHPATTDAGMKAVPADSAAPPVPMPMPMPATKITIPVSAVGGAEAALLGKGRYKVWALAAIALLALWSMSAASVSLRWSSSGDLASVYGDLDVPLADDLDSLEMEEREKLLLQMCHPHTQHHR

SEQ ID NO: 10208 - protein, 150 aa, Zea mays
  misc_feature (103)..(103): Xaa can be any naturally occurring amino acid
  misc_feature (126)..(126): Xaa can be any naturally occurring amino acid
  Coding DNA Sequence Number=SeqID_4081
  Gene Ontology: Mol. function=transcription regulator activity; Cellular component=nucleus; Biological process=negative regulation of transcription from RNA polymerase III promoter
  Homolog annotation: Hit_ID=A7P3I1; Match level="QueryCoverage=100%, HitCoverage=67%, E-value=4e-41, Identity=58%"; Hit description =Chromosome chr1 scaffold_5, whole genome shotgun sequence
  Pfam annotation: Domain name=Maf1; Domain location=25-150; Score =18.2; E_value=2.9e-07; Accession=PF09174.1; Description=Maf1 regulator
MKFLEYTPFDSINLFLEQLDLGDCTIRGNLEAFSCKHTATDRRLSISLEHEILDYLGKSSDSDPSSPAEHLASRSCRKTLIYLGLTLGHIYPDDDFSAGRAHXLPTHDVKCFKHMPDSYLSDASRXGSATNEGRSLLDSMTKAIDEVISI

SEQ ID NO: 10209 - protein, 94 aa, Zea mays
  Coding DNA Sequence Number=SeqID_4082
  Subcellular localization annotation: CTP_CleavageSite=44; ConfidenceScore=5.69e-01
SRWQFSGTVSVSSPSAFSPISGSRMHQQRTLLLWPLAHFLPHPRSSSRVSSSRSPPSVISYDLSACILQTDIAHTAAYHTAHQSAPPAGAPLCT

SEQ ID NO: 10210 - protein, 185 aa, Zea mays
  misc_feature (46)..(46): Xaa can be any naturally occurring amino acid
  misc_feature (125)..(125): Xaa can be any naturally occurring amino acid
  misc_feature (134)..(134): Xaa can be any naturally occurring amino acid
  Coding DNA Sequence Number=SeqID_4084
  Gene Ontology: Mol. function=enzyme inhibitor activity; Cellular component=cell wall; Biological process=cell wall modification
  Homolog annotation: Hit_ID=O24596; Match level="QueryCoverage=92%, HitCoverage=30%, E-value=3e-82, Identity=84%"; Hit description =Pectin methylesterase-like protein
  Pfam annotation: Domain name=Pectinesterase; Domain location=1-170; Score=77.4; E_value=1.6e-27; Accession=PF01095.10; Description =Pectinesterase
GDWVHRGRPGLPLCVISGTIDFIFGNSAAVFQNCLIVTRRAMDNQXNSVTAHGRTDPNMKSGLAIHNCRLVPDQKLFPDRFKIPSYLGRPCNEFSCRHLMESTIADYITAEGYMPCNGDFGIRTXFHPEYNNRXGPGAGTSKRVNWPGFHVIGRKEAEPFTAGPFIDGAMWLKYTGAPHKLGFKF

SEQ ID NO: 10211 - protein, 67 aa, Zea mays
  Coding DNA Sequence Number=SeqID_4085
QMLLGRSGGDPLRTSILSIWKIIYSSVSLSNIRVHLLQYEKCDPMFVRFLCKTVILLTVLNYPFFYI

SEQ ID NO: 10212 - protein, 283 aa, Zea mays
  Coding DNA Sequence Number=SeqID_4087
  Gene Ontology: Mol. function=ARF GTPase activator activity; Cellular component=Golgi apparatus; Biological process=regulation of ARF GTPase activity
  Homolog annotation: Hit_ID=Q5KQL0; Match level="QueryCoverage=91%, HitCoverage=66%, E-value=1e-105, Identity=73%"; Hit description =Putative zinc finger protein
  Pfam annotation: Domain name=ArfGap; Domain location=13-129; Score =174.3; E_value=3.1e-49; Accession=PF01412.9; Description=Putative GTPase activating protein for Arf
  Pfam annotation: Domain name=GATA; Domain location=28-61; Score=4.8; E_value=0.099; Accession=PF00320.17; Description=GATA zinc finger
  Pfam module annotation: Pfam domain module=ArfGap::GATA; Domain location=13-129::28-61
MAAAAFDAYTDKNAIFRRLKAKPENKMCFDCNAKNPTWASVTYGIFLCLDCSAVHRSLGVHITFVRSTNLDSWTPDQLKMMAFGGNNRAHAFFKQHGWTDGGKVEAKYTSRAAELYRQMLNKEVAKSAITDNALPSSPVTVSEASKPSDDFPEFKLSDAPAPPAENLNGKHEPKSPKSAPRSPKAATHPTFATSVKKPIGAKKVGGKTGGLGVRKLTTKPNESLYEQKPEEPKPAIPALTAPTAKGGPSLHSRFEYVENEPSAAVLLSYLHRITDSSCTATAL

SEQ ID NO: 10213 - protein, 107 aa, Zea mays
  misc_feature (80)..(80): Xaa can be any naturally occurring amino acid
  Coding DNA Sequence Number=SeqID_4088
  Gene Ontology: Mol. function=fructose-bisphosphate aldolase activity; Cellular component=cytoplasm; Biological process=response to stress
  Homolog annotation: Hit_ID=P17784; Match level="QueryCoverage=71%, HitCoverage=21%, E-value=3e-28, Identity=80%"; Hit description =Fructose-bisphosphate aldolase cytoplasmic isozyme
MFYNKRNKFSIYMIRLLKLQIMWSLGKAILTLGKRCAKYYEAGARFAKWRAVLKIGPNEPSQLCIDLYARRLARHANNKXKNDLLPIVEPDCLVDGPHDIDRCAYVT

SEQ ID NO: 10214 - protein, 95 aa, Zea mays
  Coding DNA Sequence Number=SeqID_4089
HGRGKRGIGLECDSFFVPVGLEASPATALHHGWDCGLWERRRGEEREGKGMYLYSTTNVAGGRSQAVDWASERARSPHPDPPAEGAGTRHRGVPR

SEQ ID NO: 10215 - protein, 126 aa, Zea mays
  Coding DNA Sequence Number=SeqID_409
LIEPPTHETTLRCPILIDAVRGEERDAAAMEIVFRLCLRRKLGSVGFPGVQRRSLWCSQVEEAFGAAPISHQRQQLPRNHTSSRPGDCMAQPPQCGHEDPKNHPGNWNLKCQEKNRWFKRSRITRS

SEQ ID NO: 10216 - protein, 166 aa, Zea mays
  Coding DNA Sequence Number=SeqID_411
  Subcellular localization annotation: CTP_CleavageSite=33; ConfidenceScore=5.11e-01
LGLLPGVQLELRIFSLSSHGAQQSSLFPSHGRRADFSGAPWRLRPVELLQLATLSLGPRVRRLWLGHSSSSSRSLLAHGRCDSSSTRRWNFCELSFHSRAPSSSPLRAGRPARHGGTRPCSLFLARCSGFHLFASVLLFSSARPGRRRQLPVHAAMSLCSSWPLPC

SEQ ID NO: 10217 - protein, 185 aa, Zea mays
  Coding DNA Sequence Number=SeqID_413
CRYDTFGRSYIIICMSSLTFMTMLFRRTFFYMLLLEFMVVSARVLANFWVRHWTHYYTRTHACIHGHAQAQRCSSSATDAAAASEPAERARAGDGPAERAEPSDAAAQRAVDAAAGPPAEHVGGLGLLVVLVHGAGTAVARREGGSSVAVAGRCSCRRRCDGEAEQQGGDEPPLGCHWPLSLITS

SEQ ID NO: 10218 - protein, 164 aa, Zea mays
  misc_feature (105)..(105): Xaa can be any naturally occurring amino acid
  misc_feature (140)..(140): Xaa can be any naturally occurring amino acid
  misc_feature (155)..(155): Xaa can be any naturally occurring amino acid
  Coding DNA Sequence Number=SeqID_415
  Gene Ontology: Mol. function=catalytic activity; Cellular component =cellular_component; Biological process=metabolic process
  Homolog annotation: Hit_ID=Q2R712; Match level="QueryCoverage=98%, HitCoverage=21%, E-value=2e-39, Identity=51%"; Hit description =Cycloartenol synthase, putative, expressed
MWRLKIGEGGGPWMQTVSGFHGRQVWEYDPDAGTDEERSKVEQLRREFTENRFRRRESQDLLMRMQLTGQKHLHADEMGAATKIEDGDEVTEERLPESLRRALGXLSALQAEDGHWPGDFSGITYIMPFWIFALHITGSXDVVLSKEHRREICRXIYNHQNEVL

SEQ ID NO: 10219 - protein, 77 aa, Zea mays
  Coding DNA Sequence Number=SeqID_416
SANPRRNMPPVSNSHPARVLPGLLATESQSVDHSGAPQYLAPRQFIVTSELLLRRRNSSAKATIGEEFGTAHASMGV

SEQ ID NO: 10220 - protein, 135 aa, Zea mays
  Coding DNA Sequence Number=SeqID_418
  Subcellular localization annotation: CTP_CleavageSite=48; ConfidenceScore=5.23e-01
TRIENELPSVPSLSAAAQVPFISGAVSSPSSYPRFLLPFPAPDPTPLRACSRFGKKTYPFGCLGHSDLAPPRRRRAGLARRIYVSVSMVCKASVLGRRAYSLVWRRIRRPSLLLVPGLDQGTQGSSANLPWSWEW

SEQ ID NO: 10221 - protein, 215 aa, Zea mays
  misc_feature (16)..(16): Xaa can be any naturally occurring amino acid
  Coding DNA Sequence Number=SeqID_420
  Subcellular localization annotation: CTP_CleavageSite=67; ConfidenceScore=5.01e-01
KVNRILLKTLNICIYXLLSGQCRTAPLPTHTRQRNPAPQRPPAPHGRAPQSVHRPRPPSACPPSRILATANSSAYHGRPLPVLPRIGCPQQSRAPAALGQTERDRGAARSDFVRFRLVCKLWMDGSGIRKPRELGALVIDHSFHPRRWILLTEEKEEADEATPTPTPTRRTLLNLTTRKTIQVDLPELAGHSVVPGPAAAPEGMLVVRDLRGRWG

SEQ ID NO: 10222 - protein, 116 aa, Zea mays
  Coding DNA Sequence Number=SeqID_422
AATSTAPSSCSSSASPAVVYLYRGLHHAGMFFSFYIGEVITEHLTIWYFLLCFDAFHISHRGNRKNKYMMSSSSAISYRPHEYSYMRTVHHLNYGCKPRRRSLIPSTVIICIPSTE

SEQ ID NO: 10223 - protein, 125 aa, Zea mays
  misc_feature (66)..(66): Xaa can be any naturally occurring amino acid
  misc_feature (88)..(88): Xaa can be any naturally occurring amino acid
  Coding DNA Sequence Number=SeqID_423
  Homolog annotation: Hit_ID=A3AL01; Match level="QueryCoverage=96%, HitCoverage=22%, E-value=2e-36, Identity=66%"; Hit description =Putative uncharacterized protein
MMSRGGGNRGEEVSLLHSVVAVGVVAKEPMTTLGSVNLEWFSTRMKQLFVDNGIRASFVGTSVATXLVVEDNAVEELKEVLNHREPEXRAADAIDESDRTLLDLVVGQGHTNIVQVLLEYGVDAD

SEQ ID NO: 10224 - protein, 178 aa, Zea mays
  Coding DNA Sequence Number=SeqID_424
QEQQQRSTNQQKGMEQTISLRFRRIHEVLHIVDDAMLEAFAAGQDTTLPLVHAIPERRVEVQNVHFCVLHGWTAVVPLPVVECGLPTASPSIPEPAGDAGSSASTPMDVDLAAPPPPPPTAGAVGRRSPSPLVSVVVGTIAARRGQPPHAIDAPRGRVIFTGHHPNGVAPSSSSNGRA

SEQ ID NO: 10225 - protein, 90 aa, Zea mays
  Coding DNA Sequence Number=SeqID_4090
HTTRRNTDGPCHCPAAAAGAADRCRWSKGGVRGFLMNVRDSLQHDEIPEDRCARALLLMVALTFLFVFTDVYAVMDLPCESNLCVYLPEM

SEQ ID NO: 10226 - protein, 130 aa, Zea mays
  Coding DNA Sequence Number=SeqID_4092
  Gene Ontology: Mol. function=structural constituent of ribosome; Cellular component=ribonucleoprotein complex; Biological process =translation
  Homolog annotation: Hit_ID=Q9S9P1; Match level="QueryCoverage=100%, HitCoverage=90%, E-value=2e-53, Identity=80%"; Hit description=40S ribosomal protein S12-1
  Pfam annotation: Domain name=Ribosomal_L7Ae; Domain location=29-124; Score=115.2; E_value=1.9e-31; Accession=PF01248.16; Description =Ribosomal protein L7AeL30eS12eGadd45 family
MSGDEAAAPVVVPPVAEPAAIPEDMDLLTALELTLRKARAHGGVVRGLHESAKLIEKRVAQLCVLAEDCNQPDYVKLVKALCADHNINLLTVPSAKTLGEWAGLCKIDSEGNARKVVGCSCLVVKDYGED

SEQ ID NO: 10227 - protein, 411 aa, Zea mays
  misc_feature (1)..(1): Xaa can be any naturally occurring amino acid
  Coding DNA Sequence Number=SeqID_4093
  Gene Ontology: Mol. function=protein serine/threonine kinase activity; Cellular component=intrinsic to membrane; Biological process=protein amino acid phosphorylation
  Homolog annotation: Hit_ID=Q10NR1; Match level="QueryCoverage=95%, HitCoverage=65%, E-value=1e-156, Identity=73%"; Hit description =Mitogen-activated protein kinase 1, putative, expressed
  Pfam annotation: Domain name=Pkinase; Domain location=133-386; Score =224.0; E_value=3.4e-64; Accession=PF00069.15; Description=Protein kinase domain
  Pfam annotation: Domain name=Pkinase_Tyr; Domain location=133-386; Score=106.6; E_value=7.7e-29; Accession=PF07714.7; Description =Protein tyrosine kinase
  Pfam module annotation: Pfam domain module=Pkinase::Pkinase_Tyr; Domain location=133-386::133-386
XPDARRAPGQGGIKGVRPPPVLKPPPSMALPAVCGVGSTWDILRSLAPDEKDDAPASRSGRRFGHQDAVEKDDDERAAVLLMLDDLRLEESSESFTGTSSLSTTNDDDTSSTTTESMFYISPNGRFRRRIKSWSRGVLLGSGSFGTVYEGISDEGVFFAVKEVNLFDKGSNAKQCIFQLEQEIALLSQFEHENIVQYYGTDKEDSKLYIFLELVTQGSLASLYHKYRLRDTQVSAYTRPTRPRTRGLHERNIVHRDIKCANILVHANGSVKLADFGLAKEITKFNELKSCKGTVYWMAPEVVDPQQTYGPAADIWSLGCTVLEMLTRQIPYPDLEWAQALYRIGKGESPAIPNTLSRDARDFISRCVKPNPEDRPSASKLLEHPFVNKSIRSVRSMRTTPSRSNSSTRGIN

SEQ ID NO: 10228 - protein, 122 aa, Zea mays
  misc_feature (29)..(29): Xaa can be any naturally occurring amino acid
  Coding DNA Sequence Number=SeqID_4094
  Gene Ontology: Mol. function=ribulose-bisphosphate carboxylase activity; Cellular component=chloroplast ribulose bisphosphate carboxylase complex; Biological process=carbon utilization by fixation of carbon dioxide
  Homolog annotation: Hit_ID=P05348; Match level="QueryCoverage=88%, HitCoverage=62%, E-value=6e-32, Identity=67%"; Hit description =Ribulose bisphosphate carboxylase small chain, chloroplast precursor
  Pfam annotation: Domain name=RuBisCO_small; Domain location=9-118; Score=123.7; E_value=5.6e-34; Accession=PF00101.10; Description =Ribulose bisphosphate carboxylase, small chain
PRGRPREHISETLSYLPPLSDGDLLKYGXYLLRNVVHNLPLEFQKDRLCTPGNSTSPSYYDGRYWTMWKLTMSGCNDATQVYKELQEDIKSYPDAFHRVIGFYNIKQTQCDSFIAYEPAVLD

SEQ ID NO: 10229 - protein, 125 aa, Zea mays
  Coding DNA Sequence Number=SeqID_4095
SDHLLALVPLSLSLLFFPFISSFLFSCMQWFLLLPTILLLMYPAWHHPSTITYVVQRLSIRWVRNIYVNASSGYHTCVMCNRYIYKTAEAPTILYNWSFYISSSVYHNLFSSHLQKTCVPLLLDE

SEQ ID NO: 10230 - protein, 180 aa, Zea mays
  Coding DNA Sequence Number=SeqID_4097
  Gene Ontology: Mol. function=sequence-specific DNA binding; Cellular component=nucleus; Biological process=regulation of transcription, DNA-dependent
  Homolog annotation: Hit_ID=A7YJG3; Match level="QueryCoverage=97%, HitCoverage=89%, E-value=3e-81, Identity=85%"; Hit description=MADS1 protein
  Pfam annotation: Domain name=K-box; Domain location=72-171; Score =3.1; E_value=0.00025; Accession=PF01486.8; Description=K-box region
  Pfam annotation: Domain name=SRF-TF; Domain location=9-59; Score =80.2; E_value=6.8e-21; Accession=PF00319.9; Description=SRF-type transcription factor (DNA-binding and dimerisation domain)
  Pfam module annotation: Pfam domain module=K-box::SRF-TF; Domain location=72-171::9-59
MGRGRSEIKRIDNPTQRQSTFYKRRDGLFKKARELAVLCDADLLLLLFSASGKLYQYLAPTVPSVKEFVERYEASTHTKVWSDIRQERRRELEKVAKMCDLLEKELRFMTVDDGERYTVPSLAALEHNLEAAMHRVRSEKDRKIGGEMSYLQNIIRGSHEERYGLCDKLAHAQTRKHTIL

SEQ ID NO: 10231 - protein, 128 aa, Zea mays
  Coding DNA Sequence Number=SeqID_4098
  Gene Ontology: Mol. function=two-component response regulator activity; Cellular component=intracellular; Biological process=two -component signal transduction system (phosphorelay)
  Homolog annotation: Hit_ID=Q89ER9; Match level="QueryCoverage=95%, HitCoverage=26%, E-value=1e-54, Identity=89%"; Hit description=Two -component response regulator
  Pfam annotation: Domain name=HTH_8; Domain location=64-104; Score =64.3; E_value=4.2e-16; Accession=PF02954.9; Description=Bacterial regulatory protein, Fis family
LGTGPPLENTMHRSVLMAQGDEIGPDAILTPDGDRLDLAKTVPAVAHATMAAEQVTRALVGRTVADVERDLILETLKHCLGNRTHAANILGISIRTLRNKLNEYADGGIPITPAGTPGEYPRMPMIGA

SEQ ID NO: 10232 - protein, 95 aa, Zea mays
  misc_feature (17)..(17): Xaa can be any naturally occurring amino acid
  misc_feature (45)..(45): Xaa can be any naturally occurring amino acid
  Coding DNA Sequence Number=SeqID_4099
  Gene Ontology: Mol. function=sodium:dicarboxylate symporter activity; Cellular component=membrane; Biological process=dicarboxylic acid transport
  Homolog annotation: Hit_ID=Q2QQX3; Match level="QueryCoverage=72%, HitCoverage=13%, E-value=1e-23, Identity=79%"; Hit description =Expressed protein
MPPDKQAPMDARQDGVXRGQVIRMEREAVIPILKPKLVMRLAYLXLEHEADRNEFLKLCKNVDYTIRAWYLLQFEDLMASLRFVFVLLLLFDCSR

SEQ ID NO: 10233 - protein, 97 aa, Zea mays
  Coding DNA Sequence Number=SeqID_4100
WFPITGGFMFVCGVCYLLPLLVSYMVILVQTFSRHTNQSGGYGPQGYRPQGHGAASQLGPRSQNHGYGYPPRGMPPPQNYNAPYGGYPPQRPSRGGM

SEQ ID NO: 10234 - protein, 139 aa, Zea mays
  misc_feature (55)..(55): Xaa can be any naturally occurring amino acid
  misc_feature (68)..(68): Xaa can be any naturally occurring amino acid
  Coding DNA Sequence Number=SeqID_4101
  Gene Ontology: Mol. function=L-ascorbate peroxidase activity; Cellular component=integral to membrane; Biological process=response to oxidative stress
  Homolog annotation: Hit_ID=Q6ZJJ1; Match level="QueryCoverage=100%, HitCoverage=47%, E-value=2e-53, Identity=77%"; Hit description =Probable L-ascorbate peroxidase 4
MPAPMPDAQYLRQVDRARRHLRALISNKGCAPIMLRLPWHDAGTYDLKTKTGGAXGSITYEEEYTHGXSNAGLKTAIDLLEPIKAKNPKITYAHLYRLAGVCVFLATVRPTVELIPVRRDPSMSPRERCLPGAKKGAAH

SEQ ID NO: 10235 - protein, 107 aa, Zea mays
  Coding DNA Sequence Number=SeqID_4102
  Subcellular localization annotation: CTP_CleavageSite=64; ConfidenceScore=5.52e-01
PAGNLVTGSGPRPNFTRPDRCASASNTSALCKETQPHRAHPCPQATAVRRAPSPTRRGRSEAHRGASLWPGRSMSPHEARRRDRQIATAKRRLLGCSIWLIMEVNGG

SEQ ID NO: 10236 - protein, 83 aa, Zea mays
  Coding DNA Sequence Number=SeqID_4104
  Subcellular localization annotation: CTP_CleavageSite=46; ConfidenceScore=5.16e-01
NLKPYPILAPAPGLLAADEISPQPPPTDGYRQRLIWTSILSILFSSSSLRSSSSLTRIPNPNRLIPILTSSWCSSSRWCSQAT

SEQ ID NO: 10237 - protein, 107 aa, Zea mays
  Coding DNA Sequence Number=SeqID_4106
  Gene Ontology: Mol. function=transporter activity; Cellular component= outer membrane-bounded periplasmic space; Biological process=transport
  Homolog annotation: Hit_ID=Q89D45; Match level="QueryCoverage=68%, HitCoverage=24%, E-value=9e-33, Identity=91%"; Hit description=ABC transporter amino-acid-binding protein
SGPRCACIRPHHPERGEKVKHFRHIGIALVATFAVSQAGAEELTGTLKNIKDTGAITLGFRDSSIPFSYLDDNQKPVGFAMDICYKIVDAVKKELKLDKLEGGPGTQ

SEQ ID NO: 10238 - protein, 78 aa, Zea mays
  misc_feature (39)..(39): Xaa can be any naturally occurring amino acid
  misc_feature (56)..(56): Xaa can be any naturally occurring amino acid
  Coding DNA Sequence Number=SeqID_4107
  Homolog annotation: Hit_ID=Q8S160; Match level="QueryCoverage=91%, HitCoverage=12%, E-value=4e-22, Identity=76%"; Hit description=BNR repeat domain protein-like
KPLDERALPRSLQESSVFDIRKGFEDILDAAYTDALNRXEMFHRSMLSGVKAKLLXRRVRQMVHQCILSLSREDKPLI

SEQ ID NO: 10239 - protein, 155 aa, Zea mays
  misc_feature (55)..(55): Xaa can be any naturally occurring amino acid
  Coding DNA Sequence Number=SeqID_4108
  Gene Ontology: Biological process=cell volume homeostasis
  Homolog annotation: Hit_ID=Q10P28; Match level="QueryCoverage=84%, HitCoverage=56%, E-value=4e-43, Identity=69%"; Hit description =Nucleotide-sensitive chloride conductance regulator family protein, expressed
  Pfam annotation: Domain name=ICln_channel; Domain location=39-115; Score=99.3; E_value=1.2e-26; Accession=PF03517.4; Description =Nucleotide-sensitive chloride conductance regulator (ICln)
SARGDIADCCSPQLDAVYGEELVRVDRTVAGALGPRSPESPETLCVTTRRVIWLXEAEKGKGYAVDFLAISLHAVSRDLEAYPSTCIYTQIEAAVSTEEEAGESNPEANELELSRVSEMRLILADPGQLDALVDVLFSTSTSGAVVSAVCRSVSV

SEQ ID NO: 10240 - protein, 64 aa, Zea mays
  Coding DNA Sequence Number=SeqID_4109
  Subcellular localization annotation: CTP_CleavageSite=21; ConfidenceScore=5.22e-01
TATVKNFKSHPTVEFTFSHPRCSAVRRSTLSCVCMRGLEGGKREIGVAVKNNNNKYGSWYRVDI

SEQ ID NO: 10241 - protein, 141 aa, Zea mays
  Coding DNA Sequence Number=SeqID_4111
GLVVLVVAVGGPGAGGGEGEGAGAAAAPGEGRAAGGRLGVRTGRRWGPAAPPTAGRSSAGGWSERHTQKSDAASGEERRSTAATSANADDDASIAQSQSLATPPHQSRSRRGGRRRGRGRGGGTGGRGRGAGFRQKVGGTG

SEQ ID NO: 10242 - protein, 96 aa, Zea mays
  Coding DNA Sequence Number=SeqID_4113
TGCARSTTAGCLRGTGKAPCKCLKSITGRLGGGVSMAKPANIPRQVGGFRWGAHQPPRWLPQDQLFDGTIVEVAPSLDGRVRGHQQHPVVFVTKMS

SEQ ID NO: 10243 - protein, 67 aa, Zea mays
  misc_feature (21)..(21): Xaa can be any naturally occurring amino acid
  misc_feature (24)..(24): Xaa can be any naturally occurring amino acid
  misc_feature (26)..(26): Xaa can be any naturally occurring amino acid
  Coding DNA Sequence Number=SeqID_4115
LVWRLGSLLADSHTVVGDGQXELXSXPATFLVTHQAIMSALRYIAGSPPSQAPGWLLEVVVFVQART

SEQ ID NO: 10244 - protein, 189 aa, Zea mays
  Coding DNA Sequence Number=SeqID_4117
VVGSAVSKVLIGGQAKGTAVNSNLEKLSFNEVILWEYPMKCADWQPSAPPMSLEILLASGTSRPIPWPNFVLSCISCANLYFSWALKPPWLLQPRQDISAVLRPVPWPSFRAFHDAIARWWDFSLLMLPPWFPSAWCYSGYRSGVLGIMSRITSFIFAVWLSLNHYDVHYSHINLMACMMLIRPKKKKK

SEQ ID NO: 10245 - protein, 97 aa, Zea mays
  Coding DNA Sequence Number=SeqID_4119
  Gene Ontology: Mol. function=unfolded protein binding; Cellular component=cytoplasm; Biological process=response to stress
  Homolog annotation: Hit_ID=A2Z2G4; Match level="QueryCoverage=100%, HitCoverage=16%, E-value=6e-30, Identity=69%"; Hit description =Putative uncharacterized protein
SKKPLEFTPENPIMDKLRKRAEVDKNDKSVKVLVMLLFKTAFLTSGLSLDDPNTLGNGIPRMFKLGLSINKDKLVEAKVKMPQFEDNVGESKMEEVD

SEQ ID NO: 10246 - protein, 130 aa, Zea mays
  misc_feature (48)..(48): Xaa can be any naturally occurring amino acid
  Coding DNA Sequence Number=SeqID_4120
  Gene Ontology: Mol. function=structural constituent of ribosome; Cellular component=ribonucleoprotein complex; Biological process =translation
  Homolog annotation: Hit_ID=Q9LX88; Match level="QueryCoverage=100%, HitCoverage=100%, E-value=4e-63, Identity=92%"; Hit description=40S ribosomal protein S15a-4
  Pfam annotation: Domain name=Ribosomal_S8; Domain location=5-130; Score=204.0; E_value=3.6e-58; Accession=PF00410.9; Description =Ribosomal protein S8
MVRVSVLNDALKSMYNAEKIGKRQVMIRPSSKVIIKFLTVMQRHGYIXEFEYVDDHRAGKIVVELNGRLNKCGVISPRFDVGVKEIEGWTARLLPSRQFGYIVLTTSAGIMAHEEAPRKNVGGKVLGFFY

SEQ ID NO: 10247 - protein, 113 aa, Zea mays
  Coding DNA Sequence Number=SeqID_4121
  Gene Ontology: Mol. function=structural constituent of ribosome; Cellular component=ribonucleoprotein complex; Biological process =translational elongation
  Homolog annotation: Hit_ID=O23095; Match level="QueryCoverage=100%, HitCoverage=100%, E-value=9e-36, Identity=71%"; Hit description=60S acidic ribosomal protein P1-2
  Pfam annotation: Domain name=Ribosomal_60s; Domain location=22-112; Score=107.7; E_value=3.4e-29; Accession=PF00428.9; Description=60s Acidic ribosomal protein
MSTVGELACSYAVMILEDEGISITSDKIATLVKAAGVEIEPYWPMLFAKMAEKRNVTDLIMTVGAGGGGGGAPVAAAAPAAGGGAAAAAPAKEEKKDEPAEESDGDLGFGLFD

SEQ ID NO: 10248 - protein, 124 aa, Zea mays
  misc_feature (1)..(75): Xaa can be any naturally occurring amino acid
  Coding DNA Sequence Number=SeqID_4122
XXXXXXXXXXXXXXXXXXXXXXXXXXXXXXXXXXXXXXXXXXXXXXXXXXXXXXXXXXXXXXXXXXXXXXXXXXXRILRRTAAAGSAGLAALVPLPPAAAAARPSSCIAVDSSCMELAAARTGA

SEQ ID NO: 10249 - protein, 90 aa, Zea mays
  Coding DNA Sequence Number=SeqID_4124
  Gene Ontology: Mol. function=zinc ion binding; Cellular component =nucleus; Biological process=chromatin assembly or disassembly
  Homolog annotation: Hit_ID=Q8VY05; Match level="QueryCoverage=93%, HitCoverage=8%, E-value=2e-25, Identity=58%"; Hit description =Putative SWI/SNF-related matrix-associated actin-dependent regulator of chromatin subfamily C member
  Pfam annotation: Domain name=SWIRM; Domain location=5-88; Score=36.1; E_value=1.3e-07; Accession=PF04433.7; Description=SWIRM domain
YFLFPEGWFSWKEIHPIEKQMLATFFDGKSERRTPEIYLGIRNLIMNKFHCNPEVHLESKDLCELSVGEMDARLVILEFLAYWGLVNFHP

SEQ ID NO: 10250 - protein, 79 aa, Zea mays
  Coding DNA Sequence Number=SeqID_4125
QCPLRPTRHRQENARALFLMRVLEGLMDRGFFFFFLRSEIPLIRSTCVPQCALQAPKKKKKKLIDTVDLEGGPGTQFAL

SEQ ID NO: 10251 - protein, 67 aa, Zea mays
  Coding DNA Sequence Number=SeqID_4127
  Gene Ontology: Mol. function=iron ion transmembrane transporter activity; Cellular component=vacuolar membrane; Biological process =intracellular sequestering of iron ion
  Homolog annotation: Hit_ID=A7P3X6; Match level="QueryCoverage=100%, HitCoverage=27%, E-value=1e-21, Identity=72%"; Hit description =Chromosome chr1 scaffold_5, whole genome shotgun sequence
MKREQEETITVPDTEATEIGETMLQYGLEPQEYGPVIDGRGNPQAWLHFLFRFELGLEKPDPKRALQ

SEQ ID NO: 10252 - protein, 199 aa, Zea mays
  Coding DNA Sequence Number=SeqID_4128
  Gene Ontology: Mol. function=serine carboxypeptidase activity; Cellular component=extracellular region; Biological process =proteolysis
  Homolog annotation: Hit_ID=A3CB26; Match level="QueryCoverage=89%, HitCoverage=42%, E-value=5e-64, Identity=67%"; Hit description =Putative uncharacterized protein
  Pfam annotation: Domain name=Peptidase_S10; Domain location=1-199; Score=10.4; E_value=2e-15; Accession=PF00450.12; Description=Serine carboxypeptidase
GEDPLLLWLSGGPGCSGLSGLAYEIGPFHFDARGYRGGFPTLLYRPETWTKVSNIIFMDSPVGTGFSYATSDEGLKSSDTQAVRQLAIFLRKWLEEHPGFLPNPLYIAGDSYGGMIIPALALEIDRSIELGEKIFSGLKGYIAGNPLTGGQFDTDSQIPYFHAMGLVSDELYKNARENCGGKYSAPLNAVCAEAVQAIN

SEQ ID NO: 10253 - protein, 76 aa, Zea mays
  Coding DNA Sequence Number=SeqID_4129
RGHPLIIYTQLAFVLDPFFYAASMSFHIQQKVPILFPLYMVITIDIMHRQSVVFKQIAFVVLIGSLCCPSIYGITA

SEQ ID NO: 10254 - protein, 109 aa, Zea mays
  misc_feature (1)..(65): Xaa can be any naturally occurring amino acid
  Coding DNA Sequence Number=SeqID_4131
  Gene Ontology: Mol. function=pyridoxal phosphate binding; Biological process=arginine metabolic process
  Homolog annotation: Hit_ID=Q688Q8; Match level="QueryCoverage=33%, HitCoverage=7%, E-value=3e-10, Identity=86%"; Hit description =Putative acetylornithine aminotransferase
XXXXXXXXXXXXXXXXXXXXXXXXXXXXXXXXXXXXXXXXXXXXXXXXXXXXXXXXXXXXXXXXXVVLTAGKGNVVRLVPPLIVSEKELEHAPYVIRDCLPAHHVVAGA

SEQ ID NO: 10255 - protein, 147 aa, Zea mays
  misc_feature (8)..(9): Xaa can be any naturally occurring amino acid
  misc_feature (12)..(13): Xaa can be any naturally occurring amino acid
  misc_feature (25)..(25): Xaa can be any naturally occurring amino acid
  misc_feature (34)..(34): Xaa can be any naturally occurring amino acid
  misc_feature (43)..(43): Xaa can be any naturally occurring amino acid
  misc_feature (50)..(50): Xaa can be any naturally occurring amino acid
  misc_feature (61)..(61): Xaa can be any naturally occurring amino acid
  misc_feature (74)..(75): Xaa can be any naturally occurring amino acid
  misc_feature (87)..(87): Xaa can be any naturally occurring amino acid
  misc_feature (95)..(95): Xaa can be any naturally occurring amino acid
  misc_feature (102)..(102): Xaa can be any naturally occurring amino acid
  misc_feature (106)..(107): Xaa can be any naturally occurring amino acid
  misc_feature (119)..(119): Xaa can be any naturally occurring amino acid
  Coding DNA Sequence Number=SeqID_4132
FSWFAPVXXAWXXGDVRDERLRGQXVALRPWRHXVSARRRSRXVDADQQXACFRRAPAFGXEPPCCLLCAVVCXXRHRPGLAGNHSXGGRQITIXPSALQHXADRXXSATQVRRLPRCXLTTSSASPAVCSVMTGLMNEPRKALCWK

SEQ ID NO: 10256 - protein, 191 aa, Zea mays
  Coding DNA Sequence Number=SeqID_4134
  Gene Ontology: Mol. function=structural constituent of ribosome; Cellular component=intracellular; Biological process=translation
  Homolog annotation: Hit_ID=Q7XEQ3; Match level="QueryCoverage=69%, HitCoverage=96%, E-value=3e-59, Identity=89%"; Hit description=40S ribosomal protein S17-4, putative, expressed
  Pfam annotation: Domain name=Ribosomal_S17e; Domain location=40-161; Score=215.9; E_value=9.3e-62; Accession=PF00833.8; Description =Ribosomal S17
MKKTYNLRLKPSSPRAAAPCTNQRPAAAAAGEGEEAAAAMGRVRTKTVKKTSRQVIEKYYSRMTLDFHTNKKVLEEVSILQSKRLRNKVAGFTTHLMRRIQRGPVRGISLKLQEEERERRMDFVPEKSALEVDEIRVDKETMDMLAFLGMADLPGVERAPEVTSSAAPYRQPFILNPALATAPRFLRIVIV

SEQ ID NO: 10257 - protein, 238 aa, Zea mays
  misc_feature (56)..(56): Xaa can be any naturally occurring amino acid
  misc_feature (64)..(64): Xaa can be any naturally occurring amino acid
  misc_feature (204)..(204): Xaa can be any naturally occurring amino acid
  misc_feature (226)..(226): Xaa can be any naturally occurring amino acid
  Coding DNA Sequence Number=SeqID_4135
  Gene Ontology: Mol. function=translation elongation factor activity; Cellular component=cytoplasm; Biological process=translational elongation
  Homolog annotation: Hit_ID=P13905; Match level="QueryCoverage=95%, HitCoverage=50%, E-value=1e-102, Identity=83%"; Hit description =Elongation factor 1-alpha
  Pfam annotation: Domain name=GTP_EFTU; Domain location=14-236; Score =227.3; E_value=3.5e-65; Accession=PF00009.17; Description=Elongation factor Tu GTP binding domain
ANLLHRPLPWWKETCHIKIVAIVHVDSGKSTTTGQLIYKLGGIDKRVIERCEKEAXEMNKRSFXYDWVLYKLEDERERCISIDIALWKLETNQHYCTVIDAPGHRDFIENMITVTSQADCVALIIDSTTGGFEAGIFKDGQTREHALLGFTLGERQMICCCNKMEATTAKDSKARYDEIVKEVCSYLKKVWYQPDKIPFVPISXGFEGDNMIERSTNLDWYKGPTXLLEALDQINESK

SEQ ID NO: 10258 - protein, 132 aa, Zea mays
  Coding DNA Sequence Number=SeqID_4136
  Gene Ontology: Cellular component=integral to membrane; Biological process=nodulation
  Homolog annotation: Hit_ID=O82787; Match level="QueryCoverage=87%, HitCoverage=100%, E-value=2e-43, Identity=75%"; Hit description =Early nodulin
  Pfam annotation: Domain name=ENOD93; Domain location=28-106; Score =186.0; E_value=9.6e-53; Accession=PF03386.5; Description=Early nodulin 93 ENOD93 protein
  Subcellular localization annotation: CTP_CleavageSite=46; ConfidenceScore=5.32e-01
PSLFLLLQVSKSATTSEMSTVSRASLDQKLALAKRCSREATLAGAKAAAVATIASAIPTLASVRMLPWAKANINPTGQALIVSTVAGMAYFIAADKKILSLARRHSFEEAPEHLKNTSFQGTGRPHPAFFRP

SEQ ID NO: 10259 - protein, 105 aa, Zea mays
  Coding DNA Sequence Number=SeqID_4137
  Subcellular localization annotation: CTP_CleavageSite=24; ConfidenceScore=5.17e-01
IKKLDLRGVRPPSRYYIKKKTSSRSSRKPSNPCPTHTQRHRVPCENDLDQGRVLDLCFGVGQTRGFFNHSLKIRSHGESNPRPEECYSDHLTNSARGPFAVSLVG

SEQ ID NO: 10260 - protein, 198 aa, Zea mays
  misc_feature (25)..(25): Xaa can be any naturally occurring amino acid
  misc_feature (50)..(50): Xaa can be any naturally occurring amino acid
  misc_feature (99)..(99): Xaa can be any naturally occurring amino acid
  misc_feature (153)..(153): Xaa can be any naturally occurring amino acid
  misc_feature (180)..(180): Xaa can be any naturally occurring amino acid
  Coding DNA Sequence Number=SeqID_4138
  Gene Ontology: Mol. function=protein binding; Cellular component =chloroplast; Biological process=iron-sulfur cluster assembly
  Homolog annotation: Hit_ID=A2ZNT6; Match level="QueryCoverage=100%, HitCoverage=58%, E-value=9e-37, Identity=65%"; Hit description =Putative uncharacterized protein
  Pfam annotation: Domain name=UPF0051; Domain location=24-174; Score= -52.8; E_value=0.00011; Accession=PF01458.8; Description =Uncharacterized protein family (UPF0051)
VPEGVNVADDPVHIMFAYTNSGADXENMLMSNPRVLVVAEKAAEVAIVVXEEHFGVGEEGGCYWANPVAEIIIDEGARVVHSYVQHQSFAAAHTKWTVXSRYAQQTDAGQETKCLILSPKALVNVKPNLQIIADDVKCTHGAAISGELDPNEXFYFQARGINTETATDALLYFFGAHVIXRIPFKPISEKALAQFKEL

SEQ ID NO: 10261 - protein, 146 aa, Zea mays
  Coding DNA Sequence Number=SeqID_4139
  Subcellular localization annotation: CTP_CleavageSite=21; ConfidenceScore=5.41e-01
VCRNSVSLPPTRPTPPPPPPPASPLATRSLPVHETLNLYPTPLPEPSPPPAAMAKALLSSSLLPALPRAAGGSRSAAARPLLLPPLRLRRGRRAASACAPRAGLLSGSTPSAGPTFKPRLSAPRRGYTHSLTPGSPPRARGPTHAK

SEQ ID NO: 10262 - protein, 152 aa, Zea mays
  misc_feature (32)..(32): Xaa can be any naturally occurring amino acid
  Coding DNA Sequence Number=SeqID_4141
  Gene Ontology: Mol. function=nucleic acid binding; Cellular component= ribonucleoprotein complex; Biological process=mRNA processing
  Homolog annotation: Hit_ID=Q04836; Match level="QueryCoverage=100%, HitCoverage=53%, E-value=3e-15, Identity=38%"; Hit description=31 kDa ribonucleoprotein, chloroplast precursor
  Subcellular localization annotation: CTP_CleavageSite=91; ConfidenceScore=5.78e-01
LTSTLKPLAMADSSSSTLLSHPLLSTIHSSKXGCFSSFSLLTGRTNLPFSFSSLSLSLNTKPHLKKSSCVSSVAQTSDWAQQDGEESGDVSASVAVEESEPEASLSEEEGGGGDFPEPPEEAKLFVGNLAYDVDSQALAMLFEQAGTVEIAE

SEQ ID NO: 10263 - protein, 189 aa, Zea mays
  Coding DNA Sequence Number=SeqID_4142
  Gene Ontology: Mol. function=structural constituent of ribosome; Cellular component=ribonucleoprotein complex; Biological process =mitotic spindle organization and biogenesis
  Homolog annotation: Hit_ID=P50882; Match level="QueryCoverage=100%, HitCoverage=99%, E-value=7e-89, Identity=87%"; Hit description=60S ribosomal protein L9
  Pfam annotation: Domain name=Ribosomal_L6; Domain location=12-85; Score=78.5; E_value=2.2e-20; Accession=PF00347.13; Description =Ribosomal protein L6
  Pfam annotation: Domain name=Ribosomal_L6; Domain location=97-176; Score=56.7; E_value=8.1e-14; Accession=PF00347.13; Description =Ribosomal protein L6
  Pfam module annotation: Pfam domain module=Ribosomal_L6::Ribosomal _L6; Domain location=12-85::97-176
MRTINSNQCVKIPRGIVASVKSRIVTIKGPRGVLKRNFKHLALVIQMVSPRTLKVEKWFGTKKELAAVRTVCSHIQNMIKGVTYGFQYKMRAVYAHFPINCVTSENNTVIEIRNFLGEKYIRRVQMAPGVTVVNSTKQKDELIIEGNDIEAVSGSAALIQHSTTVKNKDIRKFLDGLYVSEKTTVVQTE

SEQ ID NO: 10264 - protein, 78 aa, Zea mays
  Coding DNA Sequence Number=SeqID_4143
  Subcellular localization annotation: CTP_CleavageSite=71; ConfidenceScore=5.07e-01
ALFVFLLVMKSPTRYDRIPSESQHHTTTTKVLSRPPSESQHHTTTTKVLSRPQNNTTRKPHVRIANHQYTQASMALTP

SEQ ID NO: 10265 - protein, 141 aa, Zea mays
  Coding DNA Sequence Number=SeqID_4145
PNPQTRRRPGTPGDLPRRLLLYLSIDCTKGNLHQTDAQGLQPCRTRRAISLGRQRLIFDSLRLGDGSHSWAARQTQRRRRGRSANDCTVGRRSQMACARRRQHMGSTPVGWHSSGWRGPRRAPAIGEQLERGVVNFGEWER

SEQ ID NO: 10266 - protein, 125 aa, Zea mays
  Coding DNA Sequence Number=SeqID_4147
  Homolog annotation: Hit_ID=A7R061; Match level="QueryCoverage=83%, HitCoverage=17%, E-value=1e-12, Identity=40%"; Hit description =Chromosome chr10 scaffold_297, whole genome shotgun sequence
  Pfam annotation: Domain name=Ank; Domain location=92-124; Score=25.9; E_value=0.00015; Accession=PF00023.20; Description=Ankyrin repeat
MPVQDPSSLPSAAGGGARAKRTSSAPIRSADYAHSPTHHCVALRDATGLQTILAGLPPLAHPSLVLTASDAAREARLALSVAAALDRRDVPGGDTALHLAVRLRLPSLASALAAAGADPTLQNHA

SEQ ID NO: 10267 - protein, 151 aa, Zea mays
  Coding DNA Sequence Number=SeqID_4148
RHGRNLSLLPWGKLQHAEEEGAPCCRGVERREQRRSRPGGDQGRHGWERRWSRELAGRGAGVLPGSSAMAADGDGSRRPWEGKKTPARHGQKKGGRKGVVPATRVPSAMAGRGEEVEELSSLLAARREQHREGGSFLRQEQRKKKAARERK

SEQ ID NO: 10268 - protein, 92 aa, Zea mays
  Coding DNA Sequence Number=SeqID_4150
  Gene Ontology: Mol. function=sequence-specific DNA binding; Cellular component=nucleus; Biological process=regulation of transcription, DNA-dependent
  Homolog annotation: Hit_ID=O22456; Match level="QueryCoverage=96%, HitCoverage=35%, E-value=2e-42, Identity=96%"; Hit description =Developmental protein SEPALLATA 3
  Pfam annotation: Domain name=SRF-TF; Domain location=9-59; Score =117.3; E_value=4.7e-32; Accession=PF00319.9; Description=SRF-type transcription factor (DNA-binding and dimerisation domain)
MGRGRVELKRIENKINRQVTFAKRRNGLLKKAYELSVLCDAEVALIIFSSRGKQYEFCSSSSMLRTLDRYQKCNYGAPEPNVPSREALAELN

SEQ ID NO: 10269 - protein, 113 aa, Zea mays
  misc_feature (1)..(82): Xaa can be any naturally occurring amino acid
  Coding DNA Sequence Number=SeqID_4151
XXXXXXXXXXXXXXXXXXXXXXXXXXXXXXXXXXXXXXXXXXXXXXXXXXXXXXXXXXXXXXXXXXXXXXXXXXXXXXXXXXTILNMKDSNYNIAQCRRSSRKSTRTVRNKRG

SEQ ID NO: 10270 - protein, 244 aa, Zea mays
  misc_feature (183)..(183): Xaa can be any naturally occurring amino acid
  Coding DNA Sequence Number=SeqID_4153
  Gene Ontology: Mol. function=serine-type endopeptidase activity; Cellular component=intracellular; Biological process=protein modification process
  Homolog annotation: Hit_ID=P93501; Match level="QueryCoverage=100%, HitCoverage=88%, E-value=1e-128, Identity=96%"; Hit description =Ubiquitin-like protein
  Pfam annotation: Domain name=Tash_PEST; Domain location=158-176; Score=6.2; E_value=9.2; Accession=PF07708.2; Description=Tash protein PEST motif
  Pfam annotation: Domain name=Tash_PEST; Domain location=6-24; Score =6.2; E_value=9.2; Accession=PF07708.2; Description=Tash protein PEST motif
  Pfam annotation: Domain name=Tash_PEST; Domain location=82-100; Score= 6.2; E_value=9.2; Accession=PF07708.2; Description=Tash protein PEST motif
  Pfam annotation: Domain name=ubiquitin; Domain location=158-227; Score=125.9; E_value=1.2e-34; Accession=PF00240.13; Description =Ubiquitin family
  Pfam annotation: Domain name=ubiquitin; Domain location=6-74; Score =138.0; E_value=2.6e-38; Accession=PF00240.13; Description=Ubiquitin family
  Pfam annotation: Domain name=ubiquitin; Domain location=82-150; Score= 138.0; E_value=2.6e-38; Accession=PF00240.13; Description=Ubiquitin family
  Pfam module annotation: Pfam domain module=Tash_PEST::Tash_PEST::Tash_ PEST::ubiquitin::ubiquitin::ubiquitin; Domain location=158-176::6 -24::82-100::158-227::6-74::82-150
MQIFVKTLTGKTITLEVESSDTIDNVKAKIQDKEGIPPDQQRLIFAGKQLEDGRTLADYNIQKESTLHLVLRLRGGMQIFVKTLTGKTITLEVESSDTIDNVKAKIQDKEGIPPDQQRLIFAGKQLEDGRTLADYNIQKESTLHLVLRLRGGMQIFVKTLTGKTITLEVESSDTIDNVKAKIXQDKEGIPPDQQRLIFAGKQLEDGRTLADYNIQKESTLHLVLRLRGSMQIFVKTLTGKTLHL

SEQ ID NO: 10271 - protein, 209 aa, Zea mays
  misc_feature (2)..(7): Xaa can be any naturally occurring amino acid
  misc_feature (9)..(18): Xaa can be any naturally occurring amino acid
  misc_feature (20)..(22): Xaa can be any naturally occurring amino acid
  misc_feature (25)..(25): Xaa can be any naturally occurring amino acid
  misc_feature (29)..(31): Xaa can be any naturally occurring amino acid
  misc_feature (34)..(34): Xaa can be any naturally occurring amino acid
  Coding DNA Sequence Number=SeqID_4154
  Gene Ontology: Mol. function=nucleoside-triphosphatase activity; Cellular component=membrane; Biological process=transport
  Homolog annotation: Hit_ID=Q89FX1; Match level="QueryCoverage=83%, HitCoverage=57%, E-value=1e-84, Identity=92%"; Hit description=ABC transporter ATP-binding protein
  Pfam annotation: Domain name=ABC_tran; Domain location=19-115; Score =14.5; E_value=4.8e-08; Accession=PF00005.17; Description=ABC transporter
KXXXXXXFXXXXXXXXXXDXXXKVXKTSXXXQEXSKIITLSGGMKRRVMIAKALSHEPQILFLDEPTAGVDVELRKGMWEVVRTLQQSGVTIILTTHYIEEAEEMADRIGVINKGEIVLVEDKATLMQKLGKKRLTLHLQGKVTSLPESLSQYQLDLCDSGATLVYDYDTKGERTGITSLLSDLRNAGIRFNDLDTTQSSLEGGPGTQS

SEQ ID NO: 10272 - protein, 94 aa, Zea mays
  Coding DNA Sequence Number=SeqID_4155
  Gene Ontology: Mol. function=structural constituent of ribosome; Cellular component=ribonucleoprotein complex; Biological process =translation
  Homolog annotation: Hit_ID=Q0J889; Match level="QueryCoverage=87%, HitCoverage=72%, E-value=1e-43, Identity=98%"; Hit description =Ribosomal protein L37
  Pfam annotation: Domain name=Ribosomal_L37e; Domain location=2-55; Score=129.2; E_value=1.2e-35; Accession=PF01907.9; Description =Ribosomal protein L37e
  Subcellular localization annotation: CTP_CleavageSite=21; ConfidenceScore=5.19e-01
MGKGTGSFGKRRNKTHTLCIRCGRRSFHLQKSTCSSCGYPAARIRKYNWSVKAIRRKTTGTGRMRYMRHVPRRFKSNFREGTEAAPKKSAAAAN

SEQ ID NO: 10273 - protein, 70 aa, Zea mays
  Coding DNA Sequence Number=SeqID_4156
KKPPKARGRARKKTLGETLFFRLKGKKRRGPPPKPRKLLGAKILKGAKLVPPHGRGDRQKKILPVFKTLP

SEQ ID NO: 10274 - protein, 124 aa, Zea mays
  misc_feature (25)..(25): Xaa can be any naturally occurring amino acid
  Coding DNA Sequence Number=SeqID_4158
  Gene Ontology: Mol. function=molecular_function; Cellular component =ribonucleoprotein complex; Biological process=ribosome biogenesis and assembly
  Homolog annotation: Hit_ID=Q6K950; Match level="QueryCoverage=45%, HitCoverage=21%, E-value=7e-25, Identity=96%"; Hit description =Nucleolar RNA-binding Nop10p-like protein
  Pfam annotation: Domain name=Nop10p; Domain location=18-68; Score =90.8; E_value=4.4e-24; Accession=PF04135.3; Description=Nucleolar RNA-binding protein, Nop10p family
PSFQLGGHPPEARPPPRLQYYINEXGDKVYTTKKESPLGVPTQSAHPARFSPDDKYSRQRYLLKKRFGLLPTKPRQIKKTTESRTEVLKLQVNCPTCDVLFVSMLVGWNVLSSFSNICGPLVQF

SEQ ID NO: 10275 - protein, 420 aa, Zea mays
  misc_feature (19)..(19): Xaa can be any naturally occurring amino acid
  Coding DNA Sequence Number=SeqID_4159
  Gene Ontology: Mol. function=transaldolase activity; Cellular component=cytoplasm; Biological process=carbohydrate metabolic process
  Homolog annotation: Hit_ID=A2WYK7; Match level="QueryCoverage=89%, HitCoverage=88%, E-value=0.0, Identity=86%"; Hit description =Putative uncharacterized protein
  Pfam annotation: Domain name=Transaldolase; Domain location=69-408; Score=192.6; E_value=9.6e-55; Accession=PF00923.9; Description =Transaldolase
  Subcellular localization annotation: CTP_CleavageSite=43; ConfidenceScore=5.65e-01
MTGTVSKLAAPRPSALPPXAFAPSPRRVRVSVAGRARSPIIAMASAKEGNGAPTKRTALHDLYELQGLSPWYDNLCRPVTDLLPIIASGVRGVTSNPTIFQKAISSSSAYDDQFKQLISAGKDAESAYWELVIKDIQDACKLFEPIYDETDGADGYVSVEVSPRLANDTQGTVEAAKWLHKVVNRPNVYIKIPATAECVPSIQEVIANGISVNVTLIFSIARYEAVIDAYLDGLEASGLSDLSRVTSVASFFVSRVDTLIDKMLDKIGTPEALALRGKAAVAQAKLANRLYQKKFSGPRWEALAKKGAKKQRLLWASTGVKNPAYPDTLYVDSLIGPDTVNTMPDQALQAFIDHGTVSRTVDANVSEAEGVYSALEKLGIDWEEVGKQLELEGVDSFKKSFDSLLVSLQEKGNSLKMASV

SEQ ID NO: 10276 - protein, 160 aa, Zea mays
  Coding DNA Sequence Number=SeqID_4160
VLNILAHKVVPYAILVVLPFLFWMYSSALSLFFADLFIGLFILGSSPRSCLNLVIIVSRSDPRRLLDVRGGGSGGASVRGGQRGAAACSWPCSSWSGSSPWLRGAPSWSWCLGFPGAFGGADHGDVGSVGAPRRSWGLGSRVFFFFFFFFFFFFFFFFSN

SEQ ID NO: 10277 - protein, 142 aa, Zea mays
  Coding DNA Sequence Number=SeqID_4162
GQSAAAWVWSPPPSVRKRALGAARGHIGEPLGAAPTAVGGRARRHGLDPRRLAHVRLQAVAAPRARAPRRGVGSRRRRPASGGDDFSRTSSNAWRGRCLGGDARPRRPGTRPRRRRETSVAAWRSSYWRQGRTALVAAAEGA

SEQ ID NO: 10278 - protein, 62 aa, Zea mays
  Coding DNA Sequence Number=SeqID_4164
QRTGIQLVYDYDHLVTRLRLLVSRSWSSPDWYCHRAPLAGLDSFSSNRLLTARVAFKLHTAD

SEQ ID NO: 10279 - protein, 100 aa, Zea mays
  Coding DNA Sequence Number=SeqID_4166
LNRIRSIAPRTSDKPLTTRTAGLSKHKSHTNNFTAEILLPNFTCYIKFYNVHDRSGYKIISLKYMLAQMTILNKKIKMGYTYIRRPSPPALNTINSSTKL

SEQ ID NO: 10280 - protein, 123 aa, Zea mays
  Coding DNA Sequence Number=SeqID_4168
  Gene Ontology: Mol. function=DNA binding; Cellular component=nucleus; Biological process=regulation of transcription
  Homolog annotation: Hit_ID=A2WZT7; Match level="QueryCoverage=53%, HitCoverage=9%, E-value=3e-25, Identity=83%"; Hit description =Putative uncharacterized protein
LIRVRTGLEGRFQEPGLKGPLWEEVSARMAVAVYGRSAERCKEKWENINKYLRKAKDNIQKRPAHAFRRAVYLPEAKPTQKWARQILPNPDCGTGGSKWANPGRKMDRQTASLCWALMPTTLP

SEQ ID NO: 10281 - protein, 60 aa, Zea mays
  Coding DNA Sequence Number=SeqID_4169
  Gene Ontology: Mol. function=protein kinase activity; Biological process=protein amino acid phosphorylation
  Homolog annotation: Hit_ID=Q65XL7; Match level="QueryCoverage=85%, HitCoverage=4%, E-value=2e-22, Identity=92%"; Hit description =Putative uncharacterized protein OJ1735_C10.1
  Pfam annotation: Domain name=WD40; Domain location=17-56; Score=34.1; E_value=5.1e-07; Accession=PF00400.22; Description=WD domain, G-beta repeat
MWLHYYCEMQLWDASSGQGFTQFTEHRKRTWSVSFSDVDPTKLASGSDDCCVKLWSINQA

SEQ ID NO: 10282 - protein, 87 aa, Zea mays
  Coding DNA Sequence Number=SeqID_4170
NIMFVVRRHHHYTSLATTRPVLLAEDNHLELVVPSKDTSTSYSAEDVCASTFEPSPSLLLLRCSGTAAVRPRWTSRFLTGRSGVGRS

SEQ ID NO: 10283 - protein, 320 aa, Zea mays
  misc_feature (35)..(35): Xaa can be any naturally occurring amino acid
  misc_feature (239)..(239): Xaa can be any naturally occurring amino acid
  Coding DNA Sequence Number=SeqID_4171
  Gene Ontology: Mol. function=DNA binding; Cellular component=nucleus
  Homolog annotation: Hit_ID=A0PIL7; Match level="QueryCoverage=31%, HitCoverage=32%, E-value=2e-23, Identity=53%"; Hit description=COC1
RGRPEVFFTVPTAVCIDYTSPRAAHDIDIPPPRPXLNSKSPYPPHRYPATRHNPYKFQMTRNKTKYDLAQCACTPDRPGVSLQNYSMNEQTQKPKPSEDLTLLLDHPSVSCSSVNSSSSNDGVPQIIEVSKQTSRDMTIMENNSFTPHTQDHVEPLHDQEMQRLSGIQIRSKCEHSHEADLNISTQQMKLMPKPAETTYVDEQTARASHTLSESNATASCPVTVPEGTHPDQTSDQVGXNASMNPCIHPMGSADPKFGSSATPQTFPHNYAAFAPMMQCNCYQHSFRELLLSCERTAADITSEYLFPFVVPSRPWAIYSL

SEQ ID NO: 10284 - protein, 68 aa, Zea mays
  Coding DNA Sequence Number=SeqID_4172
EYKLFFFFFFFLVRLSFALSVYKTLNPYCAEPQRHATISGQIAANESWKKRPEWLCCSDRVSWPDSNP

SEQ ID NO: 10285 - protein, 62 aa, Zea mays
  Coding DNA Sequence Number=SeqID_4174
  Subcellular localization annotation: CTP_CleavageSite=44; ConfidenceScore=5.21e-01
MCSVCFLRFCLWAFFFFFFEPVRQPVGHPSQASLSKERSSTATRASSRAELLAVNHALAHRS

SEQ ID NO: 10286 - protein, 179 aa, Zea mays
  Coding DNA Sequence Number=SeqID_4176
  Pfam annotation: Domain name=GRP; Domain location=3-94; Score=-16.1; E_value=0.0033; Accession=PF07172.2; Description=Glycine rich protein family
PEEAIRNALEGINGKELDGRNIPVKEGQFPGGRGGGGGGYGGGRGGGGYGGGGPRDGGGGYGGGGGGYGGGGGYGGGGGGYGGGNRGGGFGNSPGNWRNLTVGPARPSYPVCPRDVFPSPKGLSSFVPFGVAPLGFLLQGPSVSVVNAGFIPGSSRPMPQPARVVGRWKLLPPSGFFLS

SEQ ID NO: 10287 - protein, 71 aa, Zea mays
  Coding DNA Sequence Number=SeqID_4178
YYYTYQGRQKLLPIALKQKDPIWRTTSSRIFTLVFLHLIPPWSKSNKNLSLPHRGLTSFTGESGSDPQISK

SEQ ID NO: 10288 - protein, 496 aa, Zea mays
  Coding DNA Sequence Number=SeqID_4180
  Homolog annotation: Hit_ID=A3BNP1; Match level="QueryCoverage=95%, HitCoverage=23%, E-value=1e-170, Identity=66%"; Hit description =Putative uncharacterized protein
  Pfam annotation: Domain name=Methyltransf_11; Domain location=105 -185; Score=24.8; E_value=0.00033; Accession=PF08241.2; Description =Methyltransferase domain
  Pfam annotation: Domain name=TPMT; Domain location=68-235; Score= -76.0; E_value=0.023; Accession=PF05724.2; Description=Thiopurine S -methyltransferase (TPMT)
  Pfam module annotation: Pfam domain module=Methyltransf_11::TPMT; Domain location=105-185::68-235
MDPSSPPRRCSLLLRLLLLAVAALALRLLYGAFLSVSAGPAGWPLYRPAATATTTTRRRTHVVQADVPSPEVWRTRHWRRAVDYHAAILAPHIAAGALAPASRAVCLGGPQEALAMRELGVAKAVAVGRRRAPPLVVAGGDRRLPFDSPSADFVFAGRALDAAKRPADLAAEAARILKPDGHLVVLTSSAADAYSLRSIQALLPTLRLVQSREIDAQDDGDSSTLRELVFQKNPHPTGTGAGNSSVNNCSVGDHRRQLLAHAEPLIQEEPLKPWITLKRNIKNIKYLPALADISFKRRYLYVDVGARSYGSSIGSWFRKQYPKQNHTFQVFAIEADPAFHSEYAAKKGVTLLPYAAWVKNETLRFEINGDPGKEDEAKANGRGMGRIRPATGKKMNGEVRSVPAFDFAEWLRQTVTEQDYVVMKMDVEGTEFDLIPRLFDTGAICLVDELFLECHYNRWQKCCPGERSPKYENTYEECLDLFSSLRESGVLVHQWW

SEQ ID NO: 10289 - protein, 220 aa, Zea mays
  misc_feature (1)..(1): Xaa can be any naturally occurring amino acid
  misc_feature (97)..(220): Xaa can be any naturally occurring amino acid
  Coding DNA Sequence Number=SeqID_4181
  Subcellular localization annotation: CTP_CleavageSite=51; ConfidenceScore=5.13e-01
XLGTGPPLEVDLGQGTTATATVFHNGFFNLSDTLSVTPPTVAGCPPGTFPSDSLGGDRETQPNSNPRSCKPPFDAGKLGGDGGGANQGQQQAQAFAXXXXXXXXXXXXXXXXXXXXXXXXXXXXXXXXXXXXXXXXXXXXXXXXXXXXXXXXXXXXXXXXXXXXXXXXXXXXXXXXXXXXXXXXXXXXXXXXXXXXXXXXXXXXXXXXXXXXXXXXXXXX

SEQ ID NO: 10290 - protein, 157 aa, Zea mays
  Coding DNA Sequence Number=SeqID_4183
  Gene Ontology: Mol. function=serine-type peptidase activity; Cellular component=integral to membrane; Biological process=proteolysis
  Homolog annotation: Hit_ID=Q337C3; Match level="QueryCoverage=40%, HitCoverage=12%, E-value=2e-26, Identity=85%"; Hit description =Prolyl carboxypeptidase like protein, putative, expressed
MGSRVRIVFLLLAFLFARAAEPIAAAAPAGSRHLTKDERWMNQRLDHFSPTDHRQFKQRYFEFLDYHRAPGGPVFLRICGESACDGIPNDYLAVSCNSHSTHTPGHLLPRTPSRADEPPALKYSTAIPVIFLSALKYHVHPDQWVGFYRPLWLISSV

SEQ ID NO: 10291 - protein, 75 aa, Zea mays
  misc_feature (1)..(32): Xaa can be any naturally occurring amino acid
  Coding DNA Sequence Number=SeqID_4184
XXXXXXXXXXXXXXXXXXXXXXXXXXXXXXXXQSESTILLHYSSLSHRTVSKWMGSEIFIYTNEDLFRFHVAMWE

SEQ ID NO: 10292 - protein, 122 aa, Zea mays
  Coding DNA Sequence Number=SeqID_4186
  Gene Ontology: Mol. function=structural constituent of ribosome; Cellular component=ribonucleoprotein complex; Biological process =translation
  Homolog annotation: Hit_ID=Q2R4A1; Match level="QueryCoverage=87%, HitCoverage=53%, E-value=2e-50, Identity=96%"; Hit description=40S ribosomal protein S5, putative, expressed
  Pfam annotation: Domain name=Ribosomal_S7; Domain location=1-122; Score=98.1; E_value=2.7e-26; Accession=PF00177.11; Description =Ribosomal protein S7pS5e
MGSREVELACTIRFDQIIHLLTDANPIQVVVDAIINSGPREDATRIGSAGVVRRHAVDISPLRRVNQAIYLLTTGARESAFRNIKTIAECLADELINAAKGSSNSYAIKKKDEIERVAKANR

SEQ ID NO: 10293 - protein, 126 aa, Zea mays
  Coding DNA Sequence Number=SeqID_4187
  Gene Ontology: Mol. function=DNA binding; Cellular component =chromosome; Biological process=nucleosome assembly
  Homolog annotation: Hit_ID=A9NTX3; Match level="QueryCoverage=82%, HitCoverage=79%, E-value=2e-36, Identity=77%"; Hit description =Putative uncharacterized protein
  Pfam annotation: Domain name=CBFD_NFYB_HMF; Domain location=31-95; Score=19.2; E_value=0.0027; Accession=PF00808.13; Description =Histone-like transcription factor (CBFNF-Y) and archaeal histone
  Pfam annotation: Domain name=Histone; Domain location=25-98; Score =112.3; E_value=1.5e-30; Accession=PF00125.14; Description=Core histone H2AH2BH3H4
  Pfam module annotation: Pfam domain module=CBFD_NFYB_HMF::Histone; Domain location=31-95::25-98
  Subcellular localization annotation: CTP_CleavageSite=43; ConfidenceScore=5.54e-01
MSTGAGSGTTKGGRGKPKATKSVSRSSKAGLQFPVGRIARFLKAGKYAERVGAGAPVYLSAVLEYLAAEVLELAGNAARDNKKTRIVPRHIQLAVRNDKELSKLLGAVTIANGGVLPNIHSNLLPS

SEQ ID NO: 10294 - protein, 101 aa, Zea mays
  Coding DNA Sequence Number=SeqID_4188
  Gene Ontology: Mol. function=3-dehydroquinate synthase activity; Biological process=aromatic amino acid family biosynthetic process
  Homolog annotation: Hit_ID=A2Z3J8; Match level="QueryCoverage=59%, HitCoverage=13%, E-value=5e-14, Identity=63%"; Hit description =Putative uncharacterized protein
MWVVVCVCVCRNCESPRWMHNIYVVFPLKKKKKKKKKNSRLVLPPETMTVEKFKNIMAVDKKVADGLLRLILLKGPLGCCVFTGDYEGNALDETLHAFCDN

SEQ ID NO: 10295 - protein, 200 aa, Zea mays
  Coding DNA Sequence Number=SeqID_4189
  Gene Ontology: Mol. function=transcription factor activity; Biological process=regulation of transcription, DNA-dependent
  Homolog annotation: Hit_ID=A8GGJ7; Match level="QueryCoverage=75%, HitCoverage=46%, E-value=3e-41, Identity=51%"; Hit description =Transcriptional regulator, LysR family
  Pfam annotation: Domain name=LysR_substrate; Domain location=48-199; Score=1.5; E_value=0.0038; Accession=PF03466.10; Description=LysR substrate binding domain
MVSKVALASAYPEHASMKLTAEGELLLQRCHRILSELKAAEHELSTTLVMPRGKLRVSVPMIGNLLLPRIARFIEFYPNVEVEIDVTDRKVDLIDEGYDAAIRIGDTIDTRIMSRSLGCFRQILVASPSYVERCGQPATAQHLLSHTLLLYRFPNTGKFEQWPVADFQNVIGSTNVSNVVCNSVEILKYLALEGGPGTQL

SEQ ID NO: 10296 - protein, 152 aa, Zea mays
  misc_feature (3)..(3): Xaa can be any naturally occurring amino acid
  Coding DNA Sequence Number=SeqID_4190
  Subcellular localization annotation: CTP_CleavageSite=57; ConfidenceScore=5.44e-01
GRXPVAIAGIARSASFLRSSVVSDQDQQGRHGSRSSVRLPARRRRPVHAHTTRNKTRCLAPGSQRRRRLHEWPTSPGSPSLASYSSPSNQAWRFIGSNGTPVPSLSAGILSPTSGPGPPALRTTRRWIHKLSQKSREDQGLVIRNPPDPTLT

SEQ ID NO: 10297 - protein, 92 aa, Zea mays
  Coding DNA Sequence Number=SeqID_4192
LIIDHHIHFLLDGVATRCEAAVELVASCVHVTLDDVTTTDIFSVRRTSIRCIASSTLRTMASDDYIVDERGHCGMTHDRSRKPRLILDVSRG

SEQ ID NO: 10298 - protein, 65 aa, Zea mays
  Coding DNA Sequence Number=SeqID_4194
  Gene Ontology: Mol. function=protein dimerization activity; Biological process=DNA recombination
  Homolog annotation: Hit_ID=P03010; Match level="QueryCoverage=89%, HitCoverage=6%, E-value=1e-10, Identity=51%"; Hit description =Putative AC9 transposase
KHIVCIFYDLTEILFGTLYPTANQFYKGFCDIKDLIDRWCCSSDSTIKQFHELLVETHDDELKLD

SEQ ID NO: 10299 - protein, 187 aa, Zea mays
  misc_feature (14)..(14): Xaa can be any naturally occurring amino acid
  Coding DNA Sequence Number=SeqID_4195
  Gene Ontology: Mol. function=phosphoprotein phosphatase activity; Cellular component=nucleus; Biological process=regulation of transcription, DNA-dependent
  Homolog annotation: Hit_ID=A3AKU8; Match level="QueryCoverage=86%, HitCoverage=17%, E-value=8e-92, Identity=98%"; Hit description =Serine/threonine protein phosphatase
  Pfam annotation: Domain name=Kelch_2; Domain location=40-88; Score =8.9; E_value=3.8; Accession=PF07646.5; Description=Kelch motif
  Pfam annotation: Domain name=Kelch_2; Domain location=94-141; Score =13.3; E_value=0.95; Accession=PF07646.5; Description=Kelch motif
  Pfam module annotation: Pfam domain module=Kelch_2::Kelch_2; Domain location=40-88::94-141
VIQGGIGPAGLSAXDLHVLDLTQQRPRWHRVVVQGPGPGPRYGHVMALVGQRFLLTIGGNDGKRPLADVWALDTAAKPYEWRKLEPEGEGPPPCMYATASARSDGLLLLCGGRDANSVPLSSAYGLAKHRDGRWEWAMAPGVSPSPRYQHAAVFVNARLHVSPFIILNIRYALLLRVREKNIACFFV

SEQ ID NO: 10300 - protein, 181 aa, Zea mays
  misc_feature (1)..(1): Xaa can be any naturally occurring amino acid
  Coding DNA Sequence Number=SeqID_4196
  Gene Ontology: Mol. function=ferredoxin hydrogenase activity; Cellular component=periplasmic space; Biological process=electron transport
  Homolog annotation: Hit_ID=Q10CV7; Match level="QueryCoverage=99%, HitCoverage=37%, E-value=5e-76, Identity=74%"; Hit description=Narf, putative, expressed
  Pfam annotation: Domain name=Fe_hyd_lg_C; Domain location=2-109; Score=-186.6; E_value=0.00032; Accession=PF02906.5; Description=Iron only hydrogenase large subunit, C-terminal domain
XLTNVDEEGHLYGVSGGSGGYAETIFRYVAHVIYKREIEGPLDFRILRNSDFREITLEVEGKPVLKFALCYGFRNLQNVVRKIKMGKCEYPFIEVMACPSGCLNGGGQLKPVEGQFAKELIQQLESVFPQDILISDPFRNPIAKKLYDEWLGQPGSKNAKKYLPPEYPPVVKSVASQLQNW

SEQ ID NO: 10301 - protein, 80 aa, Zea mays
  Coding DNA Sequence Number=SeqID_4197
  Subcellular localization annotation: CTP_CleavageSite=45; ConfidenceScore=5.24e-01
VGSFFPPFSRSSPARSFGATPTFVTIMLLARVRRYMFICHTWKILLNHVFEDLRRTKAPNNHHIRNKIIVSSLYLIMFID

SEQ ID NO: 10302 - protein, 204 aa, Zea mays
  Coding DNA Sequence Number=SeqID_4199
  Gene Ontology: Mol. function=structural constituent of ribosome; Cellular component=ribonucleoprotein complex; Biological process =translation
  Homolog annotation: Hit_ID=O23515; Match level="QueryCoverage=100%, HitCoverage=100%, E-value=4e-92, Identity=80%"; Hit description=60S ribosomal protein L15-1
  Pfam annotation: Domain name=Ribosomal_L15e; Domain location=2-193; Score=462.0; E_value=7.7e-136; Accession=PF00827.8; Description =Ribosomal L15
MGAYKYVSELWRKKQSDVMRFLQRVRCWEYRQQPSIVRVTRPTFPDKARRLGYKAKQGYVVYRVRVRRGGRKRPVPKGIVYGKPTNQGVTQLKFQRSKRSVAEERAGRKLGGLRVLNSYWVNEDSTYKYYEIIMVDVAPRAIRNDPRINWLCHPVHKHRELRGLTSAGKSNRGLRGRGHLYHKNRPSRRATWKRNNTLSLRRYR

SEQ ID NO: 10303 - protein, 220 aa, Zea mays
  misc_feature (142)..(142): Xaa can be any naturally occurring amino acid
  misc_feature (145)..(145): Xaa can be any naturally occurring amino acid
  Coding DNA Sequence Number=SeqID_4200
  Gene Ontology: Mol. function=lyase activity
  Homolog annotation: Hit_ID=B0AAT3; Match level="QueryCoverage=95%, HitCoverage=58%, E-value=4e-26, Identity=34%"; Hit description =Putative uncharacterized protein
  Pfam annotation: Domain name=ADC_lyase; Domain location=3-211; Score =41.2; E_value=3.1e-15; Accession=PF02618.6; Description =Aminodeoxychorismate lyase
QLGTGPPLEKYDVCSAEEYLALVTSPDQFKSLVSFPLPTGTLEGYLYGDTYDLPPMMGARGVVEKQLKAFETNVWNGLGQPKNLARAVIIGSMVELEVKFDDERATVAGVIENRLLIDMPLQIDASINYGLQVWRPLKVSEXARXDSPYNLYRHKGLPPTPICSPEREERRGRAAPDGHDFLYYVADARGKSVFAAEYAEHLKNVKKRRDAVKALKERRS

SEQ ID NO: 10304 - protein, 360 aa, Zea mays
  misc_feature (87)..(87): Xaa can be any naturally occurring amino acid
  misc_feature (267)..(267): Xaa can be any naturally occurring amino acid
  misc_feature (291)..(291): Xaa can be any naturally occurring amino acid
  Coding DNA Sequence Number=SeqID_4201
  Gene Ontology: Mol. function=DNA binding; Cellular component=nucleus; Biological process=regulation of transcription
  Homolog annotation: Hit_ID=Q6ZI39; Match level="QueryCoverage=86%, HitCoverage=42%, E-value=7e-59, Identity=43%"; Hit description=Myb -family transcription factor-like protein
RVQRRGRTTPAPPSALRPGLAAAAPAACKGKRKRHLSEDDVWLLLHRYHPGTILTALQEVAQHADGRRIDWEGGWWAKSAPRGSPPXREYQMLWRHFAYHHDVDESVDADDQPLDDDSDLELELEPDPNLTKEALCEASALAKALISGSSQASGHRINLDTHVLNTRNEKIVRVPSEKQLAQSHRVTNVAGPVSNSKQLAHIGPSAGLLDPNGPSKKRKKPKAWYKEEYADVSAGVQKYGEGNWEDILHKCNFDEYRERHDQVISSXGLLKRPGGSSKPASTKHASVGLEXRSAALKALSLAVGPMRGSYALRSGAYPQSIQHKSTVFAHKMPELRFCSNPFTGASRTVPDGMPLRVAAQ

SEQ ID NO: 10305 - protein, 159 aa, Zea mays
  Coding DNA Sequence Number=SeqID_4202
  Subcellular localization annotation: CTP_CleavageSite=66; ConfidenceScore=5.19e-01
ILPRAPRLPAPLAALLASLSLAASIPCSKPQAALPLARPWTHAPSSPAPAHLPRARLLPMAAAPCYFSMAGSPSSPFHGAPPLLLRCRDFLLGSKNWRTRHRLGISWSSAATPGVLPTRAHPCVNSIVALVSCSRVSPAHYGSGRSPLPARSLHQPSQL

SEQ ID NO: 10306 - protein, 130 aa, Zea mays
  Coding DNA Sequence Number=SeqID_4204
  Subcellular localization annotation: CTP_CleavageSite=81; ConfidenceScore=5.14e-01
YASSYPGACGWRSAACPPAGRAPKSPAHRPFPKFPSTHRDLLRPLLLAFDVHNPQSQITPPPWGAYRRRRRGRARCLEDLPEDALRGVLVLLAPDLSTRNLLQGSRCGSREGQPTRRVERSVLSARSSPP

SEQ ID NO: 10307 - protein, 308 aa, Zea mays
  misc_feature (1)..(1): Xaa can be any naturally occurring amino acid
  Coding DNA Sequence Number=SeqID_4205
  Gene Ontology: Mol. function=transferase activity; Cellular component= intracellular; Biological process=embryonic development ending in seed dormancy
  Homolog annotation: Hit_ID=Q6Z2L7; Match level="QueryCoverage=98%, HitCoverage=33%, E-value=1e-118, Identity=65%"; Hit description =Putative pentatricopeptide (PPR) repeat-containing protein
  Pfam annotation: Domain name=PPR; Domain location=110-144; Score=3.2; E_value=3.3; Accession=PF01535.11; Description=PPR repeat
  Pfam annotation: Domain name=PPR; Domain location=224-258; Score =36.7; E_value=8.1e-08; Accession=PF01535.11; Description=PPR repeat
  Pfam annotation: Domain name=PPR; Domain location=259-293; Score =23.2; E_value=0.00098; Accession=PF01535.11; Description=PPR repeat
  Pfam annotation: Domain name=PPR; Domain location=6-40; Score=32.5; E_ value=1.6e-06; Accession=PF01535.11; Description=PPR repeat
  Pfam annotation: Domain name=PPR; Domain location=75-109; Score=29.6; E_value=1.2e-05; Accession=PF01535.11; Description=PPR repeat
  Pfam module annotation: Pfam domain module=PPR::PPR::PPR::PPR::PPR; Domain location=110-144::224-258::259-293::6-40::75-109
XIHPVVCYNHFISGAGHAKRADMAKAIYDRMEASGIEPSITSNVLLLISYVRSKNLGGALNFFNLVRRKKTPCARLYNVFISGLCEVRKPEQAMMFFREARDNGIIPSMYCYENLLLLLCSVSDYTNAVKVVDDFRETGRPVSAFLTNVLLLHTLMGHKLLQAFLRSRDKSKPLELKGEDIQGRKAGRLLIGDLVASFASGIRNMSDLEHLGEEMEKYFPVDIYTYNMLLRGFSMAGRMDSACRLYERICRQGYQPNRWTFDTIVHGFCKNGDIIEAQRWMDALYRSGFYPTWYTMRVYNNLLLLVHY

SEQ ID NO: 10308 - protein, 151 aa, Zea mays
  misc_feature (145)..(145): Xaa can be any naturally occurring amino acid
  Coding DNA Sequence Number=SeqID_4206
  Gene Ontology: Cellular component=ribonucleoprotein complex
  Homolog annotation: Hit_ID=Q9LER7; Match level="QueryCoverage=56%, HitCoverage=61%, E-value=8e-24, Identity=70%"; Hit description =Plastid-specific 50S ribosomal protein 5, chloroplast precursor
  Subcellular localization annotation: CTP_CleavageSite=67; ConfidenceScore=5.75e-01
RRSFFHSKKMALLCFNPLAPLSSQRLQLSSFASPVLSLKPNTVESKNRASLGAYNLSSGYRRAVIVKAAASGVDGAEPESNEEPPKTVVAAVPVDKLPLESKEAKEKLLLEQRMKMKLAKKIRLRRKRLVRKRKLRKKGRWPPSXDEEAQE

SEQ ID NO: 10309 - protein, 135 aa, Zea mays
  Coding DNA Sequence Number=SeqID_4207
LSAQGGRGGDRSGIQASHGDPWRQLGVLPERGKLERKEGERVGIAGGDEKGKGGEWGREGWGSWEKWIKKRKKKTCNPEIFCILSHLEEERRGCRVGRLRPRGIPLHRRCPQRVQFPASSPPLPRPGQNSPSRRF

SEQ ID NO: 10310 - protein, 85 aa, Zea mays
  Coding DNA Sequence Number=SeqID_4209
ANHAEVASLHPDEVLGIVDRREQHYRTLKRSPVWGWITNPPLIVVGGSARLPPVKNRHRRMRRMKDVAMMFVRGLGRRLPVNFGC

SEQ ID NO: 10311 - protein, 88 aa, Zea mays
  Coding DNA Sequence Number=SeqID_4211
  Gene Ontology: Mol. function=RNA binding; Cellular component =ribonucleoprotein complex; Biological process=mRNA metabolic process
  Homolog annotation: Hit_ID=Q9SUM2; Match level="QueryCoverage=100%, HitCoverage=100%, E-value=7e-44, Identity=97%"; Hit description =Probable small nuclear ribonucleoprotein F
  Pfam annotation: Domain name=LSM; Domain location=10-75; Score=92.0; E_value=1.9e-24; Accession=PF01423.12; Description=LSM domain
MATIPVNPKPFLNNLTGKTVIVKLKWGMEYKGFLASVDSYMNLQLGNTEEYIDGQLTGNLGEILIRCNNVLYVRGVPEDEELGDAEQD

SEQ ID NO: 10312 - protein, 308 aa, Zea mays
  misc_feature (279)..(279): Xaa can be any naturally occurring amino acid
  misc_feature (289)..(289): Xaa can be any naturally occurring amino acid
  misc_feature (295)..(295): Xaa can be any naturally occurring amino acid
  misc_feature (302)..(302): Xaa can be any naturally occurring amino acid
  Coding DNA Sequence Number=SeqID_4212
  Gene Ontology: Mol. function=translation elongation factor activity; Cellular component=cytoplasm; Biological process=translational elongation
  Homolog annotation: Hit_ID=P13905; Match level="QueryCoverage=98%, HitCoverage=67%, E-value=1e-163, Identity=93%"; Hit description =Elongation factor 1-alpha
  Pfam annotation: Domain name=GTP_EFTU; Domain location=2-198; Score =255.5; E_value=1.2e-73; Accession=PF00009.17; Description=Elongation factor Tu GTP binding domain
  Pfam annotation: Domain name=GTP_EFTU_D2; Domain location=221-288; Score=87.6; E_value=3.9e-23; Accession=PF03144.15; Description =Elongation factor Tu domain 2
  Pfam module annotation: Pfam domain module=GTP_EFTU::GTP_EFTU_D2; Domain location=2-198::221-288
HLQLGGIDKRVIERFEKEAAEMNKRSFKYAWVLDKLKAEHERGITIDIALWKFETTKYSCTVIDAPGHRDFIKNMITGTSQADCAVLIIDSTTGGFEAGISKDGQTREHALLAFTLGVKQMICCCNKMDATTPKYSKARYEEIVKEVSSYLKKVGYNPDKVPFVPISGFEGDNMIERSTNLDWYKGPTLLEALDQINEPKRPSDKPLRLPLQDVYKIGGIGTVPVGRVETGVIKPGMVVTFGPTGLTTEVKSVEMHHESLLEALPGDNVGFNVKNVAVXDLKRGYVASXSQDDLXRGCNFTXSLIMTP

SEQ ID NO: 10313 - protein, 102 aa, Zea mays
  Coding DNA Sequence Number=SeqID_4213
  Homolog annotation: Hit_ID=A5EQ50; Match level="QueryCoverage=88%, HitCoverage=20%, E-value=9e-25, Identity=62%"; Hit description =Putative uncharacterized protein
MSIDWRPARSLEVLLRQVNEMAPGRDKSSDGMLGDQSHQMRKSDHNPDANGVVTAIDISHDPAHGVDAGDLAETLRQSQDKRIKYIISNRRIASRGGPVPWH

SEQ ID NO: 10314 - protein, 88 aa, Zea mays
  Coding DNA Sequence Number=SeqID_4214
  Homolog annotation: Hit_ID=A1CW65; Match level="QueryCoverage=56%, HitCoverage=60%, E-value=3e-13, Identity=72%"; Hit description=NADH -ubiquinone oxidoreductase complex 1/LYR family protein
MGSGPPLYPSATACAGKLIAPLELLYLGREYPLGYDYFRPRLHRAFIAKAAERDEEKIRKGIEQAEFVKKGELQELRLLKRGCNCKHI

SEQ ID NO: 10315 - protein, 55 aa, Zea mays
  Coding DNA Sequence Number=SeqID_4215
  Gene Ontology: Cellular component=mitochondrion
  Homolog annotation: Hit_ID=Q9SZV4; Match level="QueryCoverage=92%, HitCoverage=56%, E-value=4e-21, Identity=100%"; Hit description =Putative uncharacterized protein F6G3.40
MALRRVYSEIRGKKVTELPGYIKSTFSMETVKTSVKRGLDNYNEKYIQTSSGNQD

SEQ ID NO: 10316 - protein, 114 aa, Zea mays
  Coding DNA Sequence Number=SeqID_4216
  Subcellular localization annotation: CTP_CleavageSite=23; ConfidenceScore=5.21e-01
ADNGTGSDGGWIGLKKPGGRSTTAETLARFITKSSHPVPLALSPLPTEPSPSNQSRCHHRTAHHTSRNNCQSGDARSARQDTTQEGSDYPAASGVNRKAATAAAAPEGRDNSER

SEQ ID NO: 10317 - protein, 211 aa, Zea mays
  misc_feature (114)..(114): Xaa can be any naturally occurring amino acid
  misc_feature (122)..(122): Xaa can be any naturally occurring amino acid
  misc_feature (142)..(142): Xaa can be any naturally occurring amino acid
  misc_feature (150)..(150): Xaa can be any naturally occurring amino acid
  misc_feature (175)..(175): Xaa can be any naturally occurring amino acid
  misc_feature (183)..(183): Xaa can be any naturally occurring amino acid
  misc_feature (186)..(186): Xaa can be any naturally occurring amino acid
  misc_feature (190)..(190): Xaa can be any naturally occurring amino acid
  misc_feature (196)..(196): Xaa can be any naturally occurring amino acid
  misc_feature (198)..(198): Xaa can be any naturally occurring amino acid
  misc_feature (200)..(200): Xaa can be any naturally occurring amino acid
  Coding DNA Sequence Number=SeqID_4218
  Gene Ontology: Mol. function=magnesium ion binding; Cellular component=integral to membrane; Biological process=photosynthesis, light harvesting
  Homolog annotation: Hit_ID=P04778; Match level="QueryCoverage=99%, HitCoverage=77%, E-value=4e-91, Identity=84%"; Hit description =Chlorophyll a-b binding protein 2, chloroplast precursor
  Pfam annotation: Domain name=Chloroa_b-bind; Domain location=65-211; Score=74.6; E_value=3.2e-19; Accession=PF00504.12; Description =Chlorophyll A-B binding protein
  Subcellular localization annotation: CTP_CleavageSite=23; ConfidenceScore=5.51e-01
MAASTMALSSPAFAGKAVNLSPAASEVLGSGRVTMRKTVAKPKGPSGSPWYGSDRVKYLGPFSGESPSYLTGEFPGDYGWDTAGLSADPETFARNRELEVIHSRWAMLGALGCXFPELLARXGVKFGEAGLVKAGSQIFSDXGGLDYLGXNPSLVHAQSILAHLGHSKLILLGAXVKGFRVPXNGXGKAXDLLYPXGXFXPLGWLPDPKHS

SEQ ID NO: 10318 - protein, 193 aa, Zea mays
  misc_feature (1)..(84): Xaa can be any naturally occurring amino acid
  Coding DNA Sequence Number=SeqID_4219
XXXXXXXXXXXXXXXXXXXXXXXXXXXXXXXXXXXXXXXXXXXXXXXXXXXXXXXXXXXXXXXXXXXXXXXXXXXXXXXXXXXXYLRARSNRIVSWICSSGGASVEMVDADGGPVRGAGLRPHSKSMEEEGRLGWWRDPMVRFVPDRSSVGGRRRHGRAVVVGGMDLFVRRCLSGDGGCRRWSRSWSRLRQVR

SEQ ID NO: 10319 - protein, 97 aa, Zea mays
  Coding DNA Sequence Number=SeqID_4221
DSRYQLALQMTRVLTAEIEQRGARQRIAAKSHARREIADDLGILAPTACTVRHPRALRSPLVLLLGRVTGIGEDGPWRGFGDEAHPSKRACSFTVPG

SEQ ID NO: 10320 - protein, 136 aa, Zea mays
  Coding DNA Sequence Number=SeqID_4223
  Gene Ontology: Mol. function=heat shock protein binding; Biological process=protein folding
  Homolog annotation: Hit_ID=A7NSW9; Match level="QueryCoverage=97%, HitCoverage=73%, E-value=1e-36, Identity=57%"; Hit description =Chromosome chr18 scaffold_1, whole genome shotgun sequence
  Subcellular localization annotation: CTP_CleavageSite=31; ConfidenceScore=5.74e-01
MPVSAPSPPRLQSPFIHRPINATPSSSRSLSARNLRSPSTSSYPRIKSEVDTNTVIAISVGVASVALGIGIPVFYETQIDNAAKRENTQPCFPCNGTGAQKCRLCVGSGNVTVELGGGEKEVSSCINCDGAGSLTC

SEQ ID NO: 10321 - protein, 130 aa, Zea mays
  Coding DNA Sequence Number=SeqID_4224
  Homolog annotation: Hit_ID=A7P3T9; Match level="QueryCoverage=100%, HitCoverage=100%, E-value=6e-63, Identity=87%"; Hit description =Chromosome chr1 scaffold_5, whole genome shotgun sequence
MALEWVVLGYAAAAEAIMVILLTMPGLDALRKGLIAVTRNLLKPFLSIIPFCLFLLMDIYWKYETRPSCDGDSCTPSEHLRHQKSIMKSQRNALLIASALVFYWILYSVTNLVVRIEQLNQRVERLRKRE

SEQ ID NO: 10322 - protein, 98 aa, Zea mays
  misc_feature (42)..(42): Xaa can be any naturally occurring amino acid
  Coding DNA Sequence Number=SeqID_4225
  Gene Ontology: Cellular component=integral to membrane; Biological process=mRNA metabolic process
  Homolog annotation: Hit_ID=Q949R9; Match level="QueryCoverage=95%, HitCoverage=85%, E-value=3e-30, Identity=62%"; Hit description =Putative uncharacterized protein At5g20090
  Pfam annotation: Domain name=UPF0041; Domain location=1-99; Score =68.2; E_value=2.7e-17; Accession=PF03650.4; Description =Uncharacterised protein family (UPF0041)
  Subcellular localization annotation: CTP_CleavageSite=78; ConfidenceScore=5.10e-01
MSGGFKGFLNSPVGPKTTPFWGPVSNWGIILARVGDPKKPLXMISGNMPGVLWVYFALFVRFAWMVRPRNYFLMVTPSCNEWVQLFQLSRWVRAQGFL

SEQ ID NO: 10323 - protein, 152 aa, Zea mays
  Coding DNA Sequence Number=SeqID_4226
LGTGPPLENAMLPGAFPKAATQILYAQHSTDAPADVAVPRLLYMGANSKKTSTKRADGRNCRPPRFMPCSLSARPASPRCLMNAVVGPRKVNAQDRCFHNTAIAVVALLGCAPLAWSQTPADKATTSTAAAPAAAQPKKPAAAAAVPEVHPT

SEQ ID NO: 10324 - protein, 130 aa, Zea mays
  Coding DNA Sequence Number=SeqID_4228
LMRNEVMMDQPILFHKPNKKVRSEKKMDHFIPQTKHTISVLFIDGSFSGDEATYTSPITAQPNGSYTAHSGPHTRTLLCLCRRGRALAPCSIALAASSSAWPPSSPGVAVLTCCSSPCPLGEANIDQCLC

SEQ ID NO: 10325 - protein, 246 aa, Zea mays
  misc_feature (227)..(227): Xaa can be any naturally occurring amino acid
  Coding DNA Sequence Number=SeqID_4230
  Gene Ontology: Mol. function=transcription factor activity; Cellular component=nucleus; Biological process=regulation of transcription, DNA-dependent
  Homolog annotation: Hit_ID=A6BLV2; Match level="QueryCoverage=96%, HitCoverage=72%, E-value=9e-42, Identity=46%"; Hit description=HAP2 subunit of HAP complex
  Pfam annotation: Domain name=CBFB_NFYA; Domain location=170-225; Score=118.6; E_value=1.9e-32; Accession=PF02045.6; Description=CCAAT- binding transcription factor (CBF-BNF-YA) subunit B
MPVILREMEDHSVHPMSKSNHASLSGNGYEMKHSGHKVCDRDSSSESDRSHQEASAASESSPNEHTSTQSDNDEDHGKDNQDTMKPVLSLGKEGSAFLAPKLHYSPSFACIPYTADAYYSGVGVSTGYAPHAIVCSLLIFQFLSSWPHSVHPQQNDTTNTPGMLPVEPAEEQIYVNAKQYHAILRRRQTRAKLEAQNKMVKNRKPYLHESRHRHAMKRARGSGRFLXTKQLQEQNQQYHIDCAQNS

SEQ ID NO: 10326 - protein, 127 aa, Zea mays
  Coding DNA Sequence Number=SeqID_4231
  Subcellular localization annotation: CTP_CleavageSite=66; ConfidenceScore=5.82e-01
RWWFSAPLRKQGNVSRTLATPPVVLLQGSGASSTATLSRTQGSRISSTATLSRTQGSGTSLTATLACTPGSGTSLPDTLAHSYTPIVHLDPLLASIKGRSRAFLEEVGAGDEQTNRLSLSPSLATCL

SEQ ID NO: 10327 - protein, 182 aa, Zea mays
  Coding DNA Sequence Number=SeqID_4233
  Gene Ontology: Mol. function=nutrient reservoir activity
  Homolog annotation: Hit_ID=P80351; Match level="QueryCoverage=71%, HitCoverage=97%, E-value=9e-11, Identity=34%"; Hit description=Sweet protein mabinlin-1 (Mabinlin I) (MAB I) [Contains: Sweet protein mabinlin-1 chain ...
  Homolog annotation: Hit description=A; Sweet protein mabinlin-1 chain B]
  Pfam annotation: Domain name=Tryp_alpha_amyl; Domain location=61-171; Score=24.5; E_value=0.00039; Accession=PF00234.12; Description =Protease inhibitorseed storageLTP f
MAKLVLLFTTLALFLLIANASIYRIEIDDLDEEFDLDENPQQKIGKHCRKGFATHKHLRACQRFIRRQARSPRDEVVDDVSDEENSGQLLQNCCQQLKRVDVPCRCPSLKWALKRQLQPSIELELPGQQQQEQGQKGQPGQQGKGRQWKVQKMIKTASNLPSICQIPPQSCPFKQPRWWFDE

SEQ ID NO: 10328 - protein, 126 aa, Zea mays
  misc_feature (69)..(69): Xaa can be any naturally occurring amino acid
  misc_feature (83)..(83): Xaa can be any naturally occurring amino acid
  misc_feature (90)..(90): Xaa can be any naturally occurring amino acid
  misc_feature (92)..(92): Xaa can be any naturally occurring amino acid
  misc_feature (95)..(96): Xaa can be any naturally occurring amino acid
  misc_feature (101)..(101): Xaa can be any naturally occurring amino acid
  misc_feature (105)..(105): Xaa can be any naturally occurring amino acid
  misc_feature (107)..(109): Xaa can be any naturally occurring amino acid
  misc_feature (111)..(111): Xaa can be any naturally occurring amino acid
  misc_feature (113)..(115): Xaa can be any naturally occurring amino acid
  misc_feature (117)..(117): Xaa can be any naturally occurring amino acid
  misc_feature (123)..(124): Xaa can be any naturally occurring amino acid
  misc_feature (126)..(126): Xaa can be any naturally occurring amino acid
  Coding DNA Sequence Number=SeqID_4234
AGAPRGGGRSRTSGSPGLQEFGTRRERELTSPPPPENNRGRRKWCTVLLCSLFYIPNILDRKVYCIISXLMEWMDPSPRGLLXFFGEQIXKXGGXXPYFAXNSFXRXXXAXWXXXFXGKKGVXXAX

SEQ ID NO: 10329 - protein, 72 aa, Zea mays
  Coding DNA Sequence Number=SeqID_4236
  Subcellular localization annotation: CTP_CleavageSite=28; ConfidenceScore=5.31e-01
VLTSTQPLCPASPTCDGVDAASTTQRVRLRLRWPQLPRHVRSPRSYASLAYALLGGHSFASLVHFWVGWSSG

SEQ ID NO: 10330 - protein, 281 aa, Zea mays
  Coding DNA Sequence Number=SeqID_4238
  Gene Ontology: Mol. function=serine-type endopeptidase activity; Cellular component=mitochondrion; Biological process=proteolysis
  Homolog annotation: Hit_ID=Q0JBL5; Match level="QueryCoverage=97%, HitCoverage=88%, E-value=1e-125, Identity=85%"; Hit description=ATP -dependent Clp protease proteolytic subunit
  Pfam annotation: Domain name=CLP_protease; Domain location=67-248; Score=432.7; E_value=5.1e-127; Accession=PF00574.13; Description=Clp protease
  Subcellular localization annotation: CTP_CleavageSite=17; ConfidenceScore=5.24e-01
SLRCHVPVPKSNPLNPSAATAMLRRIAAVAPRAFFSSYPPHAPSLPASGYIPRREYGLVPMVIEHTSRGERAYDIFSRLLKERIVCIHGPITDDTASLVVAQLLFLESENPAKPVHLYINSPGGVVTAGLAIYDTMQYIRSPVTTLCIGQAASMASLLLAAGASGERRALPNARVMIHQPSGGASGQASDIAIHAKEILKVRDRLNKIYAKHTGQAIDRIEQCMERDMFMDPEEAHEWGLIDEVIEHRPVSLVSDAVGSDPPNLGGGGTEVNKGTDEPSSA

SEQ ID NO: 10331 - protein, 220 aa, Zea mays
  misc_feature (208)..(208): Xaa can be any naturally occurring amino acid
  misc_feature (220)..(220): Xaa can be any naturally occurring amino acid
  Coding DNA Sequence Number=SeqID_4239
  Homolog annotation: Hit_ID=A9WC61; Match level="QueryCoverage=69%, HitCoverage=41%, E-value=2e-09, Identity=32%"; Hit description =Autotransporter-associated beta strand repeat protein precursor
MVNIEVHDVSNVDWNVETITVIHGQPTGPQKARGNETLRTKYHFWKWGSDDWDQLGSRLRPLKGHDLASPEPSLGQRQPTQEDSRLARGARTQPRPRTTDSASPNPRARTQPRPRMTDSTSPDPRARTQPRPRKMDSASPDPRARTQPRPRTTVSASPDPRARTQLRPRTTNPASPDHRAQTQPRPRMTDSASLDPRARTQPRPRKTXLRLARPPGPDSX

SEQ ID NO: 10332 - protein, 73 aa, Zea mays
  Coding DNA Sequence Number=SeqID_4240
  Subcellular localization annotation: CTP_CleavageSite=40; ConfidenceScore=5.59e-01
WRTLSLSVSYFWRPFKIGTRSQSPMSKIMKKMMTQLVRPRLSSSTGPRRQNPPHDLGSLLLKRQLVLTTKRPR

SEQ ID NO: 10333 - protein, 98 aa, Zea mays
  Coding DNA Sequence Number=SeqID_4242
GLLAYRRRHDAPMCQVWSAIELLVGKASLDLKLAPHIIEDISRPTPAKLRTLLAIAKSGKCSRSPPNEATCPSRPRSSLAEEIRQDGLDVPCRWVPDE

SEQ ID NO: 10334 - protein, 139 aa, Zea mays
  Coding DNA Sequence Number=SeqID_4244
  Gene Ontology: Mol. function=NADPH:quinone reductase activity; Biological process=metabolic process
  Homolog annotation: Hit_ID=A9GGZ8; Match level="QueryCoverage=95%, HitCoverage=42%, E-value=6e-24, Identity=46%"; Hit description =Putative Alcohol dehydrogenase
AHWSGPPLELVRSLGAEVVIDHTRADPLAGPGLYDIVADTVGAHSFAACERILDENGRYLSVAGSLADLLARPRGSKTSIGGPAEERVDDLQQLMSLAAQGALKPVIDRVYGFDDLPQAHAHVETGRKRGAVVVSLARA

SEQ ID NO: 10335 - protein, 182 aa, Zea mays
  Coding DNA Sequence Number=SeqID_4245
  Subcellular localization annotation: CTP_CleavageSite=61; ConfidenceScore=5.59e-01
SLWHRTSSQDPAVSQPPSKYYMPERASWFMSRRTPALSVVPAWRDTLCWPRRPRRTDQWVSLRARVVPSSMSSSQRSNSRLGYRGVGVAGLGFGAECRRDGRRRRGGGEGDAAEGAGGRRRRRPSSSSSASRPPAAAGRSSESKPSKLAAEDGRSMLRARSSRMRRAARVRPEPDPARRCQS

SEQ ID NO: 10336 - protein, 322 aa, Zea mays
  Coding DNA Sequence Number=SeqID_4247
  Homolog annotation: Hit_ID=A4RMU1; Match level="QueryCoverage=26%, HitCoverage=6%, E-value=2e-08, Identity=38%"; Hit description =Putative uncharacterized protein
  Pfam annotation: Domain name=Collagen; Domain location=201-260; Score= -5.1; E_value=0.0007; Accession=PF01391.8; Description=Collagen triple helix repeat (20 copies)
LEVYVAVNGPDVTLTDVLTATVTDQSTLTTTFTTTISDATATQTQTVTAIYVCSNGKCYPENDSGSKVVFIFVGYPGEDCDGELVYISEACSCQGGSQYVPKYCSNGSCHGLTVYKPEECKDWYNHDNFFVPANCDVCEHGDIVYKPWENSWGTPAECHEAEIPSCTKDTCPTNGGGSKGGNGGNGGSGGNGGNGGNGGNGGNGGSGGNGGNGGSGGNGGSGSNGGSGSNGGSGSNGGSGSNGGSGSSGSNGGSGSEGSGSKGSSGSEGSGSKGSSGSEGSGSKGESGSSCEGDHCVPVTVSSAGKQAVSALALLAAVAALL

SEQ ID NO: 10337 - protein, 84 aa, Zea mays
  misc_feature (2)..(4): Xaa can be any naturally occurring amino acid
  misc_feature (6)..(8): Xaa can be any naturally occurring amino acid
  misc_feature (10)..(13): Xaa can be any naturally occurring amino acid
  misc_feature (16)..(16): Xaa can be any naturally occurring amino acid
  misc_feature (18)..(19): Xaa can be any naturally occurring amino acid
  misc_feature (33)..(33): Xaa can be any naturally occurring amino acid
  misc_feature (36)..(36): Xaa can be any naturally occurring amino acid
  misc_feature (44)..(44): Xaa can be any naturally occurring amino acid
  misc_feature (71)..(71): Xaa can be any naturally occurring amino acid
  misc_feature (78)..(78): Xaa can be any naturally occurring amino acid
  misc_feature (80)..(80): Xaa can be any naturally occurring amino acid
  misc_feature (83)..(83): Xaa can be any naturally occurring amino acid
  Coding DNA Sequence Number=SeqID_4248
  Subcellular localization annotation: CTP_CleavageSite=56; ConfidenceScore=5.20e-01
PXXXPXXXKXXXXFFXQXXKALFQPNLKPLRVXVPXKEPTCSGXDRRKAEPVLFPPASLNPKKRRRQRQAXAAAGTRXTXDDXD

SEQ ID NO: 10338 - protein, 90 aa, Zea mays
  Coding DNA Sequence Number=SeqID_426
VMPSNNFYPMSLHIILIWSMISSFVIKHCHASIVLLHHSMILFHASSSLLKGNSYDKDKRAEPPLQSPPKKIKQEPLRIIDSTSQKGHQE

SEQ ID NO: 10339 - protein, 346 aa, Zea mays
  misc_feature (36)..(36): Xaa can be any naturally occurring amino acid
  misc_feature (133)..(133): Xaa can be any naturally occurring amino acid
  misc_feature (137)..(137): Xaa can be any naturally occurring amino acid
  misc_feature (211)..(211): Xaa can be any naturally occurring amino acid
  Coding DNA Sequence Number=SeqID_428
  Gene Ontology: Mol. function=protein-tyrosine kinase activity; Cellular component=integral to membrane; Biological process=protein amino acid phosphorylation
  Homolog annotation: Hit_ID=Q84SY9; Match level="QueryCoverage=53%, HitCoverage=44%, E-value=9e-50, Identity=57%"; Hit description =Putative uncharacterized protein OSJNBa0087C10.18
  Pfam annotation: Domain name=Pkinase; Domain location=110-341; Score=- 69.4; E_value=0.00019; Accession=PF00069.15; Description=Protein kinase domain
  Pfam annotation: Domain name=Pkinase_Tyr; Domain location=110-334; Score=-94.3; E_value=1.2e-06; Accession=PF07714.7; Description =Protein tyrosine kinase
  Pfam module annotation: Pfam domain module=Pkinase::Pkinase_Tyr; Domain location=110-341::110-334
MRPPHHLRLRLLILLVAACLPPPAACRHIYPPPPPXGGGISSRTAALLALLLLYLCAAIAVRRFRSRGASLALAREPAASRAAAFLRRHRLHHHRPAFTYEQLCAATAGFDPARKLGDGGFGTVFLAHLPPAXRPAXVKRLHFPPPPSSSLPSASAAITKSFCNEVLILSALRHPHLVRLHGFCADPRALLLVYDFVPNGTLSHHLPEAPXSPPLPWRTSLAMAAQIASALEYLHLGIVDAFSERQTLKKRTVAVPSAQGRTVRARGRTVRGLVRGAVVLSAQGRTVCGLGPDGPRPGAWLGLLCLTAGRSAPWGPDGPRVRRGGESRRRRLDLAPGRDPVGEERS

SEQ ID NO: 10340 - protein, 169 aa, Zea mays
  misc_feature (48)..(48): Xaa can be any naturally occurring amino acid
  misc_feature (98)..(98): Xaa can be any naturally occurring amino acid
  misc_feature (110)..(110): Xaa can be any naturally occurring amino acid
  Coding DNA Sequence Number=SeqID_429
  Homolog annotation: Hit_ID=A3BX73; Match level="QueryCoverage=78%, HitCoverage=73%, E-value=1e-22, Identity=50%"; Hit description =Putative uncharacterized protein
  Subcellular localization annotation: CTP_CleavageSite=25; ConfidenceScore=5.04e-01
MAYNLALAAAIATAAAARAPRRAVVASASAGEAAHRIIRRRAPSGQQXLRPWPPRHPLSPSVAEVCRAIGVSDDAASAAASMEAKNSAFMDLVASTPXIGQPESEPERRXLREAAEWVVDTTETRACEGQKSFLVLCMMTFPAWFLLLFIALGVIRLPFDIPVLDGLLM

SEQ ID NO: 10341 - protein, 169 aa, Zea mays
  Coding DNA Sequence Number=SeqID_430
NGELSRTTQHCCSTSIRLHATASLPYYYLCSRGNSRPLCPATEIATEHFWWRSSSLSRHIKRTAVHPLAVASRGRNHARALEETTGSSFLDCVVSRRRYPIQHRRAEEQPPTAVRRGNRRQRKSGPRPPSGFGNDPAQDETRQSSAAARYRRRRVAAAAGTTRHRCRGS

SEQ ID NO: 10342 - protein, 220 aa, Zea mays
  Coding DNA Sequence Number=SeqID_432
NLYPPGSLWIARLWCVARWGRDGDGSGCTCSSVSSRSDADCQLHSLQISIFARVFSFRVALSFWAHSELKQCQERSAMQQKTGAAAGIGLRRSTSTAPTSRRWIPPSPAVAPLPAAAPSAVAPSGPYATTSAAQAGSPSASPDDALLSRGARMGFRVGTPPDPSSCPGGARLYNAPTAAMFPSTTGPSFFDLLQSFEGIMSCEDAYEEDEMEMELGPWHD

SEQ ID NO: 10343 - protein, 225 aa, Zea mays
  Coding DNA Sequence Number=SeqID_434
  Gene Ontology: Mol. function=nucleic acid binding; Cellular component= intracellular; Biological process=regulation of transcription
  Homolog annotation: Hit_ID=A2Y5G6; Match level="QueryCoverage=56%, HitCoverage=76%, E-value=2e-33, Identity=53%"; Hit description =Putative uncharacterized protein
  Pfam annotation: Domain name=zf-C2H2; Domain location=143-165; Score =17.0; E_value=0.072; Accession=PF00096.16; Description=Zinc finger, C2H2 type
  Pfam annotation: Domain name=zf-C2H2; Domain location=86-108; Score =16.3; E_value=0.12; Accession=PF00096.16; Description=Zinc finger, C2H2 type
  Pfam module annotation: Pfam domain module=zf-C2H2::zf-C2H2; Domain location=143-165::86-108
MPYTTACLPAARRSRVVLGVNQLDRAMQPPTTAKRDRAAWEADAGAADTARLLMLLAQAQAQQQQRLLQHAYHHGVAPLFPAGRVFECKTCSRQFPTFQALGGHRASHKRPRALQQQQPVVVADDHDAGLCLGRQPPKPRRVHECPVCGLEFAIGQALGGHMRRHRADAEVRPPPDKARDVAGGICLDLNLTPSENCAKCRSVVVLGAAAGQGVHKALAMLDCSL

SEQ ID NO: 10344 - protein, 84 aa, Zea mays
  Coding DNA Sequence Number=SeqID_435
  Subcellular localization annotation: CTP_CleavageSite=38; ConfidenceScore=5.00e-01
NQFRWLVLLSSTCSLNINVTSQYMSTISLMLTIGSRLVGNGKGALFFVLHVPFHLFLCQDNIKHIANFWSIQYSLLFSAKLVTA

SEQ ID NO: 10345 - protein, 173 aa, Zea mays
  misc_feature (38)..(38): Xaa can be any naturally occurring amino acid
  Coding DNA Sequence Number=SeqID_437
  Gene Ontology: Mol. function=oxidoreductase activity; Cellular component=cytoplasm; Biological process=ethylene biosynthetic process
  Homolog annotation: Hit_ID=Q6ES21; Match level="QueryCoverage=97%, HitCoverage=50%, E-value=3e-45, Identity=56%"; Hit description =Putative iron/ascorbate-dependent oxidoreductase
  Pfam annotation: Domain name=2OG-FeII_Oxy; Domain location=19-120; Score=101.6; E_value=2.5e-27; Accession=PF03171.10; Description=2OG -Fe(II) oxygenase superfamily
KRIKDCILGTTAKTLGLGEDCFARFNYYPPCPRPDLVXGVKPHSDSGVLTILLIDKDVGGLQVLRDGVWHNVPASSPFRLLINVGDFGAGCRNGVLRSPVHRAVTNARKERISLAMFHGLDPDEEIEPAPAALLSENQPARYRTVKAAKEYLAGFYEHFCRFIESVKIHLNEV

SEQ ID NO: 10346 - protein, 90 aa, Zea mays
  Coding DNA Sequence Number=SeqID_438
KNKIIRTLGFCYKMLLMLLCSLYIVPPYAFMIPLLTWAAMCHWCRLTSEGIRNLILPAQCTPSETIIIVLFHQNCRSSLLILSLMDSLHS

SEQ ID NO: 10347 - protein, 161 aa, Zea mays
  Coding DNA Sequence Number=SeqID_440
  Gene Ontology: Mol. function=protein binding
  Homolog annotation: Hit_ID=A3BQF1; Match level="QueryCoverage=90%, HitCoverage=33%, E-value=2e-30, Identity=45%"; Hit description =Putative uncharacterized protein
  Pfam annotation: Domain name=LRR_2; Domain location=100-124; Score =17.2; E_value=0.064; Accession=PF07723.3; Description=Leucine Rich Repeat
  Pfam annotation: Domain name=LRR_2; Domain location=15-40; Score=0.3; E_value=16; Accession=PF07723.3; Description=Leucine Rich Repeat
  Pfam module annotation: Pfam domain module=LRR_2::LRR_2; Domain location=100-124::15-40
KSQLQPTTPCCRSACLRSLSLVSCPEVTNKGFTDLVTNAPKLEDLSLELCPNVGGRHVLECAGRACPRLARFRLRRECFRFSLNYSRRTAEALGIAAMTGLRSLTLVSSNISNDELVAVLDGCPRLESLCLRDCYKVIADGSLRARCAGIRALTLPVPDVW

SEQ ID NO: 10348 - protein, 73 aa, Zea mays
  Coding DNA Sequence Number=SeqID_441
KPMQHGYLLLFSKAINKKRVYWILTLLLLQLHLNTTPELCLHYCQDSKLEHMFLHTLHIVSHFFVDMPPPPNI

SEQ ID NO: 10349 - protein, 149 aa, Zea mays
  Coding DNA Sequence Number=SeqID_442
  Subcellular localization annotation: CTP_CleavageSite=15; ConfidenceScore=5.28e-01
QILSNTTHDTQSACRARSRKRPRGQQRSQGRGTVRTEQGRARDRARHGRRHRHVGNFTTRGDHDRAQGEEDPGARNLTATRAQATGCGARREPAKWKTSRGSRGLGAGEQELGRGSQDERQGTSRARHGSRLAAERSMHRCRERHKAPT

SEQ ID NO: 10350 - protein, 93 aa, Zea mays
  misc_feature (3)..(3): Xaa can be any naturally occurring amino acid
  misc_feature (5)..(5): Xaa can be any naturally occurring amino acid
  misc_feature (31)..(31): Xaa can be any naturally occurring amino acid
  misc_feature (54)..(54): Xaa can be any naturally occurring amino acid
  misc_feature (77)..(77): Xaa can be any naturally occurring amino acid
  Coding DNA Sequence Number=SeqID_4250
  Homolog annotation: Hit_ID=A2YNU7; Match level="QueryCoverage=77%, HitCoverage=25%, E-value=6e-16, Identity=58%"; Hit description =Putative uncharacterized protein
KNXNXSPFSFGDPHPDSTPKTARKIPRKKVXHLPGNDIFKGHAPPASPEKHLTXAMLKELPGSHIFADGKEPLRERXRGTRTPPGGERSLALI

SEQ ID NO: 10351 - protein, 67 aa, Zea mays
  Coding DNA Sequence Number=SeqID_4251
RIGFLGQNLVFAELLTSFVYYFQIKKLQVCLLAVEGCAALGQLLELQYCVAHIFQSLSISPRTSHNI

SEQ ID NO: 10352 - protein, 198 aa, Zea mays
  Coding DNA Sequence Number=SeqID_4253
  Gene Ontology: Mol. function=nucleotide binding
  Homolog annotation: Hit_ID=A0FQF3; Match level="QueryCoverage=100%, HitCoverage=69%, E-value=1e-86, Identity=80%"; Hit description =Uncharacterised P-loop ATPase protein UPF0042
  Pfam annotation: Domain name=ATP_bind_2; Domain location=1-198; Score= 140.3; E_value=5.4e-39; Accession=PF03668.6; Description=P-loop ATPase protein family
MRIVLITGISGSGKSVALNALEDAGYYCVDNLPPHVLPELARYLAEGGQHRLAVAIDARSSASLDEMPGLIRALSLEHDVRVLFLNASTQALIQRFSETRRRHPLSGSPSSLEEAIERERDLVAPLAEFGHQIDTSTLRANVLRTWVKRFIEQKNNDLMVMFESFGFKRGVPLDADLMFDVRALPNPYYDHELRPLTG

SEQ ID NO: 10353 - protein, 91 aa, Zea mays
  Coding DNA Sequence Number=SeqID_4254
  Gene Ontology: Mol. function=enzyme inhibitor activity; Biological process=specification of floral organ number
  Homolog annotation: Hit_ID=Q8GT95; Match level="QueryCoverage=62%, HitCoverage=17%, E-value=3e-12, Identity=63%"; Hit description =Polygalacturonase inhibitor 1 precursor
IRGPVPLSLERLSPLQKLDFSYNPLCGPLPKGPGVFKPGCKPYGPNQFPKGTPLPGCQDLEWSELPGGQGFLNSALLSLAGVVFASRSWCV

SEQ ID NO: 10354 - protein, 365 aa, Zea mays
  misc_feature (18)..(18): Xaa can be any naturally occurring amino acid
  misc_feature (144)..(144): Xaa can be any naturally occurring amino acid
  misc_feature (199)..(199): Xaa can be any naturally occurring amino acid
  misc_feature (207)..(207): Xaa can be any naturally occurring amino acid
  misc_feature (231)..(231): Xaa can be any naturally occurring amino acid
  misc_feature (266)..(266): Xaa can be any naturally occurring amino acid
  misc_feature (272)..(272): Xaa can be any naturally occurring amino acid
  Coding DNA Sequence Number=SeqID_4255
  Gene Ontology: Mol. function=aspartic-type endopeptidase activity; Cellular component=small subunit processome; Biological process=DNA integration
  Homolog annotation: Hit_ID=O24587; Match level="QueryCoverage=99%, HitCoverage=34%, E-value=1e-130, Identity=61%"; Hit description=Pol
  Pfam annotation: Domain name=RVT_2; Domain location=1-133; Score=5.0; E_value=6.4e-16; Accession=PF07727.4; Description=Reverse transcriptase (RNA-dependent
PSKLNKVLYGLKQAPRAXYECLRDFLIENQFKVGKVYPTLFTKGVVKGSFICQIYVDDIIFGSTNRSYCKKFSNIMVKKFEISMLGELKFFLGFQIKQLKKGTFICQMKYTHGILKKFGMNDAKPIKRPMRTNGHLDIDMRGKXISKGILIYDMISTRLDIMLSVCMYERFQDNTKECHLRVIKRIMQYLVHTPNPGLXIEKVKSLXLIGYSNTNYVGCKVDRKACQGHVXFLGRSLVSWSSKKQNSIALSTAEVQYIVAEHCWAXLLRMRXTLKDFGYNISKVHLLCDSEGVIRMIDSPVDHDRTKHINIQYHFLGDHSHKGDIVIDHVSSNKQLADIFTKPLDERKFCGLRNKLNIINSRNMD

SEQ ID NO: 10355 - protein, 176 aa, Zea mays
  misc_feature (15)..(15): Xaa can be any naturally occurring amino acid
  misc_feature (27)..(27): Xaa can be any naturally occurring amino acid
  misc_feature (32)..(32): Xaa can be any naturally occurring amino acid
  misc_feature (48)..(48): Xaa can be any naturally occurring amino acid
  misc_feature (50)..(50): Xaa can be any naturally occurring amino acid
  misc_feature (67)..(67): Xaa can be any naturally occurring amino acid
  misc_feature (80)..(80): Xaa can be any naturally occurring amino acid
  misc_feature (112)..(112): Xaa can be any naturally occurring amino acid
  misc_feature (114)..(114): Xaa can be any naturally occurring amino acid
  misc_feature (124)..(124): Xaa can be any naturally occurring amino acid
  misc_feature (139)..(139): Xaa can be any naturally occurring amino acid
  misc_feature (145)..(145): Xaa can be any naturally occurring amino acid
  misc_feature (147)..(147): Xaa can be any naturally occurring amino acid
  misc_feature (152)..(152): Xaa can be any naturally occurring amino acid
  misc_feature (154)..(154): Xaa can be any naturally occurring amino acid
  misc_feature (157)..(158): Xaa can be any naturally occurring amino acid
  misc_feature (166)..(166): Xaa can be any naturally occurring amino acid
  misc_feature (169)..(169): Xaa can be any naturally occurring amino acid
  misc_feature (172)..(172): Xaa can be any naturally occurring amino acid
  Coding DNA Sequence Number=SeqID_4256
KSWSSTAVAGALELXDPTGCRGERSLXPPPPXIQRGGPRPTRHVIGAXVXTCEKCTATYANVAPPRXRNRCRDSRQPCAXPNSAKPSTSVTGSVSRKEKARRVELAKVGPGXKXGGRRGEEQSXLLVGSRSLLGEARGXLFPPAXKXSRPWXRXSNXXTQRVARGXTSXPSXDFRG

SEQ ID NO: 10356 - protein, 185 aa, Zea mays
  Coding DNA Sequence Number=SeqID_4258
  Gene Ontology: Mol. function=structural constituent of ribosome; Cellular component=intracellular; Biological process=translation
  Homolog annotation: Hit_ID=A3C0C3; Match level="QueryCoverage=70%, HitCoverage=39%, E-value=1e-52, Identity=81%"; Hit description =Putative uncharacterized protein
  Pfam annotation: Domain name=Ribosomal_L32e; Domain location=66-175; Score=173.5; E_value=5.6e-49; Accession=PF01655.8; Description =Ribosomal protein L32
  Subcellular localization annotation: CTP_CleavageSite=25; ConfidenceScore=5.37e-01
KKKKKKKKKKKKKKKKKKKKKKKIRGFTPGTPNPAPPPPRVRPSSWGAPIQKRGGPLLTKKIGKKGVKQFKRPHLDRYKGLKPSWGRPKGIDSRVRRKFKGCPLMPNIGYGFDKSTRPYLPNKFKKFVVPNVFELELLMMHNRTYCAEIAHNVSTKKRKEIVERAAQLDIVVTNKLARLPSQEDE

SEQ ID NO: 10357 - protein, 101 aa, Zea mays
  Coding DNA Sequence Number=SeqID_4259
  Gene Ontology: Mol. function=protein dimerization activity
  Homolog annotation: Hit_ID=P47917; Match level="QueryCoverage=49%, HitCoverage=13%, E-value=9e-12, Identity=64%"; Hit description=O -methyltransferase ZRP4
MVVAGPGSGSANDDPSESDLRHVETQILFDLLIMCVNGVERDKQECKKIFSEDGFQDYRIIPLLGVRSIIELLSLIKISVPPPIELSSPLATSLLWLGVWW

SEQ ID NO: 10358 - protein, 112 aa, Zea mays
  Coding DNA Sequence Number=SeqID_4260
  Gene Ontology: Mol. function=oxidoreductase activity, acting on the CH-OH group of donors, NAD or NADP as acceptor; Cellular component =cytoplasm; Biological process=tricarboxylic acid cycle intermediate metabolic process
  Homolog annotation: Hit_ID=P57106; Match level="QueryCoverage=100%, HitCoverage=33%, E-value=2e-55, Identity=98%"; Hit description =Malate dehydrogenase, cytoplasmic 2
  Pfam annotation: Domain name=Ldh_1_N; Domain location=6-112; Score =33.6; E_value=3.3e-09; Accession=PF00056.13; Description =lactatemalate dehydrogenase, NAD bin
MAKEPVRVLVTGAAGQIGYALVPMIARGIMLGADQPVILHMLDIPFAAEALNGVKMELIDAAFPLLKGVVATTDAVEGCTGVNVAVMVGGFPRKEGMERKDVMSKNVSIYKS

SEQ ID NO: 10359 - protein, 136 aa, Zea mays
  misc_feature (14)..(14): Xaa can be any naturally occurring amino acid
  misc_feature (27)..(27): Xaa can be any naturally occurring amino acid
  misc_feature (68)..(68): Xaa can be any naturally occurring amino acid
  misc_feature (91)..(91): Xaa can be any naturally occurring amino acid
  misc_feature (112)..(112): Xaa can be any naturally occurring amino acid
  Coding DNA Sequence Number=SeqID_4261
  Gene Ontology: Mol. function=cytochrome-c oxidase activity; Cellular component=mitochondrial respiratory chain; Biological process =aerobic respiration
  Homolog annotation: Hit_ID=Q85DZ5; Match level="QueryCoverage=97%, HitCoverage=25%, E-value=1e-43, Identity=63%"; Hit description =Cytochrome c oxidase subunit 1
IGAVFAIMGGFIHXFPLFTGYTLHETXAKIHFGVIFAGVNLTFFPQHFLGLAGIPRRYSDYPDAYTLXNNISSIGSLISLVAVIMIIFIIXEAFAAKREVTLTELTSTNIEXLHGCPPPYHTFEEPAFVQIQPSNN

SEQ ID NO: 10360 - protein, 146 aa, Zea mays
  Coding DNA Sequence Number=SeqID_4262
  Gene Ontology: Mol. function=structural constituent of ribosome; Cellular component=ribonucleoprotein complex; Biological process =translation
  Homolog annotation: Hit_ID=A5AQ64; Match level="QueryCoverage=100%, HitCoverage=100%, E-value=3e-46, Identity=66%"; Hit description =Putative uncharacterized protein
  Pfam annotation: Domain name=KOW; Domain location=51-82; Score=36.6; E_value=8.9e-08; Accession=PF00467.19; Description=KOW motif
  Subcellular localization annotation: CTP_CleavageSite=45; ConfidenceScore=5.53e-01
MKFNPRVSSSRRKSRKAHFTAPSSVRRVLMSAPLSTDLRSKYNVRSVPVRKEDEVQVVRGTYKGREGKVTQVYRRKWVIHIERITREKVNGSTVNVGINPSKVVITKLRLDKDRKSLLDRKAKGRAAADKEKGTKFAPEDIMQTVD

SEQ ID NO: 10361 - protein, 207 aa, Zea mays
  Coding DNA Sequence Number=SeqID_4263
  Gene Ontology: Mol. function=nutrient reservoir activity
  Homolog annotation: Hit_ID=Q946V3; Match level="QueryCoverage=87%, HitCoverage=88%, E-value=5e-55, Identity=63%"; Hit description=Alpha globulin
  Pfam annotation: Domain name=GRP; Domain location=9-152; Score=-26.8; E_value=0.043; Accession=PF07172.2; Description=Glycine rich protein family
  Pfam annotation: Domain name=Tryp_alpha_amyl; Domain location=51-198; Score=49.7; E_value=9.9e-12; Accession=PF00234.12; Description =Protease inhibitorseed storageLTP f
  Pfam module annotation: Pfam domain module=GRP::Tryp_alpha_amyl; Domain location=9-152::51-198
MAKIAAAAAAAAALCFAALVAVAVCQGEVERQRLRDLQCWQEVQESPLDACRQVLDRQLTGGGVGGPFRWGTGLRMRCCQQLQDVSRECRCAAIRSMVRGYEEAMPPPEKGWWPWGRQQQPPPQGGGGGGGQGGYYYPCSRPGEGYGYGQGGQRQMYPPCRPGTTGGGPRIGRVRLTKAREYAAGLPMMCRLSEPQECSVFSGGDQY

SEQ ID NO: 10362 - protein, 134 aa, Zea mays
  misc_feature (21)..(21): Xaa can be any naturally occurring amino acid
  misc_feature (66)..(66): Xaa can be any naturally occurring amino acid
  misc_feature (105)..(105): Xaa can be any naturally occurring amino acid
  Coding DNA Sequence Number=SeqID_4264
  Gene Ontology: Mol. function=UDP-glucose 4-epimerase activity; Cellular component=soluble fraction; Biological process=galactose metabolic process
  Homolog annotation: Hit_ID=Q6ZDJ7; Match level="QueryCoverage=78%, HitCoverage=25%, E-value=6e-37, Identity=70%"; Hit description =Putative UDP-glucose 4-epimerase
ISARGLGGGGGAPQYGSPRSXPCAENSPLTPNTPYGPPKLLVQDICRDIYRSYPEWNIMGGGYFIXLWAHPRGYLGEDPRGIPNNLMPYVQQGAAGRRPALTGLXNDYATRDGTAVIRAAYDERNCADLGYHSD

SEQ ID NO: 10363 - protein, 102 aa, Zea mays
  misc_feature (76)..(76): Xaa can be any naturally occurring amino acid
  Coding DNA Sequence Number=SeqID_4265
  Gene Ontology: Mol. function=galactosylgalactosylxylosylprotein 3 -beta-glucuronosyltransferase activity; Cellular component=membrane; Biological process=cellulose and pectin-containing secondary cell wall biogenesis
  Homolog annotation: Hit_ID=Q10N05; Match level="QueryCoverage=95%, HitCoverage=23%, E-value=1e-34, Identity=72%"; Hit description =Glycosyltransferase family 43 protein, expressed
HLTYKNNFTYAETAAGRDRHHQRNVALGHIEHHRLAGVVLFAGLGDVFDLRFFDELRGISAFRAWPIATMRARERXVVVRGNASSSLPESAWFPQDLGGKGK

SEQ ID NO: 10364 - protein, 151 aa, Zea mays
  Coding DNA Sequence Number=SeqID_4266
  Gene Ontology: Mol. function=binding
  Homolog annotation: Hit_ID=A4QYF6; Match level="QueryCoverage=82%, HitCoverage=12%, E-value=2e-17, Identity=44%"; Hit description =Putative uncharacterized protein
MGRIGYRAPPSSRFAAATMWDSPRTQKLGRATEGEAQDVESPLIPWLIYLVRNQTDSERLSAAAILTGLFKAGLGTQGTRETSLGLLVVPILVGMISRNDKDKPNSEHENERRRILERAPAVLAHLIADSEVLQKAAFDCDAVTILGGGGD

SEQ ID NO: 10365 - protein, 81 aa, Zea mays
  misc_feature (42)..(81): Xaa can be any naturally occurring amino acid
  Coding DNA Sequence Number=SeqID_4267
STIAQSATCSTTVCKEKTIVRSIPVKLCTSNTNIEKTGRNPXXXXXXXXXXXXXXXXXXXXXXXXXXXXXXXXXXXXXXXX

SEQ ID NO: 10366 - protein, 103 aa, Zea mays
  Coding DNA Sequence Number=SeqID_4269
KVRAEVPAKLKKVKARYPREKRYRLIFSDLCFQIYSIIFNDTGLSERFVNFVPLYAYLYSQTTHNSNFPPVGGGGGLVGPHPGRPGGRPGEARAPARGAPRGG

SEQ ID NO: 10367 - protein, 90 aa, Zea mays
  Coding DNA Sequence Number=SeqID_4271
  Homolog annotation: Hit_ID=A2XVD5; Match level="QueryCoverage=75%, HitCoverage=95%, E-value=3e-16, Identity=48%"; Hit description =Putative uncharacterized protein
  Subcellular localization annotation: CTP_CleavageSite=36; ConfidenceScore=5.23e-01
MSRVLPGLTRRLYAPPVSSVMAGGKLFGRALSYVVNQFLVEGLANNRAVQRFAVKTNKTLESLSSKAKEMREELSEQFKDARGQKDHFKQ

SEQ ID NO: 10368 - protein, 131 aa, Zea mays
  Coding DNA Sequence Number=SeqID_4272
  Gene Ontology: Mol. function=structural constituent of ribosome; Cellular component=ribonucleoprotein complex; Biological process =translation
  Homolog annotation: Hit_ID=P50883; Match level="QueryCoverage=100%, HitCoverage=78%, E-value=1e-65, Identity=98%"; Hit description=60S ribosomal protein L12-1
  Pfam annotation: Domain name=Ribosomal_L11; Domain location=76-131; Score=28.5; E_value=2.4e-05; Accession=PF00298.9; Description =Ribosomal protein L11, RNA binding domain
  Pfam annotation: Domain name=Ribosomal_L11_N; Domain location=12-71; Score=77.1; E_value=5.7e-20; Accession=PF03946.4; Description =Ribosomal protein L11, N-terminal domain
  Pfam module annotation: Pfam domain module=Ribosomal_L11::Ribosomal _L11_N; Domain location=76-131::12-71
MPPKLDPSAIVDVYVRVTGGEVGAASSLAPKIGPLGLAPKKIGEDIAKETAKEWKGLRVTVKLTVQNRQAKVTVVPSAAALVIKALKEPERDRKKVKNIKHNGNISFDDVIEIARIMRPRSIAKELSGTVR

SEQ ID NO: 10369 - protein, 90 aa, Zea mays
  Coding DNA Sequence Number=SeqID_4273
  Subcellular localization annotation: CTP_CleavageSite=39; ConfidenceScore=5.13e-01
GKGVPFLGNRVKPKLSLIAKTKSWKNLPPKWPTTVKWVGCSKKVPFIPWVEFSRVKPKANEKIGKYPQITELKQGKPFCLVSLKVMVLNS

SEQ ID NO: 10370 - protein, 249 aa, Zea mays
  misc_feature (32)..(34): Xaa can be any naturally occurring amino acid
  misc_feature (44)..(44): Xaa can be any naturally occurring amino acid
  misc_feature (53)..(53): Xaa can be any naturally occurring amino acid
  misc_feature (56)..(56): Xaa can be any naturally occurring amino acid
  misc_feature (64)..(64): Xaa can be any naturally occurring amino acid
  misc_feature (69)..(69): Xaa can be any naturally occurring amino acid
  misc_feature (80)..(80): Xaa can be any naturally occurring amino acid
  misc_feature (83)..(84): Xaa can be any naturally occurring amino acid
  misc_feature (89)..(90): Xaa can be any naturally occurring amino acid
  misc_feature (97)..(97): Xaa can be any naturally occurring amino acid
  misc_feature (99)..(99): Xaa can be any naturally occurring amino acid
  misc_feature (101)..(101): Xaa can be any naturally occurring amino acid
  misc_feature (104)..(104): Xaa can be any naturally occurring amino acid
  misc_feature (107)..(107): Xaa can be any naturally occurring amino acid
  misc_feature (110)..(110): Xaa can be any naturally occurring amino acid
  misc_feature (119)..(119): Xaa can be any naturally occurring amino acid
  misc_feature (122)..(122): Xaa can be any naturally occurring amino acid
  misc_feature (124)..(125): Xaa can be any naturally occurring amino acid
  misc_feature (128)..(129): Xaa can be any naturally occurring amino acid
  misc_feature (132)..(132): Xaa can be any naturally occurring amino acid
  misc_feature (139)..(140): Xaa can be any naturally occurring amino acid
  misc_feature (144)..(144): Xaa can be any naturally occurring amino acid
  misc_feature (151)..(151): Xaa can be any naturally occurring amino acid
  misc_feature (167)..(168): Xaa can be any naturally occurring amino acid
  misc_feature (171)..(171): Xaa can be any naturally occurring amino acid
  misc_feature (185)..(185): Xaa can be any naturally occurring amino acid
  misc_feature (192)..(193): Xaa can be any naturally occurring amino acid
  misc_feature (195)..(196): Xaa can be any naturally occurring amino acid
  misc_feature (198)..(199): Xaa can be any naturally occurring amino acid
  misc_feature (201)..(202): Xaa can be any naturally occurring amino acid
  misc_feature (206)..(206): Xaa can be any naturally occurring amino acid
  misc_feature (209)..(210): Xaa can be any naturally occurring amino acid
  misc_feature (224)..(226): Xaa can be any naturally occurring amino acid
  misc_feature (229)..(229): Xaa can be any naturally occurring amino acid
  misc_feature (239)..(239): Xaa can be any naturally occurring amino acid
  Coding DNA Sequence Number=SeqID_4275
  Subcellular localization annotation: CTP_CleavageSite=29; ConfidenceScore=5.60e-01
GRALAPPSPPPLPPSRCPPPRSLPPPAPCCSXXXGPSPPAPGAXSPPLSLLSXGGXVPPGWSPXRWPRXAALVVVVGPPXRSXXPVGWXXAAAVAGXRXGXPPXVGXVLXGPVVAVALXWFXWXXVPXXVVXFGFWVVXXRLPXALVVACXLARGGCSPPPPVSGGXXCGXMKLPKSLSASRHNXRLCCAHXXGXXRXXGXXLGSXLLXXRCSVASLGVFLPAXXXLGXPRAPARAAAXPAKFLSLAAV

SEQ ID NO: 10371 - protein, 108 aa, Zea mays
  misc_feature (19)..(19): Xaa can be any naturally occurring amino acid
  misc_feature (62)..(62): Xaa can be any naturally occurring amino acid
  misc_feature (77)..(77): Xaa can be any naturally occurring amino acid
  misc_feature (96)..(96): Xaa can be any naturally occurring amino acid
  Coding DNA Sequence Number=SeqID_4277
  Homolog annotation: Hit_ID=Q53PY3; Match level="QueryCoverage=84%, HitCoverage=79%, E-value=1e-25, Identity=62%"; Hit description =Expressed protein
  Pfam annotation: Domain name=Dabb; Domain location=4-99; Score=45.4; E_value=2.1e-10; Accession=PF07876.3; Description=Stress responsive AB Barrel Domain
MGQVKHLCLAKFKQGVVVXDDVLKGMTDLEAGMDTSQSFEWGQDVMNQEMLTQGFMYVLSLXFASTVDLTAYMAHDXHTALAATIMPAMDKVLVVXYPVVVAKPPPPA

SEQ ID NO: 10372 - protein, 88 aa, Zea mays
  Coding DNA Sequence Number=SeqID_4278
  Gene Ontology: Mol. function=catalytic activity; Cellular component =intracellular; Biological process=regulation of transcription
  Homolog annotation: Hit_ID=Q5NB67; Match level="QueryCoverage=60%, HitCoverage=10%, E-value=2e-16, Identity=77%"; Hit description =Putative uncharacterized protein P0431F01.23
VIGRKPLTCMKGFPAKARVVYVPVLEVGSEGRLAHACKVITDAFIKAGLVFERDVREHLHNKIIVKLNKSFFLGCGITVLPFCRCRHA

SEQ ID NO: 10373 - protein, 201 aa, Zea mays
  misc_feature (1)..(11): Xaa can be any naturally occurring amino acid
  Coding DNA Sequence Number=SeqID_4279
  Subcellular localization annotation: CTP_CleavageSite=68; ConfidenceScore=5.30e-01
XXXXXXXXXXXLSSLSYLHRPISYPPSRSPLPHGALSHGRRPSPPWTPLFLPTLRQRPRLPPFQWTPAAGAVPPLRSPKMAGLTHDGFPLSMLFSSRHGSASLQQSGDRALPFPRHAGAMSSPSPANLASHQEGVSLSAAPMATISPSCACPGLSSSTPAPQSSIAAAQLVPAPTPTPLFPLASTSATVSFIVGAKSVESE

SEQ ID NO: 10374 - protein, 72 aa, Zea mays
  misc_feature (6)..(6): Xaa can be any naturally occurring amino acid
  Coding DNA Sequence Number=SeqID_4281
LNLKIXILLEFVIIRSNLFPASGSSLFRVCTYSIPQCTYPVLDPPDAATYVTYAPSCTKPHRRIIWAIRLIA

SEQ ID NO: 10375 - protein, 103 aa, Zea mays
  Coding DNA Sequence Number=SeqID_4282
  Homolog annotation: Hit_ID=A3AX77; Match level="QueryCoverage=62%, HitCoverage=17%, E-value=1e-25, Identity=85%"; Hit description =Putative uncharacterized protein
  Pfam annotation: Domain name=DUF266; Domain location=2-103; Score= -148.4; E_value=0.00013; Accession=PF03267.4; Description=Arabidopsis protein of unknown function, DUF266
WVLSWAIIPSAYIIFVFLISFYDPGPHGNFRYSKNMLPEVTEADFRKGSQEEFWFSVKRQHALMIIADSLYYTKFKLHCRVRFCLLLIVPSQTTPTFEMDRVF

SEQ ID NO: 10376 - protein, 83 aa, Zea mays
  Coding DNA Sequence Number=SeqID_4283
  Subcellular localization annotation: CTP_CleavageSite=34; ConfidenceScore=5.45e-01
ACRYRSGINSRVDELTSRRPPFFFFFFFFRVNSEANNKSVPSTLDSSFIGTVSRTAPLNRFQNQREGLLPSYKPHPKQISIFF

SEQ ID NO: 10377 - protein, 83 aa, Zea mays
  Coding DNA Sequence Number=SeqID_4285
IDVTWTCLHIFMHTHLLSLDRRCDHALFFLLPVTPAAFQVTPQFHCHPYQQELMEHELLEELQAQVLRHIFLAQEAEALLMIW

SEQ ID NO: 10378 - protein, 194 aa, Zea mays
  misc_feature (120)..(120): Xaa can be any naturally occurring amino acid
  Coding DNA Sequence Number=SeqID_4287
  Homolog annotation: Hit_ID=A4QXI3; Match level="QueryCoverage=47%, HitCoverage=32%, E-value=6e-08, Identity=33%"; Hit description =Putative uncharacterized protein
MVYLNQTETKNPNRHHSLSQNQSLNRNQNLHHNQTPNQTPNPHHSQTQNLHHNRTQNQNPNLHHSQTQNLHHNQAQSRNPSQCHSLNQNQNPNLHHNQTQNLDHNQTQNQNPNLHHNQDXSQNLSQRHSLNQNPRRNQIRNLNQNQHHNHPFHSPSLNQIPNPNPNHPSQTLDQILNPNPNHPSQTPSQGPNLH

SEQ ID NO: 10379 - protein, 156 aa, Zea mays
  misc_feature (1)..(3): Xaa can be any naturally occurring amino acid
  Coding DNA Sequence Number=SeqID_4288
  Subcellular localization annotation: CTP_CleavageSite=38; ConfidenceScore=5.10e-01
XXXSLVPPHQLAKSLTLGAGAEMAPKRSAPPPPPPPPAASSEETASGSGSEEEEEEEEEEDLETAHSPPPVAGRALLRCRRRSRNPKRPTRMSMTMKMTSRRRSRNPKRPMRMNMTKRAHPGLFKREPVMIEGLHGFGISKARHLYERINKFKGVH

SEQ ID NO: 10380 - protein, 166 aa, Zea mays
  misc_feature (1)..(1): Xaa can be any naturally occurring amino acid
  misc_feature (3)..(5): Xaa can be any naturally occurring amino acid
  misc_feature (7)..(7): Xaa can be any naturally occurring amino acid
  misc_feature (9)..(9): Xaa can be any naturally occurring amino acid
  misc_feature (12)..(12): Xaa can be any naturally occurring amino acid
  misc_feature (14)..(15): Xaa can be any naturally occurring amino acid
  misc_feature (18)..(18): Xaa can be any naturally occurring amino acid
  misc_feature (20)..(23): Xaa can be any naturally occurring amino acid
  misc_feature (25)..(25): Xaa can be any naturally occurring amino acid
  misc_feature (29)..(29): Xaa can be any naturally occurring amino acid
  misc_feature (31)..(32): Xaa can be any naturally occurring amino acid
  misc_feature (38)..(39): Xaa can be any naturally occurring amino acid
  misc_feature (42)..(42): Xaa can be any naturally occurring amino acid
  misc_feature (44)..(44): Xaa can be any naturally occurring amino acid
  misc_feature (48)..(51): Xaa can be any naturally occurring amino acid
  misc_feature (53)..(53): Xaa can be any naturally occurring amino acid
  misc_feature (68)..(68): Xaa can be any naturally occurring amino acid
  misc_feature (82)..(82): Xaa can be any naturally occurring amino acid
  misc_feature (86)..(88): Xaa can be any naturally occurring amino acid
  misc_feature (92)..(92): Xaa can be any naturally occurring amino acid
  misc_feature (95)..(95): Xaa can be any naturally occurring amino acid
  misc_feature (97)..(97): Xaa can be any naturally occurring amino acid
  misc_feature (99)..(99): Xaa can be any naturally occurring amino acid
  misc_feature (105)..(105): Xaa can be any naturally occurring amino acid
  misc_feature (115)..(115): Xaa can be any naturally occurring amino acid
  misc_feature (117)..(118): Xaa can be any naturally occurring amino acid
  misc_feature (126)..(126): Xaa can be any naturally occurring amino acid
  misc_feature (129)..(130): Xaa can be any naturally occurring amino acid
  misc_feature (133)..(134): Xaa can be any naturally occurring amino acid
  Coding DNA Sequence Number=SeqID_4290
XPXXXIXRXKKXYXXYKXIXXXXRXSPLXTXXVQASLXXIIXNXEDFXXXXVXLIIQKSINKSNQGHXILPMKQNPKAQTKXVQTXXXSKQXLRXRXTXIIRSMXVPIKASSRQXCXXRISSPVIXKTXXPRXXGGGGLVSLSPGAEFLQPGGSTSSRAAATAGSS

SEQ ID NO: 10381 - protein, 92 aa, Zea mays
  Coding DNA Sequence Number=SeqID_4292
  Gene Ontology: Mol. function=molecular_function; Cellular component =ribonucleoprotein complex; Biological process=ribosome biogenesis and assembly
  Homolog annotation: Hit_ID=Q6K950; Match level="QueryCoverage=69%, HitCoverage=24%, E-value=7e-28, Identity=92%"; Hit description =Nucleolar RNA-binding Nop10p-like protein
  Pfam annotation: Domain name=Nop10p; Domain location=5-55; Score =78.1; E_value=2.9e-20; Accession=PF04135.3; Description=Nucleolar RNA-binding protein, Nop10p family
PKMYLQYYINEKGAKVYPPKKESPLGVPTQSAHPARFSPDDKYSRHRYLLKKRFGLLPTQKPAPEVRSLHVNFQPWMCSLCPCLMLVGWNVE

SEQ ID NO: 10382 - protein, 163 aa, Zea mays
  misc_feature (52)..(52): Xaa can be any naturally occurring amino acid
  Coding DNA Sequence Number=SeqID_4293
  Gene Ontology: Mol. function=oxidoreductase activity, acting on single donors with incorporation of molecular oxygen, incorporation of two atoms of oxygen
  Homolog annotation: Hit_ID=A2Y0V7; Match level="QueryCoverage=77%, HitCoverage=62%, E-value=2e-40, Identity=62%"; Hit description =Putative uncharacterized protein
LHVQANDDALAYTETTRFYADVLGFVPIRRPGSFDFDGAWLFNYEGFVPCLXAMGPGRSKKFLYWTCESMVAVERRLKEMGIPYVQRCVEEGGINVDQIFFHDPDAFMIEVCNCDNLPVVPLAAAADQRAPAVLGACKRAAAVGVKQQQQQSSAGGVPLHAAP

SEQ ID NO: 10383 - protein, 145 aa, Zea mays
  misc_feature (116)..(116): Xaa can be any naturally occurring amino acid
  Coding DNA Sequence Number=SeqID_4294
  Gene Ontology: Mol. function=protein serine/threonine kinase activity; Biological process=protein amino acid phosphorylation
  Homolog annotation: Hit_ID=Q2QRH9; Match level="QueryCoverage=100%, HitCoverage=33%, E-value=1e-36, Identity=59%"; Hit description =Protein kinase AFC1, putative, expressed
MECIAEMPRAPLDSRLRKRQRLGWDVGPAEMYKAMYQLGLCGQEVVNAISAAALGLSSGCVSSQVKQEQPHHGSPPLREDDRDGHYVFADGDNLTSRYKISAKMRGVATRKGKEMXAIRIARGIIKYRYAAMIEIGMLKQLDKYD

SEQ ID NO: 10384 - protein, 95 aa, Zea mays
  misc_feature (74)..(74): Xaa can be any naturally occurring amino acid
  Coding DNA Sequence Number=SeqID_4295
  Gene Ontology: Mol. function=hydrolase activity, acting on acid halide bonds, in C-halide compounds; Biological process=metabolic process
  Homolog annotation: Hit_ID=A7NXL4; Match level="QueryCoverage=100%, HitCoverage=39%, E-value=4e-20, Identity=58%"; Hit description =Chromosome chr5 scaffold_2, whole genome shotgun sequence
  Subcellular localization annotation: CTP_CleavageSite=54; ConfidenceScore=5.64e-01
MIFLLSRTFVSLTLKPFSSSSISMANLTTNAKSRLRGVVFDMDRTLTVPVIDFAAMYRSVLGEDEYKRIKAERXSLTEIDILHHIESWSAEKQQK

SEQ ID NO: 10385 - protein, 168 aa, Zea mays
  misc_feature (1)..(111): Xaa can be any naturally occurring amino acid
  Coding DNA Sequence Number=SeqID_4296
XXXXXXXXXXXXXXXXXXXXXXXXXXXXXXXXXXXXXXXXXXXXXXXXXXXXXXXXXXXXXXXXXXXXXXXXXXXXXXXXXXXXXXXXXXXXXXXXXXXXXXXXXXXXXXXGIGLLFRRHEVIVIIPTRQLIRALLENSRSLSGGAIDRRHERHWEGLRLLSTGGCRR

SEQ ID NO: 10386 - protein, 179 aa, Zea mays
  Coding DNA Sequence Number=SeqID_4297
  Subcellular localization annotation: CTP_CleavageSite=76; ConfidenceScore=5.63e-01
LVLHRALCFIPSPAPPPMGASSRDLFPLPMAPSSLNAILLPAPATSSTSTQPPLPCSCRGRATTSTAVALSPSIISASETNPWPPSTLVLGPPRAASTDLRSGAGPQQRTPSIYTGLPSFPARRHRAPLVVNLCSEQQPRPCRRHALRVARRQRAPFDGMHARHESARLFALNDCDLFY

SEQ ID NO: 10387 - protein, 261 aa, Zea mays
  misc_feature (181)..(181): Xaa can be any naturally occurring amino acid
  misc_feature (245)..(245): Xaa can be any naturally occurring amino acid
  Coding DNA Sequence Number=SeqID_4298
  Homolog annotation: Hit_ID=A7P4Y1; Match level="QueryCoverage=86%, HitCoverage=68%, E-value=2e-91, Identity=74%"; Hit description =Chromosome chr4 scaffold_6, whole genome shotgun sequence
  Pfam annotation: Domain name=Cenp-O; Domain location=159-236; Score =67.5; E_value=4.5e-17; Accession=PF04135.3; Description=Cenp-O kinetochore centromere componen
MESDVEESMRKRPRKYPFSADSSSRKQFEQYSGRTFASMGEVNFMQDDDNRLEITRTKFGSLLKRHGDLTERLARDSDKIIFERLQKEFEAARASQTEEICLDGEEWNDGLLATIRERVHMEADRKAMQGDADILACPLEKITYKIGNKVICCLEGARIGVQYETSFAGEPCEFYHCVLEXKSFLEKMTVLEHTVPFFLPIREIENDLHSSNAMKLLDPVGDLLQAFCRLPMVELLRELYGNQIXELYLSLPHPNGRIGLK

SEQ ID NO: 10388 - protein, 60 aa, Zea mays
  Coding DNA Sequence Number=SeqID_4299
  Gene Ontology: Mol. function=acyltransferase activity; Biological process=metabolic process
  Homolog annotation: Hit_ID=A7Q2U7; Match level="QueryCoverage=76%, HitCoverage=75%, E-value=2e-13, Identity=69%"; Hit description =Chromosome chr12 scaffold_47, whole genome shotgun sequence
WPLPYGTSRTYLALLDDPLMWGFKGFPTSDAKLGRWVLTAEDICFKNVVMSYMFRLGECI

SEQ ID NO: 10389 - protein, 50 aa, Zea mays
  Coding DNA Sequence Number=SeqID_4300
PTPAVFFRRPCVRLRAPLVFWNNNFWADYVFCMFWSSDISIPRPWLCLTV

SEQ ID NO: 10390 - protein, 457 aa, Zea mays
  Coding DNA Sequence Number=SeqID_4302
  Gene Ontology: Mol. function=inositol or phosphatidylinositol phosphatase activity; Cellular component=intracellular; Biological process=abscisic acid mediated signaling
  Homolog annotation: Hit_ID=A8MR21; Match level="QueryCoverage=99%, HitCoverage=97%, E-value=0.0, Identity=90%"; Hit description =Uncharacterized protein At5g04980.2
  Pfam annotation: Domain name=Exo_endo_phos; Domain location=31-441; Score=143.0; E_value=8.2e-40; Accession=PF03372.13; Description =EndonucleaseExonucleasephosphatase family
GSQSEIVVESLLASSNLRSSMPTQQIQSLRVFVATWNVGGKSPHSGLNLDALLHVHSEFDVYVLGFQEIVPLNAGNVLVLGDNEPAAKWLAMINQSLNKSSSSSGGRLSPKTPSFGAGSMFFAKPSLKKISESFRTECRRKLKICNCSTFSEDIVRKYGRESCFRCPEGLVNQSGVLSDDEEDEDDDDDDEDEDEGGGKVASLVSNQMTMKYGLVASKQMVGIFLTVWMRKELIQHVSHLRISSVTRGIMGCLGNKGCIAVSLQLYKTSFCFICSHLASGEREGDERRRNLDVIEILKNTSFPRICRTSFTRVPDRITKHDRVIWLGDLNYRIALSYSETKTLLDKNAWDTLLNKDQLKIERDAGRVFKGWHEGKIFFAPTYKYSYNSDAYAGDTSKEKKNKRRTPAWCDRILWHGDGIRQLSYVHGESRFSDHRPVCSVFVVDVEVCEGKTGTRRQ

SEQ ID NO: 10391 - protein, 277 aa, Zea mays
  Coding DNA Sequence Number=SeqID_4303
  Gene Ontology: Mol. function=protein serine/threonine kinase activity; Cellular component=barrier septum; Biological process =protein amino acid phosphorylation
  Homolog annotation: Hit_ID=A2ZQA7; Match level="QueryCoverage=63%, HitCoverage=26%, E-value=4e-76, Identity=78%"; Hit description =Putative uncharacterized protein
GGSKCPPPAASTATAVAAVADAGDSELCAEHARGRDGRRRQRRSERRQGRCPPGRRRELHAGSALAQTVQIGNSPTYKLERKLGKGGFGQVYVGRRISAPRLRDRNPGSNALEVALKFEHQTSKGCNFGAPYEWQVYNTLSGNHGVPRVHYKGKQGEFYIMVMDILGPSLWDGWNNNSHSMSGEMGACIGIKAISLLEKMPSKGNVLGEAKPENFLFGPSGTQKKRRFFLVTLGWATKGKGCWYAASWLKRTRGPGFFRGTGPLGRGGGSPREKTAE

SEQ ID NO: 10392 - protein, 103 aa, Zea mays
  misc_feature (8)..(8): Xaa can be any naturally occurring amino acid
  Coding DNA Sequence Number=SeqID_4304
YTGVFFIXIRGSLLNWATWTFPSIQFNTTSYRLYTWIWCLVQLEFIWLYLNQTNVYFKELPTIVCSRTLPSDKMLKAPSPWQLDKIRPVLRLVSTKLLSNHRI

SEQ ID NO: 10393 - protein, 65 aa, Zea mays
  Coding DNA Sequence Number=SeqID_4306
KKYQYIIISDNNMKLNTKTESLVAYQNFTHEPDWTPKVTNRLGSKVANGLKRMKHFVLQFRTSKR

SEQ ID NO: 10394 - protein, 133 aa, Zea mays
  Coding DNA Sequence Number=SeqID_4308
  Gene Ontology: Cellular component=integral to membrane; Biological process=negative regulation of apoptosis
  Homolog annotation: Hit_ID=Q9LD45; Match level="QueryCoverage=100%, HitCoverage=53%, E-value=9e-65, Identity=87%"; Hit description=Bax inhibitor 1
  Subcellular localization annotation: CTP_CleavageSite=44; ConfidenceScore=5.23e-01
MDSFSSFFDAQPGSRNWSYNSLKNLRQISPSVQNHLKRVYLTLCCALVASAFGAYLHVLWNIGGILTTIGCFGSMIWLLSSPPYEQQKRLSLLFLSAVLEGASVGPLIKLAVDFDPSILVTAFVGTAIAFICF

SEQ ID NO: 10395 - protein, 161 aa, Zea mays
  Coding DNA Sequence Number=SeqID_4309
  Subcellular localization annotation: CTP_CleavageSite=96; ConfidenceScore=5.06e-01
ALPRVFFFFFFFFFFFFFFFFFFFFFFFLEGKGSKIFGPWDQIETLGPFFLGGIQKKFFWWLVTGNLNFYPRKMGKTLFEKLFLGAQTNLLEQTTPGAKAKKNGLEGGAQVNFNGPIKTVKPPCPMGGHGGNQTPPRPSQKGTSPGAHLWGAGVAPACFSG

SEQ ID NO: 10396 - protein, 194 aa, Zea mays
  misc_feature (147)..(147): Xaa can be any naturally occurring amino acid
  misc_feature (165)..(165): Xaa can be any naturally occurring amino acid
  misc_feature (171)..(171): Xaa can be any naturally occurring amino acid
  Coding DNA Sequence Number=SeqID_4311
  Gene Ontology: Mol. function=DNA binding; Cellular component =membrane; Biological process=regulation of transcription, DNA -dependent
  Homolog annotation: Hit_ID=Q7S7M7; Match level="QueryCoverage=96%, HitCoverage=22%, E-value=3e-70, Identity=70%"; Hit description =Putative uncharacterized protein
GTGPPLELAFMAPGDENMEQSDLLALPPIEQYLPPSTDADAAKSLSALYRSHCTSLVECIRYCKEKTFFHLYTSFQGTLTMPVHKLFSHPALAPWIEGCDLVLYQNMMRIISKLTLQVLPKPVLDTLRAISERLIPHIKESFQGQPXHVLRAKETPATLFAGLLXDRALRXNLTAHAQRTCWRTHQPEMYVEWQ

SEQ ID NO: 10397 - protein, 239 aa, Zea mays
  misc_feature (186)..(186): Xaa can be any naturally occurring amino acid
  Coding DNA Sequence Number=SeqID_4312
  Gene Ontology: Mol. function=ATP-dependent helicase activity; Cellular component=nucleus; Biological process=regulation of transcription, DNA-dependent
  Homolog annotation: Hit_ID=Q4IAK7; Match level="QueryCoverage=83%, HitCoverage=12%, E-value=2e-73, Identity=66%"; Hit description =Helicase SWR1
MCLGPGPPRADTKNTLAGGNYLSIINCLMQLRKVCNHPDLFVDRPIMTSFRMAKSVAADYDFTERRIQSLLATPPMSQVDLGFLNLIPTTHEHLSIGTADRVAQLSSHRPLNELRETQRHRAQSTNTHLDPSTVQSNLEYLESASRWGRFEELQHCVYLNALRRQQRPIYGKGLVQMLTVGVDKRXYKPKPKVPNMSWMVETQHLIRADVLFQHSYATMKSFCYPVWTSGKIFGFKGGG

SEQ ID NO: 10398 - protein, 318 aa, Zea mays
  misc_feature (22)..(22): Xaa can be any naturally occurring amino acid
  misc_feature (31)..(31): Xaa can be any naturally occurring amino acid
  misc_feature (38)..(38): Xaa can be any naturally occurring amino acid
  misc_feature (47)..(47): Xaa can be any naturally occurring amino acid
  misc_feature (72)..(72): Xaa can be any naturally occurring amino acid
  misc_feature (89)..(89): Xaa can be any naturally occurring amino acid
  misc_feature (100)..(100): Xaa can be any naturally occurring amino acid
  misc_feature (127)..(127): Xaa can be any naturally occurring amino acid
  misc_feature (135)..(135): Xaa can be any naturally occurring amino acid
  misc_feature (157)..(157): Xaa can be any naturally occurring amino acid
  misc_feature (190)..(190): Xaa can be any naturally occurring amino acid
  misc_feature (229)..(229): Xaa can be any naturally occurring amino acid
  misc_feature (236)..(236): Xaa can be any naturally occurring amino acid
  misc_feature (241)..(241): Xaa can be any naturally occurring amino acid
  misc_feature (251)..(251): Xaa can be any naturally occurring amino acid
  misc_feature (265)..(265): Xaa can be any naturally occurring amino acid
  misc_feature (284)..(284): Xaa can be any naturally occurring amino acid
  misc_feature (290)..(290): Xaa can be any naturally occurring amino acid
  misc_feature (299)..(299): Xaa can be any naturally occurring amino acid
  Coding DNA Sequence Number=SeqID_4313
  Gene Ontology: Mol. function=structural constituent of ribosome; Cellular component=ribonucleoprotein complex; Biological process =translation
  Homolog annotation: Hit_ID=A2WXX3; Match level="QueryCoverage=100%, HitCoverage=98%, E-value=4e-83, Identity=59%"; Hit description=60S ribosomal protein L5-1
  Pfam annotation: Domain name=Ribosomal_L18p; Domain location=27-184; Score=-18.7; E_value=0.00035; Accession=PF00861.12; Description =Ribosomal L18pL5e family
MGGFVKTHKINVLLPLYPAEVXRRRAGKTDXRARIRLXNQDKNKYNXTPNTEFVVRFTNQGHTSTKSFLASXIQGDMGLWLLLYSHEYXRYGSRKLGLTXYAACLPALGLLLDRTRASRTRGLDKEXEGNVEATXGEDFSAEPTDERRPFRALFGCXGLCRTTTGNPCLLVPLKGSFWMGGLDIPHRREXRFAGFKKDDKQLDADIHRKYIYGGHVADYMRNLAEEGAXLFQSHFXSEYIXREFEADDMEXALYKKVHAAIRAGXPSVVRSTKQPPREHQRYHXRTLTYXEQRKASLIXRLNQINSSGGADYAHEDDE

SEQ ID NO: 10399 - protein, 199 aa, Zea mays
  misc_feature (24)..(24): Xaa can be any naturally occurring amino acid
  misc_feature (144)..(144): Xaa can be any naturally occurring amino acid
  Coding DNA Sequence Number=SeqID_4314
  Gene Ontology: Mol. function=protein heterodimerization activity; Cellular component=condensed nuclear chromosome; Biological process =mitotic spindle organization and biogenesis
  Homolog annotation: Hit_ID=A0JLM6; Match level="QueryCoverage=100%, HitCoverage=29%, E-value=1e-100, Identity=94%"; Hit description =Smc1a protein
  Pfam annotation: Domain name=SMC_N; Domain location=1-176; Score =75.3; E_value=1.9e-19; Accession=PF02463.9; Description=RecFRecNSMC N terminal domain
NFKSYKGRQIIGPFQRFTAIIGPXGSGKSNLMDAISFVLGEKTSNLRVKTLRDLIHGAPVGKPAANRAFVSMVYSEEGAEDRTFARVIVGGSSEYKINNIVVPLHDYSEELEKLGMLIRARNFLVFQGAVESIAMKNPKERTAXLFEEISRSGELAQEYDKRKNDMVKAEEDTQFNYHRKKNIAAERKEAKQDKEEADR

SEQ ID NO: 10400 - protein, 65 aa, Zea mays
  Coding DNA Sequence Number=SeqID_4315
  Subcellular localization annotation: CTP_CleavageSite=59; ConfidenceScore=5.28e-01
RLFLSRVPQIHFLLQISNQAHTSLILTHRYQSMKYRLNSTSFLASFQISNFLWNNSSFQCRYRSV

SEQ ID NO: 10401 - protein, 150 aa, Zea mays
  Coding DNA Sequence Number=SeqID_4317
  Subcellular localization annotation: CTP_CleavageSite=65; ConfidenceScore=5.08e-01
CEIQCAPLSLGLALFFPLNRCLILRGFFVFFLFLLLSSHLVESATSTQHTAAALARSRLQAGSRRLAAGSSRSRSAPVPVSRGYLAGVWRRPQTLDRQGDRRFSREGYAGVASSGGVRSADLKAWRCVQSFAPHPWRSGDPWSATSGGAS

SEQ ID NO: 10402 - protein, 54 aa, Zea mays
  Coding DNA Sequence Number=SeqID_4319
CRAPSIPQHHPGGYNSSTNHGEQQNSTENVVGPRKKLGSKNSALIQHTIYTYHY

SEQ ID NO: 10403 - protein, 247 aa, Zea mays
  Coding DNA Sequence Number=SeqID_4321
  Gene Ontology: Mol. function=oxidoreductase activity; Biological process=electron transport
  Homolog annotation: Hit_ID=Q9FW33; Match level="QueryCoverage=52%, HitCoverage=25%, E-value=2e-26, Identity=52%"; Hit description =Putative uncharacterized protein P0036D10.9
  Subcellular localization annotation: CTP_CleavageSite=32; ConfidenceScore=5.12e-01
MMHGQELSYDSYPSSFLSMDDMHRQLQAPPACQSRRSSSSSIFFFFFLAAAIIYCVVIIRRLIKFQGRRRVKNDHAAAAAAPPPPPPGRGSRWWWSVVETLAFLSANSSGRGFYHFVEARHRRYGPGPCFRTSLLGATHVFVSSADAARSLLGAEPAGFSKRYVRTVAELLGEHSLLCASHATHRALRRAVAPLFNAQATASLAATFDGLTRRLMKRDWSSSTGVRGGARRRAGPNIRGLHADMLIR

SEQ ID NO: 10404 - protein, 233 aa, Zea mays
  misc_feature (11)..(11): Xaa can be any naturally occurring amino acid
  misc_feature (182)..(182): Xaa can be any naturally occurring amino acid
  misc_feature (184)..(184): Xaa can be any naturally occurring amino acid
  misc_feature (190)..(190): Xaa can be any naturally occurring amino acid
  misc_feature (197)..(198): Xaa can be any naturally occurring amino acid
  misc_feature (200)..(200): Xaa can be any naturally occurring amino acid
  misc_feature (203)..(203): Xaa can be any naturally occurring amino acid
  misc_feature (205)..(205): Xaa can be any naturally occurring amino acid
  misc_feature (208)..(208): Xaa can be any naturally occurring amino acid
  misc_feature (211)..(211): Xaa can be any naturally occurring amino acid
  misc_feature (217)..(217): Xaa can be any naturally occurring amino acid
  misc_feature (220)..(220): Xaa can be any naturally occurring amino acid
  misc_feature (225)..(225): Xaa can be any naturally occurring amino acid
  misc_feature (228)..(228): Xaa can be any naturally occurring amino acid
  misc_feature (230)..(231): Xaa can be any naturally occurring amino acid
  Coding DNA Sequence Number=SeqID_4322
  Homolog annotation: Hit_ID=A9FAM1; Match level="QueryCoverage=81%, HitCoverage=41%, E-value=3e-40, Identity=46%"; Hit description =Putative uncharacterized protein
IGYRAPPARAXADNGNSKEFFILIHQAGGWDVSLWSDPRNSRKGGYIGDPATTADVDSTKVTGWKDQPLDGGSDVTFQLLQRGNYVLGPAMGSLADMYDRFTLINGLAMNTVSHPDGTYFSSTGRHLAGGRPVAASIDTMLANEMVTQQNILPSVSVNFPSTFIGNGLTRACRRCGHRRDGXAXLARTKXYDSDQDXXRXGCXTXGKXSPXPYIRGXRLXSVTNXFCXHXXLL

SEQ ID NO: 10405 - protein, 154 aa, Zea mays
  misc_feature (27)..(27): Xaa can be any naturally occurring amino acid
  misc_feature (49)..(49): Xaa can be any naturally occurring amino acid
  Coding DNA Sequence Number=SeqID_4323
  Gene Ontology: Mol. function=structural constituent of ribosome; Cellular component=ribonucleoprotein complex; Biological process =translation
  Homolog annotation: Hit_ID=Q2GUC6; Match level="QueryCoverage=70%, HitCoverage=56%, E-value=2e-22, Identity=53%"; Hit description=60S ribosomal protein L19
  Pfam annotation: Domain name=Ribosomal_L19e; Domain location=1-115; Score=60.8; E_value=4.7e-15; Accession=PF01280.10; Description =Ribosomal protein L19e
ANFSYIIGEIIYNGIMIQKHVTQNSRXRDHELNIARQEDRHRGYGKSKXTDNARMPSQVLWMRRLRVLRRLLVKYRASGGRVGPPDPARYHSSNGNAFKHKRALVEHIHRAKAQKARETALQEEMDAKRAKNKAARERKQERAAAKRNALLAEE

SEQ ID NO: 10406 - protein, 79 aa, Zea mays
  Coding DNA Sequence Number=SeqID_4324
  Gene Ontology: Mol. function=transferase activity, transferring nitrogenous groups; Cellular component=cytoplasm; Biological process= amino acid metabolic process
  Homolog annotation: Hit_ID=Q42391; Match level="QueryCoverage=96%, HitCoverage=18%, E-value=7e-17, Identity=60%"; Hit description =Aspartate aminotransferase
  Subcellular localization annotation: CTP_CleavageSite=67; ConfidenceScore=5.04e-01
GPPLFYALNPRGTPGGWSPIFKPIGMFPFPGLKSDQVAFLGPESPLFLPFDGGISMAGLSMRTVPLFANAIPAAVSQLK

SEQ ID NO: 10407 - protein, 123 aa, Zea mays
  misc_feature (1)..(29): Xaa can be any naturally occurring amino acid
  Coding DNA Sequence Number=SeqID_4325
  Subcellular localization annotation: CTP_CleavageSite=54; ConfidenceScore=5.46e-01
XXXXXXXXXXXXXXXXXXXXXXXXXXXXXSPSPFPSRQLSPWRSSSAPMIELVLALALSSSVTPTPSSPMLTPLYIFLPVVAAPARPGTLAENRAKRRVWIKTTHKTMSTDDHEARWTKRVSE

SEQ ID NO: 10408 - protein, 69 aa, Zea mays
  Coding DNA Sequence Number=SeqID_4327
  Gene Ontology: Mol. function=structural constituent of ribosome; Cellular component=ribonucleoprotein complex; Biological process =translation
  Homolog annotation: Hit_ID=A9PH37; Match level="QueryCoverage=100%, HitCoverage=100%, E-value=2e-31, Identity=97%"; Hit description =Putative uncharacterized protein
  Pfam annotation: Domain name=Ribosomal_L38e; Domain location=2-69; Score=165.7; E_value=1.2e-46; Accession=PF01781.8; Description =Ribosomal L38e protein family
MPKQIHEIKDFLLTARRKDARSVKIKRSRDVVKFKVRCSKYLYTLCVFDPEKADKLKQSLPPGLSVQDL

SEQ ID NO: 10409 - protein, 136 aa, Zea mays
  misc_feature (38)..(38): Xaa can be any naturally occurring amino acid
  misc_feature (55)..(55): Xaa can be any naturally occurring amino acid
  Coding DNA Sequence Number=SeqID_4328
  Gene Ontology: Mol. function=structural constituent of ribosome; Cellular component=ribonucleoprotein complex; Biological process =translation
  Homolog annotation: Hit_ID=A2WWH1; Match level="QueryCoverage=56%, HitCoverage=64%, E-value=4e-23, Identity=67%"; Hit description =Putative uncharacterized protein
  Pfam annotation: Domain name=Ribosomal_S26e; Domain location=1-118; Score=134.2; E_value=3.7e-37; Accession=PF01283.9; Description =Ribosomal protein S26e
PSSAATVCRNKHGRGHSQYIRRSNCIKCCPKDKAIQRXFSVQEHRVNTRGIRDGXERCLYDAYHLPKLYAKAHHCVSCAIHTHIIRVRSREKRRNRKTTERFRRREDRPAGVQGGPRPGPGAAAPAPAPAPVAARP

SEQ ID NO: 10410 - protein, 156 aa, Zea mays
  misc_feature (56)..(56): Xaa can be any naturally occurring amino acid
  misc_feature (82)..(82): Xaa can be any naturally occurring amino acid
  Coding DNA Sequence Number=SeqID_4329
  Gene Ontology: Mol. function=RNA-directed DNA polymerase activity; Cellular component=chromatin; Biological process=RNA-dependent DNA replication
  Homolog annotation: Hit_ID=Q2QSH9; Match level="QueryCoverage=81%, HitCoverage=8%, E-value=2e-33, Identity=51%"; Hit description =Retrotransposon protein, putative, unclassified, expressed
  Pfam annotation: Domain name=rve; Domain location=1-115; Score=-6.1; E_value=0.029; Accession=PF00665.16; Description=Integrase core domain
WIPRAAGPPPPPPIVAHEFFAEVVKLHGIPRSIVSDRDRLFTSTLWQELFSLLGTXYHSQSDGQTERVNQCLEVFLRCAVHXHPKLCVKWLPSSELWYNSSYHTSLKCSPFKALYGVEPYMGMLPLLDPYHNSEALDSARGTRDFIYMRSPKFSFA

SEQ ID NO: 10411 - protein, 71 aa, Zea mays
  Coding DNA Sequence Number=SeqID_4330
YITPPSENRQEREGIPIFHSTTRFPNTYGGTRQQITHNYRKGQQRKLLLRLGTLRLCWHAADLLEHNLNLG

SEQ ID NO: 10412 - protein, 140 aa, Zea mays
  Coding DNA Sequence Number=SeqID_4332
SVLASLSSAERNKDRSISIATCELACLPSAKASNTRQRSSVDGPRDGHGREARAVAVTCPEEPFRRHLLLRRVRVRPAPAVVRPQHGGDRGCRRRGVRARGPARGRGVRRHRRRAVRARRRVPLRRPARASPLRARTRLL

SEQ ID NO: 10413 - protein, 113 aa, Zea mays
  misc_feature (11)..(11): Xaa can be any naturally occurring amino acid
  misc_feature (16)..(16): Xaa can be any naturally occurring amino acid
  misc_feature (97)..(97): Xaa can be any naturally occurring amino acid
  Coding DNA Sequence Number=SeqID_4333
  Gene Ontology: Mol. function=SNAP receptor activity; Cellular component=membrane; Biological process=intracellular protein transport
  Homolog annotation: Hit_ID=O65359; Match level="QueryCoverage=100%, HitCoverage=35%, E-value=1e-33, Identity=65%"; Hit description =Syntaxin-41
MATRNRTPLYXQYRDXLRHVRAPAGATSSSCGGGGGGGPVIEMASLLRSDRPYAPLSIEDPSASSRGAVSVGLPPTWVDVSEEISANMQRARTKMTXLAKAHAKALMPSFGDG

SEQ ID NO: 10414 - protein, 105 aa, Zea mays
  misc_feature (14)..(14): Xaa can be any naturally occurring amino acid
  misc_feature (81)..(81): Xaa can be any naturally occurring amino acid
  misc_feature (87)..(87): Xaa can be any naturally occurring amino acid
  Coding DNA Sequence Number=SeqID_4334
  Gene Ontology: Mol. function=structural constituent of ribosome; Cellular component=ribonucleoprotein complex; Biological process =translation
  Homolog annotation: Hit_ID=P49209; Match level="QueryCoverage=96%, HitCoverage=52%, E-value=2e-46, Identity=90%"; Hit description=60S ribosomal protein L9-1
  Pfam annotation: Domain name=Ribosomal_L6; Domain location=11-89; Score=21.3; E_value=0.00083; Accession=PF00347.13; Description =Ribosomal protein L6
RRSFSSETMDIPEXVSIKVHAKVIEVEGPRGKLVRDFKHLNLDFQLIKDAETGKRKLKIDSWFGSRKSSASIRTALSHVDXLITGVXRGFRYKMRFVYAHFPINA

SEQ ID NO: 10415 - protein, 132 aa, Zea mays
  misc_feature (105)..(105): Xaa can be any naturally occurring amino acid
  Coding DNA Sequence Number=SeqID_4335
  Gene Ontology: Mol. function=hydrogen ion transporting ATP synthase activity, rotational mechanism; Cellular component=proton -transporting two-sector ATPase complex; Biological process=ATP synthesis coupled proton transport
  Homolog annotation: Hit_ID=A2YFL3; Match level="QueryCoverage=79%, HitCoverage=46%, E-value=9e-33, Identity=70%"; Hit description =Putative uncharacterized protein
  Pfam annotation: Domain name=OSCP; Domain location=2-126; Score=-3.6; E_value=1.1e-05; Accession=PF00213.9; Description=ATP synthase delta (OSCP) subunit
MISKCLQFVPCLSCILTVPNFVLVYEAVLADNGRLKYIERIAERFVDLTMEHKGEMKVVVRTVISLTKEEEKELKGTLQDILGENKTILVEQKIDYSIMGGLVIXFGQKVLYISIRNRGKQKEGFFRQPLDF

SEQ ID NO: 10416 - protein, 73 aa, Zea mays
  Coding DNA Sequence Number=SeqID_4336
  Gene Ontology: Mol. function=nucleoside-triphosphatase activity; Cellular component=cytoplasm; Biological process=protein metabolic process
  Homolog annotation: Hit_ID=A3AJA8; Match level="QueryCoverage=95%, HitCoverage=9%, E-value=1e-22, Identity=78%"; Hit description =Putative uncharacterized protein
DNQKMFNTKLIALDMGALIAGAKYRGEFEDRPKAVLKEVTDSDGQTILFIDEIHKVVGAGNYEGCSDGGSLVN

SEQ ID NO: 10417 - protein, 107 aa, Zea mays
  misc_feature (1)..(1): Xaa can be any naturally occurring amino acid
  misc_feature (5)..(6): Xaa can be any naturally occurring amino acid
  misc_feature (10)..(10): Xaa can be any naturally occurring amino acid
  misc_feature (16)..(19): Xaa can be any naturally occurring amino acid
  misc_feature (21)..(21): Xaa can be any naturally occurring amino acid
  misc_feature (29)..(29): Xaa can be any naturally occurring amino acid
  misc_feature (43)..(43): Xaa can be any naturally occurring amino acid
  misc_feature (95)..(95): Xaa can be any naturally occurring amino acid
  Coding DNA Sequence Number=SeqID_4337
XQNHXXVGLXRREHHXXXXEXDLGFLNLXRSIALKQNPMRYSXGKLISTGQKTSAVQKVISARDDRVGVRGSGAKCGMGGNTEKREIVGKTGNFXDLPSGAAHGYSS

SEQ ID NO: 10418 - protein, 148 aa, Zea mays
  Coding DNA Sequence Number=SeqID_4339
  Gene Ontology: Mol. function=DNA binding; Cellular component =chromosome; Biological process=nucleosome assembly
  Homolog annotation: Hit_ID=Q9FJE8; Match level="QueryCoverage=87%, HitCoverage=87%, E-value=4e-51, Identity=81%"; Hit description =Probable histone H2A.7
  Pfam annotation: Domain name=CBFD_NFYB_HMF; Domain location=32-96; Score=13.2; E_value=0.0097; Accession=PF00808.13; Description =Histone-like transcription factor (CBFNF-Y) and archaeal histone
  Pfam annotation: Domain name=Histone; Domain location=26-99; Score =103.3; E_value=7.5e-28; Accession=PF00125.14; Description=Core histone H2AH2BH3H4
  Pfam module annotation: Pfam domain module=CBFD_NFYB_HMF::Histone; Domain location=32-96::26-99
  Subcellular localization annotation: CTP_CleavageSite=59; ConfidenceScore=5.22e-01
METTGKVKKAFGGRKAGGPKTKSVSKSIKAGLQFPVGRITRFLRKGRYAQRLGGGAPVYMAAVLEYLAAEVLELAGNAARDNKKSRIIPRHLLLAIRNDEELGKLLSGVTIAHGGVLPNINSVLLPKKSAKSTEDVVSKSPAKSPKKA

SEQ ID NO: 10419 - protein, 132 aa, Zea mays
  misc_feature (44)..(44): Xaa can be any naturally occurring amino acid
  misc_feature (69)..(69): Xaa can be any naturally occurring amino acid
  misc_feature (79)..(79): Xaa can be any naturally occurring amino acid
  Coding DNA Sequence Number=SeqID_4340
  Gene Ontology: Mol. function=nucleoside-triphosphatase activity; Biological process=protein transport
  Homolog annotation: Hit_ID=Q6Z7F0; Match level="QueryCoverage=90%, HitCoverage=18%, E-value=2e-25, Identity=51%"; Hit description =Putative ATP-dependent Clp protease ATP-binding subunit ClpX1
MREVTHDRTFKGPRSAPGEQMNKWSCLDHLKPPSPDDALRSISXKATADNTAARGLRASLDTMLIGTAXEITSANTGEXRIDAVVVGGGAVGSVDQPGCGAKSLYGDGALHRYLSQIKVSGDGVGSEMDGEA

SEQ ID NO: 10420 - protein, 128 aa, Zea mays
  Coding DNA Sequence Number=SeqID_4341
  Gene Ontology: Mol. function=RNA binding; Cellular component =ribonucleoprotein complex; Biological process=ribosome biogenesis and assembly
  Homolog annotation: Hit_ID=Q8LBE4; Match level="QueryCoverage=100%, HitCoverage=100%, E-value=8e-53, Identity=85%"; Hit description =Ribosomal protein L7Ae-like
  Pfam annotation: Domain name=Ribosomal_L7Ae; Domain location=20-114; Score=112.7; E_value=1.1e-30; Accession=PF01248.16; Description =Ribosomal protein L7AeL30eS12eGadd45 family
MTVEAVNPKAYPLADSQLAITILDLVQQATNYKQLKKGANEATKTLNRGISEFVVMAADAEPLEILLHLPLLAEDKNVPYVFVPSKQALGRACGVTRPVIACSVTSNEASQLKSQIQQLKDAIEKLLI

SEQ ID NO: 10421 - protein, 120 aa, Zea mays
  Coding DNA Sequence Number=SeqID_4342
  Gene Ontology: Mol. function=structural constituent of ribosome; Cellular component=ribonucleoprotein complex; Biological process =translation
  Homolog annotation: Hit_ID=Q42351; Match level="QueryCoverage=79%, HitCoverage=79%, E-value=7e-46, Identity=94%"; Hit description=60S ribosomal protein L34-1
  Pfam annotation: Domain name=Ribosomal_L34e; Domain location=5-103; Score=224.3; E_value=2.8e-64; Accession=PF01199.8; Description =Ribosomal protein L34e
  Subcellular localization annotation: CTP_CleavageSite=93; ConfidenceScore=5.07e-01
MVQRLVYRSRHSYATKSNQHRIVKTPGGKLTYQTTKKRASGPKCPVTGKRIQGIPHLRPAEYKRSRLSRNRRTVNRAYGGVLSALAVRERIVRAFLVEEQKIVKKVLKLQKAKEKVAPKS

SEQ ID NO: 10422 - protein, 247 aa, Zea mays
  Coding DNA Sequence Number=SeqID_4343
  Gene Ontology: Mol. function=zinc ion binding; Cellular component =intracellular
  Homolog annotation: Hit_ID=Q6Z8A4; Match level="QueryCoverage=100%, HitCoverage=100%, E-value=5e-80, Identity=60%"; Hit description =Putative zinc-binding protein
  Pfam annotation: Domain name=PLATZ; Domain location=50-161; Score =264.1; E_value=2.9e-76; Accession=PF04640.4; Description=PLATZ transcription factor
MAFHDEAPLLLRINTARGGHMGGGECDEAENQRWPPWLKPLLATSFFGQCKMHADAHKCECNMYCLDCVNGALCSQCLAYHHGHHAIQIRRSSYHDVIRVSEIQKVLDITGVQTYIINSARVVFLNERPQPRPGKGVTNTCDVCERSLLDTFRFCSLGCKIVGTSGEFRGRKRHAGGKKMKLKLKKAAASDSDDSSTITSGGSDKSSVVQSFTPSTPPATTANSFRAGQRRKAVPHRSPFGSLVVEF

SEQ ID NO: 10423 - protein, 292 aa, Zea mays
  Coding DNA Sequence Number=SeqID_4344
  Pfam annotation: Domain name=Extensin_2; Domain location=30-292; Score=-142.6; E_value=0.1; Accession=PF04554.4; Description=Extensin- like region
FESECNRTLTFCIPAKRGSRTGVLAGRARKTLPVWTPESFANAGSSLTAGVCLTANRQPFPGCRHSWLQCQVSWGGGGGASPPAVPQFLKPPPPPRPPPLAPLSGAPTPDPPQQHSPLPPPAAPLPSPSQHQHPPPPTTAPPPPPRPPTQLLFFPCLPRSSLGPVPLSPTPRLPHSSTPLFRAGIGKCLSLPPPLLPLLPTAAPCPPPGPAVPPAPTSANGAIPRSPRTHAPKKTTPPKGPEYAPTAARRPAGRARFPSSPPPPRTALHPPPALISARAHRRSTTRNVYGRV

SEQ ID NO: 10424 - protein, 79 aa, Zea mays
  Coding DNA Sequence Number=SeqID_4346
  Subcellular localization annotation: CTP_CleavageSite=69; ConfidenceScore=5.26e-01
AGAPRGGGRSRTSGSPGLQGERELTSPPPPPPGSGLGLGQFQLLFSALSMTLTMALISAPNLYFRLEVRVMLGSKLGLG

SEQ ID NO: 10425 - protein, 84 aa, Zea mays
  Coding DNA Sequence Number=SeqID_4348
HVGWMAAIVALGRRCPALGAAGRQLRHLWGCITRGLRFTPAGCFIGPSCCCCLCSCLATAATSFHGRNCWGPASSFWLEGTWRF

SEQ ID NO: 10426 - protein, 92 aa, Zea mays
  Coding DNA Sequence Number=SeqID_4350
NSRKGERAIVVDELCVHLRRILRDHFRCSPKHPTHMHGLPAWRCQLEHDEFVAEGRTTPRGHATSSSRVCGINHGQEQVPPKENDEDEFKEV

SEQ ID NO: 10427 - protein, 66 aa, Zea mays
  Coding DNA Sequence Number=SeqID_4352
YAEYMLTLISNLFLWVFSCGEDPPHWFTEPSHVVPSFTDCVLLLVLLYSYQSICGFTLRFFLSKFW

SEQ ID NO: 10428 - protein, 130 aa, Zea mays
  Coding DNA Sequence Number=SeqID_4354
  Gene Ontology: Mol. function=structural constituent of ribosome; Cellular component=ribonucleoprotein complex; Biological process =translation
  Homolog annotation: Hit_ID=Q9LX88; Match level="QueryCoverage=100%, HitCoverage=100%, E-value=1e-67, Identity=97%"; Hit description=40S ribosomal protein S15a-4
  Pfam annotation: Domain name=Ribosomal_S8; Domain location=5-130; Score=215.5; E_value=1.2e-61; Accession=PF00410.9; Description =Ribosomal protein S8
MVRISVLNDALKSMFNAEKRGKRQVMIRPSSKVIIKFLIVMQKHGYIGEFEYVDDHRSGKIVVELNGRLNKCGVISPRFDVGVKEIEGWTARLLPSRQFGYIVLTTSAGIMDHEEARRKNVGGKVLGFFY

SEQ ID NO: 10429 - protein, 230 aa, Zea mays
  misc_feature (111)..(111): Xaa can be any naturally occurring amino acid
  misc_feature (124)..(124): Xaa can be any naturally occurring amino acid
  misc_feature (156)..(156): Xaa can be any naturally occurring amino acid
  misc_feature (194)..(194): Xaa can be any naturally occurring amino acid
  Coding DNA Sequence Number=SeqID_4355
  Homolog annotation: Hit_ID=Q7F0M7; Match level="QueryCoverage=75%, HitCoverage=42%, E-value=1e-41, Identity=53%"; Hit description =Putative adenyl cyclase
MQAAAARARRLLALPAASGIPGILSGPIPGRASYAEGVLLYHLNGAPASPSSPQHTRGFSSSCFASRSHCNLPSPTISFQWVNEKSDTIYDEAHFYHRQVTIVTTLQNGEXEIHQKVIKSDEAXTIPTNAWLWTMIDSCSKRDDIKLLFQIELAIXNLRVFSLSNLRIRANFNEHLCRKVPEACARVGAVDYGXKALWTHNVNGKTPTDGVCSLTTATCYRAEPLVGVIP

SEQ ID NO: 10430 - protein, 129 aa, Zea mays
  Coding DNA Sequence Number=SeqID_4356
NNIIQIFRTITIQIHNCYFGVCTRTKFLLIFDFLYFLRDYQQLSPCDQEEWWQQERRLKKAETYPRLKMSNTCYPHHLHRWRRGGMHSGRPGQHEHHLHQCRGTGGYLSLYKQLLRLKNHQTYRLCNLL

SEQ ID NO: 10431 - protein, 262 aa, Zea mays
  misc_feature (250)..(250): Xaa can be any naturally occurring amino acid
  misc_feature (252)..(252): Xaa can be any naturally occurring amino acid
  Coding DNA Sequence Number=SeqID_4357
  Gene Ontology: Mol. function=aspartic-type endopeptidase activity; Biological process=xylan catabolic process
  Homolog annotation: Hit_ID=Q5TMB2; Match level="QueryCoverage=92%, HitCoverage=59%, E-value=1e-126, Identity=91%"; Hit description =Xylanase inhibitor TAXI-IV
MARVLLLVVLAASLAALASSKGLPVLAPVTKDTATSLYTIPFHDGANLVLDIAGPLVWSTCDGGQPPAEISCSSPTCLLANAYPAPGCPAPSCGSDRHHKPCTAYPYNPVTGACAAGSLFHTRFEANTTDGNKPVSEVNVRVLAACAPSKLLASLPRGSTGVAGLAGSGLALPAQVASAQKVANRFLLCLPTGGLGVAIFGGGPLPWPQFTQSMDYTPLVAKGGSPAHYISLKSIKVENTRVPLSERALXTXGGVMLSTRLP

SEQ ID NO: 10432 - protein, 105 aa, Zea mays
  Coding DNA Sequence Number=SeqID_4358
  Gene Ontology: Mol. function=hydrolase activity, acting on glycosyl bonds; Biological process=polysaccharide catabolic process
  Homolog annotation: Hit_ID=P10538; Match level="QueryCoverage=100%, HitCoverage=21%, E-value=1e-56, Identity=99%"; Hit description=Beta -amylase
YNQIILNARPQGVNNNGPPKLSMFGVTYLRLSDDLLQKSNFNIFKKFVLKMHADQDYCANPQKYNHAITPLKPSAPKIPIEVLLEATKPTLPFPWLPETDMKVDG

SEQ ID NO: 10433 - protein, 122 aa, Zea mays
  Coding DNA Sequence Number=SeqID_4359
CVLKFGFPRHSSALIHRTVWCTSGAMAICAQWSTLMDEQCTTVTRQKSEQKVRGAPDCPVWHRTIRCGTGLSGVGPDCLLPHEDKASNGRPAPDPNDRVTWRRTRHYPMAHRTVRCAHRQQP

SEQ ID NO: 10434 - protein, 138 aa, Zea mays
  Coding DNA Sequence Number=SeqID_4361
  Gene Ontology: Mol. function=oxidoreductase activity; Biological process=electron transport
  Homolog annotation: Hit_ID=A3BPL8; Match level="QueryCoverage=67%, HitCoverage=20%, E-value=2e-40, Identity=89%"; Hit description =Putative uncharacterized protein
MKENGLFFYFLVESGFLGFESLLSCLCLIFSSGVRDTFSLKQGETFVPESIVRFGKRTEGRDGVVTIMAEDERIKYQGLHHGSSYLEHLNFLSAIRAQGASGPSVNLSDGLLSVAVGVAGQLSIEQGRFVTMEEVLGL

SEQ ID NO: 10435 - protein, 89 aa, Zea mays
  misc_feature (27)..(27): Xaa can be any naturally occurring amino acid
  misc_feature (59)..(59): Xaa can be any naturally occurring amino acid
  Coding DNA Sequence Number=SeqID_4362
EQRWVNCSPLICRWSWLDHTAWWLQQXSGASKSHNHKGSLCSIVMFAYSWPRMICSFSXHVSIHEQTRFRVCWLSNLCDLSVKPIIHDC

SEQ ID NO: 10436 - protein, 194 aa, Zea mays
  misc_feature (21)..(21): Xaa can be any naturally occurring amino acid
  misc_feature (59)..(59): Xaa can be any naturally occurring amino acid
  misc_feature (105)..(105): Xaa can be any naturally occurring amino acid
  Coding DNA Sequence Number=SeqID_4364
  Gene Ontology: Mol. function=NAD(P)H dehydrogenase (quinone) activity
  Homolog annotation: Hit_ID=Q941Z0; Match level="QueryCoverage=81%, HitCoverage=77%, E-value=7e-47, Identity=65%"; Hit description =Probable NADPH:quinone oxidoreductase 1
  Pfam annotation: Domain name=FMN_red; Domain location=4-143; Score= -9.1; E_value=0.00014; Accession=PF03358.6; Description=NADPH -dependent FMN reductase
HPWGCASDHLDVRDLPMLNTXLDDERRHASCRPPPRAMRVKVRHADCFLFTSPEYKYSXITSPLKNPLDWASRGVNCWADKPAAIVSAVGNFGGGRSSFHLRQVXGVFLDIHFINKPELFVFAFFEPAKFFDSDGNLIDADTRERLKQVLLSLEAFTRRLQNYKDCSRTSRGSPGLIITISTSFLQTFPSYLEQ

SEQ ID NO: 10437 - protein, 80 aa, Zea mays
  misc_feature (2)..(2): Xaa can be any naturally occurring amino acid
  misc_feature (10)..(10): Xaa can be any naturally occurring amino acid
  misc_feature (27)..(29): Xaa can be any naturally occurring amino acid
  misc_feature (40)..(40): Xaa can be any naturally occurring amino acid
  misc_feature (50)..(50): Xaa can be any naturally occurring amino acid
  misc_feature (52)..(52): Xaa can be any naturally occurring amino acid
  misc_feature (77)..(77): Xaa can be any naturally occurring amino acid
  Coding DNA Sequence Number=SeqID_4365
RXFKGLWKSXPFSPPHFYQIWVRLQNXXXPSAEFNPLPQXEMPVSGHQAXSXRYTTLPNTGKPKAGGRERRNVRTAXEWR

SEQ ID NO: 10438 - protein, 199 aa, Zea mays
  misc_feature (73)..(73): Xaa can be any naturally occurring amino acid
  misc_feature (152)..(152): Xaa can be any naturally occurring amino acid
  Coding DNA Sequence Number=SeqID_4367
  Gene Ontology: Mol. function=structural constituent of ribosome; Cellular component=ribonucleoprotein complex; Biological process =translation
  Homolog annotation: Hit_ID=A7PSP0; Match level="QueryCoverage=70%, HitCoverage=65%, E-value=9e-58, Identity=80%"; Hit description =Chromosome chr6 scaffold_28, whole genome shotgun sequence
  Pfam annotation: Domain name=Ribosomal_L3; Domain location=3-187; Score=96.5; E_value=8.6e-26; Accession=PF00297.12; Description =Ribosomal protein L3
  Subcellular localization annotation: CTP_CleavageSite=38; ConfidenceScore=5.37e-01
MAMAAVGVGGAVAFLLPQRRQGAVPWSGGRRRAPVAVRASYEAGVGVMATKVGMMTYFRHLQEFRLTAVDAFXPGQPLDFADLFKEGDLIDVSGNSIGMGFQGGIKRHNFKRGLMTHGSKSHRQLGSIGAGTTPARVSKGKKMPGRMGGTKXTKIRRLKIVKIDNNLRGLMIKGAGPGKPGNLLRLTPAKIVGKTIPKT

SEQ ID NO: 10439 - protein, 111 aa, Zea mays
  Coding DNA Sequence Number=SeqID_4368
  Homolog annotation: Hit_ID=A9PCJ3; Match level="QueryCoverage=98%, HitCoverage=97%, E-value=4e-38, Identity=71%"; Hit description =Putative uncharacterized protein
  Pfam annotation: Domain name=Dabb; Domain location=10-104; Score =84.4; E_value=3.7e-22; Accession=PF07876.3; Description=Stress responsive AB Barrel Domain
QQGKVAMGGFKHFVIVKFKAGVEVEELTKGMEKLVSEIDAVKSFEWGQDIESLDVLRQGFTHAFLMTFNKKEDFTAFQSHPNHIEFSATFSAAIEKIVVLDFPSTLVKAPA

SEQ ID NO: 10440 - protein, 73 aa, Zea mays
  Coding DNA Sequence Number=SeqID_4369
  Gene Ontology: Mol. function=oxidoreductase activity, acting on the aldehyde or oxo group of donors, disulfide as acceptor; Cellular component=mitochondrial matrix; Biological process=metabolic process
  Homolog annotation: Hit_ID=Q9ZQY0; Match level="QueryCoverage=100%, HitCoverage=18%, E-value=4e-22, Identity=73%"; Hit description =Pyruvate dehydrogenase E1 alpha subunit
KRVKKLFLTHDRANVVELKNMEKEIGKQVNAAIGKAKESSMPETWDLLPNVYTKGFSVESFGPARKGMRASLP

SEQ ID NO: 10441 - protein, 153 aa, Zea mays
  misc_feature (61)..(61): Xaa can be any naturally occurring amino acid
  misc_feature (105)..(105): Xaa can be any naturally occurring amino acid
  Coding DNA Sequence Number=SeqID_4370
  Gene Ontology: Mol. function=structural constituent of ribosome; Cellular component=ribonucleoprotein complex; Biological process =translation
  Homolog annotation: Hit_ID=P36210; Match level="QueryCoverage=58%, HitCoverage=48%, E-value=7e-27, Identity=76%"; Hit description=50S ribosomal protein L12-1, chloroplast precursor
  Subcellular localization annotation: CTP_CleavageSite=47; ConfidenceScore=5.56e-01
IATTIRSSSPLTSASTHHFLSKPTAIEFPFRLSSSSSHRAINLRPISAVEAPEKIEKIGSXEISSLTLEEARILVDYLQDKFGVSPLSLAPAAAAVAAPADGGAXAVAEEPTPAPARSLLPPPPRPAPLRPTLARPLLGKSMHGSLRVSIDCA

SEQ ID NO: 10442 - protein, 180 aa, Zea mays
  misc_feature (1)..(3): Xaa can be any naturally occurring amino acid
  misc_feature (5)..(8): Xaa can be any naturally occurring amino acid
  misc_feature (11)..(11): Xaa can be any naturally occurring amino acid
  misc_feature (15)..(15): Xaa can be any naturally occurring amino acid
  misc_feature (17)..(17): Xaa can be any naturally occurring amino acid
  misc_feature (20)..(20): Xaa can be any naturally occurring amino acid
  misc_feature (24)..(24): Xaa can be any naturally occurring amino acid
  misc_feature (27)..(27): Xaa can be any naturally occurring amino acid
  misc_feature (29)..(33): Xaa can be any naturally occurring amino acid
  misc_feature (37)..(37): Xaa can be any naturally occurring amino acid
  misc_feature (39)..(48): Xaa can be any naturally occurring amino acid
  misc_feature (50)..(50): Xaa can be any naturally occurring amino acid
  misc_feature (52)..(52): Xaa can be any naturally occurring amino acid
  misc_feature (56)..(56): Xaa can be any naturally occurring amino acid
  misc_feature (59)..(59): Xaa can be any naturally occurring amino acid
  misc_feature (63)..(72): Xaa can be any naturally occurring amino acid
  misc_feature (74)..(75): Xaa can be any naturally occurring amino acid
  misc_feature (77)..(77): Xaa can be any naturally occurring amino acid
  misc_feature (80)..(83): Xaa can be any naturally occurring amino acid
  misc_feature (86)..(86): Xaa can be any naturally occurring amino acid
  misc_feature (90)..(96): Xaa can be any naturally occurring amino acid
  misc_feature (98)..(98): Xaa can be any naturally occurring amino acid
  misc_feature (100)..(100): Xaa can be any naturally occurring amino acid
  misc_feature (102)..(103): Xaa can be any naturally occurring amino acid
  misc_feature (105)..(112): Xaa can be any naturally occurring amino acid
  misc_feature (114)..(115): Xaa can be any naturally occurring amino acid
  misc_feature (118)..(119): Xaa can be any naturally occurring amino acid
  misc_feature (121)..(121): Xaa can be any naturally occurring amino acid
  misc_feature (128)..(129): Xaa can be any naturally occurring amino acid
  misc_feature (132)..(132): Xaa can be any naturally occurring amino acid
  misc_feature (137)..(137): Xaa can be any naturally occurring amino acid
  misc_feature (140)..(140): Xaa can be any naturally occurring amino acid
  misc_feature (147)..(149): Xaa can be any naturally occurring amino acid
  misc_feature (151)..(151): Xaa can be any naturally occurring amino acid
  misc_feature (157)..(157): Xaa can be any naturally occurring amino acid
  misc_feature (173)..(173): Xaa can be any naturally occurring amino acid
  Coding DNA Sequence Number=SeqID_4371
XXXGXXXXPNXNGSXPXRPXPGRXSRXCXXXXXNEDXKXXXXXXXXXXTXSXVEAXNEXQPMXXXXXXXXXXKXXRXRNXXXXERXLRHXXXXXXXKXEXKXXSXXXXXXXXKXXMLXXCXLSCRSPXXTVXCTCSXLKXCITYLLXXXHXGLGLFXFAKPCTHIASLPQLFXKQQISSR

SEQ ID NO: 10443 - protein, 99 aa, Zea mays
  misc_feature (16)..(17): Xaa can be any naturally occurring amino acid
  Coding DNA Sequence Number=SeqID_4373
  Subcellular localization annotation: CTP_CleavageSite=47; ConfidenceScore=5.05e-01
LRFLGSCPVIAVPCAXXVLASLKFGVLAPNWAYLSVSPLGGACNLVSSAVVFVGGTDLLEASILFIPARTMMWCFPPPFLPSCFLLERIVPLRATPRDH

SEQ ID NO: 10444 - protein, 62 aa, Zea mays
  Coding DNA Sequence Number=SeqID_4375
CVEHGLQSNSIYEALQKNKIASFCSYVNLIMNPKMHPQSSPMSATARFLLHDVPHLGVQEHA

SEQ ID NO: 10445 - protein, 176 aa, Zea mays
  misc_feature (25)..(25): Xaa can be any naturally occurring amino acid
  misc_feature (57)..(57): Xaa can be any naturally occurring amino acid
  Coding DNA Sequence Number=SeqID_4377
  Gene Ontology: Mol. function=nutrient reservoir activity
  Homolog annotation: Hit_ID=P04700; Match level="QueryCoverage=90%, HitCoverage=60%, E-value=1e-37, Identity=57%"; Hit description=Zein -alpha PZ22.1/22A1 precursor
  Pfam annotation: Domain name=Zein; Domain location=1-176; Score =127.1; E_value=5e-35; Accession=PF01559.7; Description=Zein seed storage protein
VQALAVSATKAFIIPQWTLAPRAKXPQFLPPEASMGLEHPTVQAYRLQLARSASSLXQRPMAHIAAGNPWHIIALQTIATQQQQHFLPPLSHLAVVNPVAYLQQQLLASNPLALANVAAYQQQQQLQQFMPALSQLAMVNPAVYLQLLPSSPLAVGNADTYLQQQMIQQIVRRRRP

SEQ ID NO: 10446 - protein, 249 aa, Zea mays
  misc_feature (63)..(63): Xaa can be any naturally occurring amino acid
  misc_feature (154)..(154): Xaa can be any naturally occurring amino acid
  misc_feature (185)..(185): Xaa can be any naturally occurring amino acid
  misc_feature (205)..(205): Xaa can be any naturally occurring amino acid
  misc_feature (223)..(223): Xaa can be any naturally occurring amino acid
  misc_feature (225)..(225): Xaa can be any naturally occurring amino acid
  misc_feature (229)..(229): Xaa can be any naturally occurring amino acid
  misc_feature (233)..(233): Xaa can be any naturally occurring amino acid
  misc_feature (239)..(240): Xaa can be any naturally occurring amino acid
  misc_feature (249)..(249): Xaa can be any naturally occurring amino acid
  Coding DNA Sequence Number=SeqID_4378
  Gene Ontology: Mol. function=hydrolase activity; Cellular component =cytoplasm; Biological process=response to methylglyoxal
  Homolog annotation: Hit_ID=Q10LW8; Match level="QueryCoverage=82%, HitCoverage=79%, E-value=8e-83, Identity=72%"; Hit description =Hydroxyacylglutathione hydrolase, putative, expressed
  Pfam annotation: Domain name=Lactamase_B; Domain location=11-165; Score=19.8; E_value=0.0014; Accession=PF00753.17; Description =Metallo-beta-lactamase superfamily
HRKTRHAGSLGRSDWIPGRKWVVLGSARAEGSGGPTVRLTFSHTHDHCDHAGGNEKMTLQVPXIKVFGGSLDNVKGCTDQVENGMKVSLAKDIEILCLHTPCHTIGHISYYVTSKEGEDTTDFTGDTLFIAGCEKFFDGSAEHIVQSLIDTLGXLPKTTRAYCGHEYTVKNLIFMLTLEPENEKXKQKLEWAEKQREANQPTVPXTIGDEFEINTFMRVDLPXIXAKFXVNSXVEAMRXXRKTNDNWRX

SEQ ID NO: 10447 - protein, 256 aa, Zea mays
  misc_feature (61)..(61): Xaa can be any naturally occurring amino acid
  misc_feature (90)..(90): Xaa can be any naturally occurring amino acid
  misc_feature (113)..(113): Xaa can be any naturally occurring amino acid
  Coding DNA Sequence Number=SeqID_4379
  Homolog annotation: Hit_ID=Q9BUH6; Match level="QueryCoverage=45%, HitCoverage=64%, E-value=7e-39, Identity=70%"; Hit description =Uncharacterized protein C9orf142
MDPLSPPLCTLPPGPEPPRFVCYCEGEESAEGDRGGFNLYVTDAAELWSTCFTPDSLAALXACEQQAVALTLQEDRASLTLSGGPSALAXFDLSKVPGPEGSPQVCRRCTLGXWQKRVRCPGPRRAAALHTAVTPCSPPRPAPPRLPRARPPSPVPRPPARPRRRGGTLVTLETHRKVAAPQQKPPSIKPPGSPESDHILRLCWVMGPSHGAPFTGCYYKRGTPPHTRIFRPYSSPISRRPLHGPTPPNNTPPLNL

SEQ ID NO: 10448 - protein, 93 aa, Zea mays
  Coding DNA Sequence Number=SeqID_4380
  Subcellular localization annotation: CTP_CleavageSite=37; ConfidenceScore=5.68e-01
PQPYRIPGFSLLMRTSPQRRPPSSRTRAPPGLVLLVADSHARSPTSSWSATTPVLARSWLTVDRAARPDHCSQFVHISHHVQHYAAATPIPHA

SEQ ID NO: 10449 - protein, 48 aa, Zea mays
  misc_feature (24)..(24): Xaa can be any naturally occurring amino acid
  Coding DNA Sequence Number=SeqID_4382
  Gene Ontology: Mol. function=binding; Cellular component=endoplasmic reticulum membrane; Biological process=protein amino acid N-linked glycosylation via asparagine
  Homolog annotation: Hit_ID=Q655H8; Match level="QueryCoverage=93%, HitCoverage=3%, E-value=2e-15, Identity=82%"; Hit description=LvsC -like
CLVSYNDLIQYPIFPWVLADYTSXKLDFNKSSTFKDLSKSVGALDENR

SEQ ID NO: 10450 - protein, 43 aa, Zea mays
  Coding DNA Sequence Number=SeqID_4383
HHTKHIDKIHNNNLHVATKSWKQESLNSELRLPSYGFLKLFST

SEQ ID NO: 10451 - protein, 219 aa, Zea mays
  misc_feature (162)..(162): Xaa can be any naturally occurring amino acid
  misc_feature (193)..(193): Xaa can be any naturally occurring amino acid
  Coding DNA Sequence Number=SeqID_4385
  Gene Ontology: Mol. function=binding; Cellular component=cell surface; Biological process=cell adhesion
  Homolog annotation: Hit_ID=P39165; Match level="QueryCoverage=89%, HitCoverage=42%, E-value=1e-113, Identity=98%"; Hit description =Uncharacterized protein ychO precursor
VLVRAPPFDNNNDGLPDLGMAPENHDGEKHFAEIVKDFGETSMNDNGLDTGEQAKAFALGKVRDALSQQVNQHVESWLSPWGNASVDVKVDNEGHFTGSRGSWFVPLQDNDRYLTWSQLGLTQQDNGLVSNVGVGQRWARGNWLVGYNTFYDNLLDENLQRXGFGAEAWGEYLRLSANFYQPFAAWHEQTATXEQRMARGSTCSSDAHSINTSYHAPQW

SEQ ID NO: 10452 - protein, 88 aa, Zea mays
  Coding DNA Sequence Number=SeqID_4386
KPVPEYVAGHGTRRATAGTGATPKRGRKGQLGGRDPPPIYIIETHTHSPIFTLKLGFPIFLFFFSTTWLFPPFIYLPVNSVFCPAGCK

SEQ ID NO: 10453 - protein, 228 aa, Zea mays
  misc_feature (177)..(228): Xaa can be any naturally occurring amino acid
  Coding DNA Sequence Number=SeqID_4388
  Subcellular localization annotation: CTP_CleavageSite=78; ConfidenceScore=5.84e-01
GGSGRRSCPALRSSPRPSTATQTSRATSPTPSGTTPSSTTPGISREVAAYLDGRASSKDSSMASPIMPSPCALLSTSSSSSLSDAEFSPIEEELSDAAAPIDEASDTASASSSSSLLVAASSPCSSSSSSWTKYPLVLRIILSASSGSGFPLPDRRNPPCVGRATVVDMPATQPTNXXXXXXXXXXXXXXXXXXXXXXXXXXXXXXXXXXXXXXXXXXXXXXXXXXXX

SEQ ID NO: 10454 - protein, 149 aa, Zea mays
  misc_feature (139)..(139): Xaa can be any naturally occurring amino acid
  misc_feature (142)..(142): Xaa can be any naturally occurring amino acid
  misc_feature (146)..(148): Xaa can be any naturally occurring amino acid
  Coding DNA Sequence Number=SeqID_4389
  Gene Ontology: Mol. function=asparaginase activity; Cellular component=periplasmic space; Biological process=glycoprotein catabolic process
  Homolog annotation: Hit_ID=Q9A5T8; Match level="QueryCoverage=75%, HitCoverage=34%, E-value=1e-45, Identity=76%"; Hit description=N4 -(Beta-N-acetylglucosaminyl)-L-asparaginase, putative
  Pfam annotation: Domain name=Asparaginase_2; Domain location=14-150; Score=-117.5; E_value=0.0002; Accession=PF01112.9; Description =Asparaginase
  Subcellular localization annotation: CTP_CleavageSite=18; ConfidenceScore=5.26e-01
MVTRRFFLGASGLTAPLLAGATGGGSSVNKPLVVSTWDFGVPANKAAWVVLAAGGRSVDAVEAGVRVPEADMKNHTVGRAGYPDRDGHVTLDASIMDEFGNCGAVAAMEFIAHPISVARAVMDKTPHVLLVGEGATQFXVEXGFTXXXL

SEQ ID NO: 10455 - protein, 76 aa, Zea mays
  misc_feature (7)..(7): Xaa can be any naturally occurring amino acid
  misc_feature (24)..(24): Xaa can be any naturally occurring amino acid
  Coding DNA Sequence Number=SeqID_4390
  Gene Ontology: Mol. function=transporter activity; Cellular component= integral to membrane; Biological process=transport
  Homolog annotation: Hit_ID=Q39882; Match level="QueryCoverage=82%, HitCoverage=25%, E-value=6e-19, Identity=66%"; Hit description =Nodulin-26
GFIVGAXLIVGGAFCGRPMNTYVXIGPSVVSWSWTPRWISWAGPLMGGGVAGLVSEVVFISRTPRAASHRVLLEGG

SEQ ID NO: 10456 - protein, 107 aa, Zea mays
  Coding DNA Sequence Number=SeqID_4391
  Homolog annotation: Hit_ID=Q16SN1; Match level="QueryCoverage=96%, HitCoverage=64%, E-value=3e-08, Identity=43%"; Hit description =Putative uncharacterized protein
GGNGNVGHHGASAADLYSEHYHPGDAWYHQYSQHHHRAVHDYHHHNMAAQYGGLLLPGSRLHHMSSHAPCKAMDWQHPSIESPYSSYPTMSGLEAQVQDSSKDLYWF

SEQ ID NO: 10457 - protein, 135 aa, Zea mays
  Coding DNA Sequence Number=SeqID_4392
  Gene Ontology: Mol. function=structural constituent of ribosome; Cellular component=ribonucleoprotein complex; Biological process =translation
  Homolog annotation: Hit_ID=Q8LCL3; Match level="QueryCoverage=100%, HitCoverage=100%, E-value=1e-55, Identity=81%"; Hit description=60S ribosomal protein L27-2
  Pfam annotation: Domain name=KOW; Domain location=7-40; Score=16.7; E_ value=0.09; Accession=PF00467.19; Description=KOW motif
  Pfam annotation: Domain name=Ribosomal_L27e; Domain location=52-135; Score=208.8; E_value=1.3e-59; Accession=PF01777.8; Description =Ribosomal L27e protein family
  Pfam module annotation: Pfam domain module=KOW::Ribosomal_L27e; Domain location=7-40::52-135
MVKFLKQNKAVILLQGRYAGKKAVIIRSFDDGNRERPYGHCLVAGLKKYPSKVIRKDSAKKTAKKSRVKCFIKVVNYQHLMPTRYTLDVDLKEVATLEALASKDKKVAALKEAKAKLEERFKTGKNRWFFTKLRF

SEQ ID NO: 10458 - protein, 201 aa, Zea mays
  misc_feature (1)..(109): Xaa can be any naturally occurring amino acid
  Coding DNA Sequence Number=SeqID_4393
  Gene Ontology: Mol. function=hydrogen ion transporting ATP synthase activity, rotational mechanism; Cellular component=proton -transporting two-sector ATPase complex; Biological process=ATP synthesis coupled proton transport
  Homolog annotation: Hit_ID=A2ZIG7; Match level="QueryCoverage=43%, HitCoverage=52%, E-value=9e-19, Identity=61%"; Hit description =Putative uncharacterized protein
  Pfam annotation: Domain name=ATP-synt_C; Domain location=129-194; Score=78.1; E_value=2.8e-20; Accession=PF00137.12; Description=ATP synthase subunit C
XXXXXXXXXXXXXXXXXXXXXXXXXXXXXXXXXXXXXXXXXXXXXXXXXXXXXXXXXXXXXXXXXXXXXXXXXXXXXXXXXXXXXXXXXXXXXXXXXXXXXXXXXXXXXASSCTVIYPKAKPYYLFDGYDHLSSRVACGLAGLAAGMAIGIVGDAGVRANAQQPKLFVGMILILIFAEALALYGLIVGIILSSRAGQSRAD

SEQ ID NO: 10459 - protein, 113 aa, Zea mays
  Coding DNA Sequence Number=SeqID_4394
  Subcellular localization annotation: CTP_CleavageSite=73; ConfidenceScore=5.55e-01
LLSAHRLTALLCLLAARLQVQPAQLARRQRGRRLAGRASGLSSQLASSLLAAVSSLAASSLLAARQSPVDRASAAPRGRRAWRPAGGLEPGRWRPWSLSGSGVWRPAARVSAS

SEQ ID NO: 10460 - protein, 150 aa, Zea mays
  misc_feature (40)..(40): Xaa can be any naturally occurring amino acid
  misc_feature (60)..(60): Xaa can be any naturally occurring amino acid
  Coding DNA Sequence Number=SeqID_4396
  Gene Ontology: Mol. function=nucleic acid binding; Cellular component= intracellular; Biological process=regulation of transcription, DNA -dependent
  Homolog annotation: Hit_ID=Q653D5; Match level="QueryCoverage=100%, HitCoverage=41%, E-value=4e-62, Identity=76%"; Hit description=Zinc finger protein-like
MGNNNKRGYNDFCYYCDRKFDCQNILCQHQKDEHFTWHVXHKKLSTVSGMAIHVLQVHKXESVTKVPNAKPDRESTEIEIFGMQGIPAHVLAAHYGEEEDPSTKVPKVEVPQVRPVIMPNSLGMAFPPRPAYGVAPPIYNPALNPLMGRP

SEQ ID NO: 10461 - protein, 122 aa, Zea mays
  misc_feature (33)..(33): Xaa can be any naturally occurring amino acid
  misc_feature (44)..(44): Xaa can be any naturally occurring amino acid
  Coding DNA Sequence Number=SeqID_4397
RAISPPSKEQKLKVEGRGPLIFFFFFFFFFFRXLFFFFFLDVDXRRMDLLWKIPKHGNRGRRTYNSPPLLTGTLLDRRSNASTHDEDTIWHHKPRTPLLFMHGAMGWSRRRSTATPRRPLGE

SEQ ID NO: 10462 - protein, 151 aa, Zea mays
  Coding DNA Sequence Number=SeqID_4399
SERGEKRRPVSSIDHQWRRFMSNGGETDAMKVPITQSREERSARASVCGSAAGKSGRSGRVLKSWALGGLAQAGRGWIGWLGAWAQGARSSVGLLRVAVGARSLSWRWTGAVGRGAGVLGCVAAARLKAAASGWSMQGASVAREKGGERKG

SEQ ID NO: 10463 - protein, 62 aa, Zea mays
  Coding DNA Sequence Number=SeqID_4401
  Gene Ontology: Mol. function=protein transporter activity; Cellular component=COPI vesicle coat; Biological process=intracellular protein transport
  Homolog annotation: Hit_ID=Q9AUR8; Match level="QueryCoverage=100%, HitCoverage=5%, E-value=5e-21, Identity=75%"; Hit description =Coatomer subunit alpha-1
MLTKFETKSNWVKGFAFHSCRRWIQSSLHSSVIQMRDYRMGTVLNRFDEHDEPIRGIHFHAT

SEQ ID NO: 10464 - protein, 82 aa, Zea mays
  Coding DNA Sequence Number=SeqID_4402
  Gene Ontology: Mol. function=structural constituent of ribosome; Cellular component=ribonucleoprotein complex; Biological process =translation
  Homolog annotation: Hit_ID=Q0UX64; Match level="QueryCoverage=100%, HitCoverage=100%, E-value=6e-27, Identity=76%"; Hit description =Putative uncharacterized protein
  Pfam annotation: Domain name=Ribosomal_L38e; Domain location=2-71; Score=133.4; E_value=6.4e-37; Accession=PF01781.8; Description =Ribosomal L38e protein family
MPSEVSDIKQFIEICRRKDAKSACIKKNKKVNNIKFKVRCSTNLYTLVLKDTDKAEKLKQSLPPGLTISDVGKKNPKGKRTA

SEQ ID NO: 10465 - protein, 617 aa, Zea mays
  misc_feature (62)..(62): Xaa can be any naturally occurring amino acid
  misc_feature (192)..(192): Xaa can be any naturally occurring amino acid
  misc_feature (214)..(214): Xaa can be any naturally occurring amino acid
  Coding DNA Sequence Number=SeqID_4403
  Gene Ontology: Mol. function=transcription regulator activity; Cellular component=nucleus; Biological process=regulation of transcription
  Homolog annotation: Hit_ID=Q10D98; Match level="QueryCoverage=96%, HitCoverage=95%, E-value=0.0, Identity=70%"; Hit description =NOT2/NOT3/NOT5 family protein, expressed
  Pfam annotation: Domain name=NOT2_3_5; Domain location=465-604; Score= 206.4; E_value=6.8e-59; Accession=PF04153.8; Description=NOT2  NOT3 NOT5 family
  Subcellular localization annotation: CTP_CleavageSite=12; ConfidenceScore=5.61e-01
MSGLLNSNLNSSASNLSDSAGRPFTASFSGQSGSIPGFHHSGLHNTHGSYNLPSMPGSLAQXRNAAMSGLPSSGVQQPGGSIPGRFPSNNLPVGMPQIPHAHSGVSGRGMNFGAGPAFSSSMNIGGNIQGLSSGLGSGGNRNSVHGMPVSSSIGNSGQRISSVGNMVSASNIGRNIGTGGLSVPSIASRIPXSGVLFITYLFIRVHVSSSFFNXLKPATPQLINMLGSSYPTSGGSLSQSQIQAGNNSFSSMGMLHDASDTAPFDINDFPQLSGRPSSAGGPQGQYGSLRKQGVGVNTLVQQNQEFSIQNEDFPALPGYKGNPSDYNAIELHHKEQLHDNVPVIQAQQYPMARSGLGSSYLPNRQQHQQGANSVQNGGSHNILLRPPSQTSSLGSYDPFLQQYQQPQPQNHFRLQQMSSAAHSYRDQIQKIQAGPTPPDPYGLLGFLGVIRMNDADLASLALGIDLTALGLNLNSPDNLYKTFGSPWSNDPAKGDTDFRIPACYLFDKTPPLQTLLFQRFHIVTLFFVFYSMPKDEAQLYSANELYNRGWFYHKEVHLWLTRISNVEPLVKTHLYERGSYYCFDPESWDTIRKDNFVLHYEMVEKRPVLPSTSPNLR

SEQ ID NO: 10466 - protein, 128 aa, Zea mays
  Coding DNA Sequence Number=SeqID_4404
  Gene Ontology: Mol. function=nutrient reservoir activity
  Homolog annotation: Hit_ID=P04702; Match level="QueryCoverage=91%, HitCoverage=48%, E-value=3e-40, Identity=74%"; Hit description=Zein -alpha M6 precursor
  Subcellular localization annotation: CTP_CleavageSite=49; ConfidenceScore=5.03e-01
PYYQQQQFFPFNHLFTLNPAVYLRHHLFPFSRLGFAYFHQQQLFPFNQLAALNPAVYLQQQIFLPFSQLVAASRASFLTQQQLLPFYQRFGANPAPLFQLHQLLPFVHLVLTNPAASSHQPIIGGALF

SEQ ID NO: 10467 - protein, 87 aa, Zea mays
  Coding DNA Sequence Number=SeqID_4405
FKRKDPGAAPERDSLNYYLHFFTPPTDQNETTLLVLLIDSLVRRLHARVGRAIPLEGYFGGVGKRREATWDSAGSDPTVAPRLTHNN

SEQ ID NO: 10468 - protein, 128 aa, Zea mays
  Coding DNA Sequence Number=SeqID_4407
EHLASSEPRPGKLLSVVQVDCQVQEPGPVLDASWTSYAFFGAGAGTSAAGAATGAGGVTASGVGAGGELTGAEALGEGDGGELSGTGVGGRVGRGSSWSRRSGGRASWRGGRRLATDTGDDNAEQCNR

SEQ ID NO: 10469 - protein, 97 aa, Zea mays
  Coding DNA Sequence Number=SeqID_4409
KRTRFYIKQPCNPSWSRYIYHWDARLTPGTECELTMPLRLQVGNVSRLSAQKDRSSALPAYHVRLPRRPPTAATEGKTVNPPCPGAYKKFPLHFFKL

SEQ ID NO: 10470 - protein, 162 aa, Zea mays
  Coding DNA Sequence Number=SeqID_443
  Gene Ontology: Mol. function=transferase activity, transferring hexosyl groups; Biological process=carbohydrate biosynthetic process
  Homolog annotation: Hit_ID=Q2L3C5; Match level="QueryCoverage=45%, HitCoverage=11%, E-value=5e-11, Identity=51%"; Hit description =Glycosyl transferase-like protein
PRPASANSRRARRRSNPVAPTKISACPPLESERPLPLPLRQGGLAGTGGEGNAAWPAAVPGRGAPPSHRVGARAPSAVRRLPRLGSIKESATHSLSNKTREQQTSASNSNTAHHATNSIAGQTTTLSDATIHIIKDQLTRAKMYLGLFASKSNHGFARELHA

SEQ ID NO: 10471 - protein, 162 aa, Zea mays; identical to SEQ ID NO: 10470
  Coding DNA Sequence Number=SeqID_444
  Gene Ontology: Mol. function=transferase activity, transferring hexosyl groups; Biological process=carbohydrate biosynthetic process
  Homolog annotation: Hit_ID=Q2L3C5; Match level="QueryCoverage=45%, HitCoverage=11%, E-value=5e-11, Identity=51%"; Hit description =Glycosyl transferase-like protein

SEQ ID NO: 10472 - protein, 116 aa, Zea mays
  Coding DNA Sequence Number=SeqID_445
TPHPFCLFLFIVAECRLPNLLLVGSVHAAEDYGLDRAAHGAMRICGSTRTSTRNWEGSGAQIRRRRVGKRPTHTRELTSPPTVAKRQCRQASTMAADQVTTTEVGNGGTHPSRGTN

SEQ ID NO: 10473 - protein, 78 aa, Zea mays
  Coding DNA Sequence Number=SeqID_447
WRLRFGRKIEIGCERTLCCVILKDIAPCSCYHAHASLFVVRLWHHLQYHTHTWICFIFSLFSLSVSRGTCLVSCSDAS

SEQ ID NO: 10474 - protein, 134 aa, Zea mays
  Coding DNA Sequence Number=SeqID_449
  Subcellular localization annotation: CTP_CleavageSite=48; ConfidenceScore=5.43e-01
GEREREQSTNQLPPSVPQFSSSWRSGASCRRLHPCRRRRRSSCSRAPSCSSESPSLRLLGAELEERSLLEGSELVVLVFACCFSCSCSCAAIFLLSSPLLPTPRTDQDLLPPGLVLLRLLPDKKKNQIFAHAGF

SEQ ID NO: 10475 - protein, 37 aa, Zea mays
  Coding DNA Sequence Number=SeqID_451
RILALSPRLDSVALSRLTARSASRVHSILLATWEAEV

SEQ ID NO: 10476 - protein, 139 aa, Zea mays
  Coding DNA Sequence Number=SeqID_453
EALGGRVTLRFGAEALPKRHDRLVGAAAAGSRCPQTARSAAVSGPGAVIHRMREERESRTQDHRPVCGGPEARARGDWQEAGGEAADAFAESPSMSSAAVACVPSAMKGGSGRWNCGKMKMGDAETCGGCVPAVKRLGR

SEQ ID NO: 10477 - protein, 139 aa, Zea mays
  Coding DNA Sequence Number=SeqID_455
  Gene Ontology: Mol. function=structural constituent of ribosome; Cellular component=ribonucleoprotein complex; Biological process =translation
  Homolog annotation: Hit_ID=Q8LR04; Match level="QueryCoverage=98%, HitCoverage=99%, E-value=3e-53, Identity=76%"; Hit description=50S ribosomal protein L34
  Pfam annotation: Domain name=Ribosomal_L34; Domain location=96-139; Score=58.7; E_value=2.1e-14; Accession=PF00468.8; Description =Ribosomal protein L34
  Subcellular localization annotation: CTP_CleavageSite=59; ConfidenceScore=5.29e-01
MASAAKTLARVGSSLFGRILASPSSSIPRAGLPLARLQPHVPPPAPAGVDAYEAETVARLSSLPGEISFPCGLPSLRFFIDDVEDPVPNDPFQLLPKRTYQPSTIKRKRTHGFLTRKSTKGGRKVIARRIAKGRHRISV

SEQ ID NO: 10478 - protein, 52 aa, Zea mays
  Coding DNA Sequence Number=SeqID_456
  Gene Ontology: Mol. function=transcription regulator activity; Cellular component=nucleus; Biological process=regulation of transcription
  Homolog annotation: Hit_ID=Q9NX85; Match level="QueryCoverage=98%, HitCoverage=33%, E-value=2e-17, Identity=80%"; Hit description=CDNA FLJ20378 fis, clone KAIA0536
RQSPTLPAQAGVQWRDLGSLQPPPPGFKRLSCLSPPSSWDHRHAPPCPANFA

SEQ ID NO: 10479 - protein, 136 aa, Zea mays
  Coding DNA Sequence Number=SeqID_457
  Subcellular localization annotation: CTP_CleavageSite=76; ConfidenceScore=5.39e-01
PGPTPALLFPSPWCCYGGLLGSRCSLPSTLCSMRPLSAPSPRFHHSRDRACGHRGGSTPASRVLLWGCAGELRRAVGSALVGSRGALVTAWLWEFDVGLHGHHCVACVVGCLTHLSIAGQEQVVQEEPHIEEFDLI

SEQ ID NO: 10480 - protein, 280 aa, Zea mays
  Coding DNA Sequence Number=SeqID_459
  Gene Ontology: Mol. function=aminoacyl-tRNA ligase activity
  Homolog annotation: Hit_ID=Q10BW3; Match level="QueryCoverage=88%, HitCoverage=55%, E-value=1e-102, Identity=73%"; Hit description =Aminoacyl-tRNA synthetase family, putative, expressed
IPTGSLAMAAASPPQDQQQPAAEGAVAREDPAALTPRRARFPRACHYRPNAPPLTPTPAPSPPPPRPRRNGNAGYETPEYRVVTPLVEEPASPAELPRWRLRGMWELASVLNFLHVFRPLLNIPVEFTAEELEDAIITPNGTLDDVHMPLLKSIPPVTRMAMGRGTWIAVLCKKLKHWWHWVAEGDIPIVASHGAETELYKALEPGIRLVILKAICDIRSEQEDVRNFIDSSLKHGYHLSIFRKERIGGDSHGISYWYEDDPILGHRLYREIRRVEHAKD

SEQ ID NO: 10481 - protein, 164 aa, Zea mays
  Coding DNA Sequence Number=SeqID_4410
  Subcellular localization annotation: CTP_CleavageSite=31; ConfidenceScore=5.49e-01
LKFTSISCLRRCRRRSPMWGTTSPPPPPLLRGSGVGRSSSGGEGRRRSKLVTFLWITQNLIGLCELLELLGVTALVGVVLDSSLAVGLLEIVLGRRLGHPEDLVVLGVVALLRRAPEHLAFASGGAAAARRCGVRPRRRRRRSCGGVGWGGAVAEGKGGGGQSW

SEQ ID NO: 10482 - protein, 104 aa, Zea mays
  Coding DNA Sequence Number=SeqID_4411
GPTTFSSYQYSAKPTEINRALPHKTPKGLQWPPLKKWMVGKNSVHSCRLLFCRHRILDNKGWCSFNKKKKKKRGKKKKKKKKKKKKKKKKKKKKKKKKRGPPRI

SEQ ID NO: 10483 - protein, 106 aa, Zea mays
  Coding DNA Sequence Number=SeqID_4413
  Subcellular localization annotation: CTP_CleavageSite=35; ConfidenceScore=5.67e-01
CFVNNPNLCGPGTTKPCPDAPPFSPPPPYNPTTPMQSPGSSSSTTGAIVGGVAAGAALLFAVPAISFAYWRHRKPQEQAFFSMYLASKLVFDYYLSRNIRANNVYM

SEQ ID NO: 10484 - protein, 233 aa, Zea mays
  misc_feature (146)..(147): Xaa can be any naturally occurring amino acid
  Coding DNA Sequence Number=SeqID_4415
  Gene Ontology: Mol. function=transcription factor binding; Cellular component=intracellular; Biological process=regulation of transcription, DNA-dependent
  Homolog annotation: Hit_ID=Q33B74; Match level="QueryCoverage=91%, HitCoverage=63%, E-value=2e-85, Identity=77%"; Hit description=GTP -binding protein, putative, expressed
  Pfam annotation: Domain name=Arf; Domain location=12-200; Score= -98.6; E_value=0.047; Accession=PF00025.11; Description=ADP -ribosylation factor family
  Pfam annotation: Domain name=MMR_HSR1; Domain location=25-166; Score =5.2; E_value=0.00036; Accession=PF01926.13; Description=GTPase of unknown function
  Pfam annotation: Domain name=Miro; Domain location=26-166; Score =31.7; E_value=2.6e-06; Accession=PF08477.3; Description=Miro-like protein
  Pfam annotation: Domain name=Ras; Domain location=26-196; Score= -44.6; E_value=5.2e-06; Accession=PF00071.12; Description=Ras family
  Pfam module annotation: Pfam domain module=Arf::MMR_HSR1::Miro::Ras; Domain location=12-200::25-166::26-166::26-196
MRFWRDGGASGSGRDLNGGMPYGQVRVLVVGDSGVGKSSLARLILHGSAIARPTQTIGCTVDVKHITYGSPGSSSNSVVGDAERNFFVELWNVSGHDRYRDCRSLFYSQINGVIFVYDLSQRKTKTNLSKWAVEVAESGTFSAPLXXSGGPGGLPVPYLVIANKVDIAPRDGRRVSSGNLVDVARQWVEKQGLLPSSEVLPLADNFPGNSGLLTVKLLYSLCTNICCLMSCFN

SEQ ID NO: 10485 - protein, 179 aa, Zea mays
  Coding DNA Sequence Number=SeqID_4416
  Gene Ontology: Mol. function=pectinesterase activity; Cellular component=cell wall; Biological process=cell wall modification
  Homolog annotation: Hit_ID=Q53WM8; Match level="QueryCoverage=73%, HitCoverage=32%, E-value=5e-62, Identity=87%"; Hit description =Putative pectin methylesterase
  Pfam annotation: Domain name=Pectinesterase; Domain location=3-179; Score=-94.8; E_value=1.9e-14; Accession=PF01095.10; Description =Pectinesterase
  Subcellular localization annotation: CTP_CleavageSite=79; ConfidenceScore=5.05e-01
PMRAFVTEEGAGAYKTVVQWGDTADTAGSWGRPMGTFGSATFAVNSMFFVAKNITFKQNTAPVPRPGALGKQGVALRISADNAAFVGCNFLGAQDTLYDHLGRHYYRDCYIEGSVDFIFGNALSLYEACRLYRTQALLNPGAPAHSGTGTRRHSAAAGSLHHVLPCSALPSPFGLILGL

SEQ ID NO: 10486 - protein, 89 aa, Zea mays
  Coding DNA Sequence Number=SeqID_4417
  Gene Ontology: Mol. function=methyltransferase activity; Biological process=tRNA processing
  Homolog annotation: Hit_ID=Q8H4D4; Match level="QueryCoverage=79%, HitCoverage=6%, E-value=4e-25, Identity=76%"; Hit description=tRNA wybutosine-synthesizing protein 2/3/4 (EC 2.1.1.-) [Includes: tRNA ...
  Homolog annotation: Hit description=wybutosine-synthesizing protein 3 homolog (EC 2.1.1.-); tRNA wybutosine synthesizing protein 2 homolog (EC 2.1.1.-)]
LQPQQEYVRVRACAVTKKLSTTCLFWQGKIMPNGTRDSTLELLLGDNGWVAHYENGICYSLDATKCMFSSGNRSEKLRMGQLNCRSTLK

SEQ ID NO: 10487 - protein, 89 aa, Zea mays
  Coding DNA Sequence Number=SeqID_4418
  Gene Ontology: Mol. function=catalytic activity; Biological process =DNA repair
  Homolog annotation: Hit_ID=A3BYE2; Match level="QueryCoverage=97%, HitCoverage=100%, E-value=2e-21, Identity=57%"; Hit description =Putative uncharacterized protein
MAQPVFLSSLRSRLCSAPPSPHHHLQPSRGYHVELGAREKTLLEEDVALKRFKSYKNSVKQVSKIGNVLTLAVVFGCSYELGLLAASMK

SEQ ID NO: 10488 - protein, 163 aa, Zea mays
  misc_feature (68)..(68): Xaa can be any naturally occurring amino acid
  misc_feature (88)..(88): Xaa can be any naturally occurring amino acid
  Coding DNA Sequence Number=SeqID_4419
  Gene Ontology: Mol. function=metal ion binding
  Homolog annotation: Hit_ID=A2WZ73; Match level="QueryCoverage=29%, HitCoverage=43%, E-value=2e-12, Identity=72%"; Hit description =Putative uncharacterized protein
  Subcellular localization annotation: CTP_CleavageSite=64; ConfidenceScore=5.76e-01
GRGSASLSLSLSFFSGHARSFVKAPLPALTSAPPSPAPTDPLVRSAPSPIPAAMAAAAAASSSSSSEXRSPPAPASPSARWRWERWLXSSGDRVAADCGVCAICLDRIALQETALVKGCDHAYWFADIPYPLPLSPDDYSITYFDARWNYDSLSRLLVIPHLQ

SEQ ID NO: 10489 - protein, 73 aa, Zea mays
  Coding DNA Sequence Number=SeqID_4420
  Gene Ontology: Mol. function=transporter activity; Cellular component= integral to membrane; Biological process=transport
  Homolog annotation: Hit_ID=Q0WQN1; Match level="QueryCoverage=87%, HitCoverage=34%, E-value=2e-16, Identity=59%"; Hit description =Putative uncharacterized protein
KIKREREDRVTMEGMGHLLLFAFLFWFSTFMVAPVMTDVTMAALCPGRDECSLAIYLTGLQQAVTYISYLPGS

SEQ ID NO: 10490 - protein, 60 aa, Zea mays
  Coding DNA Sequence Number=SeqID_4421
  Gene Ontology: Mol. function=receptor activity; Cellular component =integral to membrane
  Homolog annotation: Hit_ID=Q2R2X1; Match level="QueryCoverage=96%, HitCoverage=11%, E-value=2e-15, Identity=74%"; Hit description=Lung seven transmembrane receptor family protein, expressed
DSSSQRYAYSGEAADDDDEESQSLTKGDGEVGMVKIDKDRNAGVSSAFGLEDEAEEDKRE

SEQ ID NO: 10491 - protein, 192 aa, Zea mays
  Coding DNA Sequence Number=SeqID_4422
  Gene Ontology: Mol. function=serine-type endopeptidase activity; Cellular component=intracellular; Biological process=protein modification process
  Homolog annotation: Hit_ID=P93501; Match level="QueryCoverage=96%, HitCoverage=81%, E-value=2e-98, Identity=100%"; Hit description =Ubiquitin-like protein
  Pfam annotation: Domain name=ubiquitin; Domain location=1-43; Score =37.6; E_value=4.4e-08; Accession=PF00240.13; Description=Ubiquitin family
  Pfam annotation: Domain name=ubiquitin; Domain location=127-192; Score=116.4; E_value=8.7e-32; Accession=PF00240.13; Description =Ubiquitin family
  Pfam annotation: Domain name=ubiquitin; Domain location=51-119; Score= 138.0; E_value=2.6e-38; Accession=PF00240.13; Description=Ubiquitin family
  Pfam module annotation: Pfam domain module=ubiquitin::ubiquitin::ubiqu itin; Domain location=1-43::127-192::51-119
KKKKKKKDQQRLIFAGKQLEDGRTLADYNIQKESTLHLVLRLRGGMQIFVKTLTGKTITLEVESSDTIDNVKAKIQDKEGIPPDQQRLIFAGKQLEDGRTLADYNIQKESTLHLVLRLRGGMQIFVKTLTGKTITLEVESSDTIDNVKAKIQDKEGIPPDQQRLIFAGKQLEDGRTLADYNIQKESTLHLVL

SEQ ID NO: 10492 - protein, 143 aa, Zea mays
  misc_feature (124)..(143): Xaa can be any naturally occurring amino acid
  Coding DNA Sequence Number=SeqID_4423
HPLSPTISKRDAPRRVDPSPGWRSWELITARTPSSKMDGAVRWRAYPHPPNPSKRGGGGFPLRGGAQLPSGPLPGAVAFSLKQEGHGEAPLVRQVQPLLLAPRQVPRSRRCFSPRWAVFPVKVXXXXXXXXXXXXXXXXXXXX

SEQ ID NO: 10493 - protein, 118 aa, Zea mays
  Coding DNA Sequence Number=SeqID_4425
CRIRHEGFLPFRWGRLVRFFFLTAMKSHSYVNYSLTSGRRKQRDPSTAEADGSTGAAPGKRSHSPRMAPTTAKQERRGGHNNSLDYRTGKNQSCCIQVPGANRDTVDACWSWARELER

SEQ ID NO: 10494 - protein, 68 aa, Zea mays
  Coding DNA Sequence Number=SeqID_4426
  Subcellular localization annotation: CTP_CleavageSite=39; ConfidenceScore=5.02e-01
HWTSFASLSNSSSSPSLQLVCTPHSVVCFQLDREIVTCRQTYVWDGKSYEKVDSLHASSLGVARPPAG

SEQ ID NO: 10495 - protein, 143 aa, Zea mays
  Coding DNA Sequence Number=SeqID_4428
VKSRCKKAGNKAKLGRRDARRETREMAEPPLAAGCTTNWRREADERLRRLHSLLFGADAALEHGDATAAQALALRLLGFLDSQALAAGALPPAPSPPIRPVGADGHRWGQIAPPRRSRFAPPPLHTPPDAATTPVPPRPPPQK

SEQ ID NO: 10496 - protein, 82 aa, Zea mays
  Coding DNA Sequence Number=SeqID_4430
  Gene Ontology: Mol. function=hydrolase activity, hydrolyzing O -glycosyl compounds; Cellular component=extracellular region; Biological process=carbohydrate metabolic process
  Homolog annotation: Hit_ID=Q10PN7; Match level="QueryCoverage=86%, HitCoverage=16%, E-value=5e-29, Identity=90%"; Hit description =Glucan endo-1,3-beta-glucosidase 7, putative, expressed
MVPKEAPWLPNSSQSFIGVNYGTIADNLPPPASTASLLMSTSIAKLRLYEPQPDLVAALAGSNISILLGIPNGAVPNLASSP

SEQ ID NO: 10497 - protein, 421 aa, Zea mays
  misc_feature (22)..(22): Xaa can be any naturally occurring amino acid
  misc_feature (248)..(248): Xaa can be any naturally occurring amino acid
  Coding DNA Sequence Number=SeqID_4431
  Gene Ontology: Mol. function=protein kinase activity; Cellular component=integral to membrane; Biological process=protein amino acid phosphorylation
  Homolog annotation: Hit_ID=A2XC04; Match level="QueryCoverage=99%, HitCoverage=46%, E-value=1e-158, Identity=70%"; Hit description =Putative uncharacterized protein
  Pfam annotation: Domain name=Pkinase; Domain location=127-414; Score =60.6; E_value=5.3e-15; Accession=PF00069.15; Description=Protein kinase domain
  Pfam annotation: Domain name=Pkinase_Tyr; Domain location=127-414; Score=41.7; E_value=6e-15; Accession=PF07714.7; Description=Protein tyrosine kinase
  Pfam module annotation: Pfam domain module=Pkinase::Pkinase_Tyr; Domain location=127-414::127-414
PRGLVPGFDFTAYMDNPLLCGXSLPNNCGTGTGMKHRKRLRVPVIIAIVAAALILVGICIVCALNIKAYTRKGTDGDGKEEEEVLVSESTPPAASPGSNAIIGKLVLFSKSLPSRYEDWETGTKALLDKDCLIGGGSIGTVYKATFENGLSIAVKKLETVGRVRGQDEFEHQMSQLGNLSHPNLVAFQGYYWSSSMRVLLSEFMANGSLYDHLHGYRPPPRALSESSSSSRGGGGELFWERRFNIALXTARALAYLHHDCWPQILHLNIKSSNIMLDGRYEARLSDYGLGKLLPILGSIELSRTHTAIGYIAPELASPTLGYSDKSDVFSFGVVLLEIVTGRKPVDSPGIGATAVVLRDYVRGILEDGTASDCFDRSLRGFVEAELVQVLQLGLVCPSNTPSSRPSMAEVVQFLESVRVSS

SEQ ID NO: 10498 - protein, 222 aa, Zea mays
  Coding DNA Sequence Number=SeqID_4432
  Subcellular localization annotation: CTP_CleavageSite=75; ConfidenceScore=5.07e-01
AERPRHPGRMHTCMHAWFISFQGASLQKGGGVQDLLQFSLRRGFFSLAQVTLQALVTSAAFTTYALSHSSWQTFMAGAVMPFCSVHLPLHWILPYSTRLDCWESAQDSLHTTRSVPFLPSHSVEQKSSWIFFASAASPLSAALFFFASATCGAVAATSARASTKSAADDAMLRLFIIFASWLLLSLVVMEEMTAGLLVGFFFFFFFFFFFFLVSRAFNFCRY

SEQ ID NO: 10499 - protein, 134 aa, Zea mays
  misc_feature (54)..(54): Xaa can be any naturally occurring amino acid
  misc_feature (134)..(134): Xaa can be any naturally occurring amino acid
  Coding DNA Sequence Number=SeqID_4434
  Gene Ontology: Mol. function=microtubule motor activity; Cellular component=microtubule associated complex; Biological process =microtubule-based movement
  Homolog annotation: Hit_ID=Q84VC0; Match level="QueryCoverage=77%, HitCoverage=16%, E-value=1e-45, Identity=91%"; Hit description =Kinesin-like protein
  Pfam annotation: Domain name=Kinesin; Domain location=14-134; Score= -85.8; E_value=1.4e-09; Accession=PF00225.13; Description=Kinesin motor domain
PVQGGFCPCLKYNAQWPDGIGCGVRFCDATADGMPIEEMNEDYLCAKLHLVDLXAGSERAKRTGSDGLRFKEGVHINRGLLALGNVISALGDEKKRKEGAHVPYRDSKLTRLLQDSLGGNSKTVMIGNLSSPDX

SEQ ID NO: 10500 - protein, 200 aa, Zea mays
  Coding DNA Sequence Number=SeqID_4435
  Homolog annotation: Hit_ID=Q2IMJ3; Match level="QueryCoverage=99%, HitCoverage=36%, E-value=6e-09, Identity=33%"; Hit description=LigA
AGRAGLRGEQRNRLRAGGRGPRAQSLDQGRAIGASGHLGQSRARGEAQPDTRAGSSARRGEQGGGRAPGRKKLQPGAMDCGAEKKTRRHGDPNCDRDMRQGARPSVIGASRGGKKGRAELRTWPGRDDGSCHGRAHGRRAEGACARTRPDSRMSERAGPDTGMAGCTGKKKRREEQRTALVSRGEEIRPSVRRARAEFRA

SEQ ID NO: 10501 - protein, 74 aa, Zea mays
  Coding DNA Sequence Number=SeqID_4436
  Gene Ontology: Mol. function=hydrolase activity, acting on acid anhydrides, catalyzing transmembrane movement of substances; Cellular component=integral to membrane; Biological process =metabolic process
  Homolog annotation: Hit_ID=Q6AUL4; Match level="QueryCoverage=62%, HitCoverage=3%, E-value=1e-15, Identity=91%"; Hit description =Putative uncharacterized protein OSJNBb0006J12.7
NKFPAGYLLRSLADTSSSPGGEYSKAPSVSEARSLERDQVESDLTFAGFAVFNCPIRGDSGAVLQENGQSSHDL

SEQ ID NO: 10502 - protein, 78 aa, Zea mays
  Coding DNA Sequence Number=SeqID_4437
  Gene Ontology: Mol. function=oxidoreductase activity, acting on the CH-OH group of donors, NAD or NADP as acceptor; Cellular component =integral to membrane; Biological process=isoprenoid biosynthetic process
  Homolog annotation: Hit_ID=Q42466; Match level="QueryCoverage=64%, HitCoverage=8%, E-value=3e-16, Identity=80%"; Hit description=3 -hydroxy-3-methylglutaryl-CoA reductase
CSTGDAMGMNMVSKGVQNVLDFLQDDFPDMDVISISGSFCSLVVTTRFSWTSSILLKRSGDGSPYFKKKPRGDWSPTS

SEQ ID NO: 10503 - protein, 204 aa, Zea mays
  misc_feature (1)..(136): Xaa can be any naturally occurring amino acid
  Coding DNA Sequence Number=SeqID_4438
XXXXXXXXXXXXXXXXXXXXXXXXXXXXXXXXXXXXXXXXXXXXXXXXXXXXXXXXXXXXXXXXXXXXXXXXXXXXXXXXXXXXXXXXXXXXXXXXXXXXXXXXXXXXXXXXXXXXXXXXXXXXXXXXXXXXXXXXPRDRDRPARRGRIEQVLSTLGEKMKRDVDVGLVADFRRFSREKAAAFRATPTLGVEASDRDEASESES

SEQ ID NO: 10504 - protein, 281 aa, Zea mays
  Coding DNA Sequence Number=SeqID_4440
  Gene Ontology: Mol. function=ubiquitin protein ligase binding; Cellular component=cullin-RING ubiquitin ligase complex; Biological process=ubiquitin-dependent protein catabolic process
  Homolog annotation: Hit_ID=Q10CD7; Match level="QueryCoverage=100%, HitCoverage=33%, E-value=1e-153, Identity=95%"; Hit description =Cullin-4B, putative, expressed
  Pfam annotation: Domain name=Cullin; Domain location=1-183; Score =192.0; E_value=1.5e-54; Accession=PF00888.12; Description=Cullin family
KTDCGSQFTNKLEGMFKDIELSKEINDSFRQSSQARTKLPSGIEMSVHVLTTGYWPTYPPMDVKLPHELNVYQDIFKEFYLSKYSGRRLMWQNSLGHCVLKADFPKGKKELAVSLFQSVVLMLFNDAQKLSFIDIKDSTGIEDKELRRTLQSLACGKVRVLQKIPKGRDVEDKDEFVFNEDFSAPLYRIKVNAIQMKETVEENTSTTERVFQDRQYQVDAAIVRIMKTRKVLSHTLLITELYQQLKFPVKPADIKKRIESLIDREYLERDRSNPQIYNYLA

SEQ ID NO: 10505 - protein, 175 aa, Zea mays
  misc_feature (13)..(13): Xaa can be any naturally occurring amino acid
  misc_feature (31)..(31): Xaa can be any naturally occurring amino acid
  misc_feature (141)..(141): Xaa can be any naturally occurring amino acid
  Coding DNA Sequence Number=SeqID_4441
  Homolog annotation: Hit_ID=A2ZUB4; Match level="QueryCoverage=86%, HitCoverage=28%, E-value=2e-58, Identity=74%"; Hit description =Putative uncharacterized protein
  Subcellular localization annotation: CTP_CleavageSite=32; ConfidenceScore=5.02e-01
RVPCRAGTCTTPXQVTSSQLVSNEIFPPAVXKAMLYPGAIVSSLTKSKAFPSWSDLFDMYNLTEAKNASAVVDLQRLEILAGSYFCVAGGPLGIINPGRMTLFGTRLAIGGLVKEAPWGQPVPSDPPESTYVDPTILIARXCAFTARTPKVKKTAASSPPSLPKPLKSSAKSKLK

SEQ ID NO: 10506 - protein, 269 aa, Zea mays
  misc_feature (192)..(192): Xaa can be any naturally occurring amino acid
  misc_feature (203)..(203): Xaa can be any naturally occurring amino acid
  misc_feature (226)..(226): Xaa can be any naturally occurring amino acid
  Coding DNA Sequence Number=SeqID_4442
  Gene Ontology: Mol. function=translation initiation factor activity; Cellular component=eukaryotic translation initiation factor 2 complex; Biological process=translational initiation
  Homolog annotation: Hit_ID=Q7XHW8; Match level="QueryCoverage=100%, HitCoverage=100%, E-value=7e-85, Identity=64%"; Hit description =Putative translation initiation factor eIF-2 beta chain
  Pfam annotation: Domain name=eIF-5_eIF-2B; Domain location=123-252; Score=131.5; E_value=2.4e-36; Accession=PF01873.8; Description =Domain found in IF2BIF5
MADEEHPERREEASELAPFDPTKKKKKKKVVIQEPSDEVDKLAEKTESLAVAEPAELNFTGMKKKKKKQVDLDSSIDDLGDGEDTQGDQVVEEQGDGIVLGAGPTYPWEGTDRDYKYEELLDRVFNILRENNPDLAGDRRRTVMRPPQVLREGTKKTVFVNFMDLCKTMHRQPEHVMMFLLAEMGTSGSLDXQQRLVIKGSRXEPMMSCRLICLHCLSKRVIASAXSSEAILLNHTGRLIFGSNYNCGSSRSVAPIKAGFVAQVGRRKA

SEQ ID NO: 10507 - protein, 240 aa, Zea mays
  misc_feature (76)..(76): Xaa can be any naturally occurring amino acid
  misc_feature (90)..(90): Xaa can be any naturally occurring amino acid
  misc_feature (101)..(101): Xaa can be any naturally occurring amino acid
  misc_feature (131)..(131): Xaa can be any naturally occurring amino acid
  misc_feature (177)..(177): Xaa can be any naturally occurring amino acid
  misc_feature (199)..(199): Xaa can be any naturally occurring amino acid
  Coding DNA Sequence Number=SeqID_4443
  Homolog annotation: Hit_ID=A2YD96; Match level="QueryCoverage=92%, HitCoverage=26%, E-value=1e-61, Identity=58%"; Hit description =Putative uncharacterized protein
  Pfam annotation: Domain name=CBF; Domain location=9-119; Score=-64.7; E_value=0.031; Accession=PF03914.7; Description=CBFMak21 family
MTTFNSRDHGEVLADALKTLLWEGKPQDMLRVVAFIKHLATFALSFGSAEAITGLVICSHNPISTFCIYLIMLFLXSFIHKYNPKTTDPXYLSGTLSSVLXELSLLEKHYNISVSSMALNILSMANLNPTXSLVPILNVNPLEAYRDLSIERELLKPASKALPLNLKRKRRGKEFVXVSLDVLEKADCSVDKDELGEKXAEHFALRRGISENERLKAELNHTLSSIDMYKEYKKHKKHES

SEQ ID NO: 10508 - protein, 127 aa, Zea mays
  misc_feature (127)..(127): Xaa can be any naturally occurring amino acid
  Coding DNA Sequence Number=SeqID_4444
  Gene Ontology: Mol. function=zinc ion binding; Biological process=RNA- dependent DNA replication
  Homolog annotation: Hit_ID=Q8LNC1; Match level="QueryCoverage=74%, HitCoverage=10%, E-value=3e-30, Identity=61%"; Hit description =Putative transposable element
  Pfam annotation: Domain name=SWIM; Domain location=47-79; Score=32.1; E_value=2e-06; Accession=PF04434.8; Description=SWIM zinc finger
VTVLVEEHTCTSSARRKTTSATSSRAASKAGYFSAQVEDITNTHNRHVVKSYLHECTCLEWQHTGKPCPHALALIITQESVDVELEDFVHEYYSVQRFKNAYKRIIEPLPDRSQWPQVDPPYVVGAX

SEQ ID NO: 10509 - protein, 233 aa, Zea mays
  Coding DNA Sequence Number=SeqID_4445
  Gene Ontology: Mol. function=oxidoreductase activity; Cellular component=integral to membrane; Biological process=electron transport
  Homolog annotation: Hit_ID=Q43257; Match level="QueryCoverage=97%, HitCoverage=42%, E-value=1e-114, Identity=91%"; Hit description =Cytochrome P450 71C4
  Pfam annotation: Domain name=p450; Domain location=1-227; Score= -130.1; E_value=2.7e-06; Accession=PF00067.12; Description=Cytochrome P450
MRGSIQVSLQKEYGLTRDHIKAILIDMFEAGTDTSYMTLEFAMTELIRKPHLMKKLQEEVRRNVPAGQEMVTEDNLPGMTYLKAVIKETLRLHPPVPLLLPHYSLDACEVAGYTIPANTRVVVNAWALGRHSGYWERENEFVPERFLSGDVAGGVDLKPNEFQFLAFGSGRRMCPGGHSASANIEAMLSNLMFRFDWQLPAGMKPEDVDMTEVFGITVSRKEKLLLVPQAASW

SEQ ID NO: 10510 - protein, 83 aa, Zea mays
  Coding DNA Sequence Number=SeqID_4446
CAAARVASFIKHAQLLLRTTIGALLFIMTPAEKRMMCNKINMCGDRVVLVVTLLYNGEQFIFIWRHNRKNMSQEGGGHHGCST

SEQ ID NO: 10511 - protein, 132 aa, Zea mays
  misc_feature (99)..(99): Xaa can be any naturally occurring amino acid
  Coding DNA Sequence Number=SeqID_4448
MIELRRQVLRGQSSQNHEKAKKVLLIVKPHYGFGEKGRPTVGEEGVVMSIILFYIITNELVELLVALVNGGDGMQIAMSGCYAGPMFNTLAGLGTLLLXLIWALVMLPRGDMQPNKILGVGLIALYSNFLFI

SEQ ID NO: 10512 - protein, 148 aa, Zea mays
  Coding DNA Sequence Number=SeqID_4449
  Subcellular localization annotation: CTP_CleavageSite=33; ConfidenceScore=5.29e-01
GLLPIATPTRRTPPARSPRLRSQINRPDPSPPPAAHARPPRLVSNRAPEGSEASIAADPDAPHSGPSGDVGGSGGMIRWGLGGPASHGRHRTPGHRHRQRHRVTPIPPPLFLSISLAPLLLYRRAIPPYARWFSPGFRPCARGWLLKW

SEQ ID NO: 10513 - protein, 186 aa, Zea mays
  Coding DNA Sequence Number=SeqID_4451
  Gene Ontology: Biological process=response to stress
  Homolog annotation: Hit_ID=Q75HQ2; Match level="QueryCoverage=79%, HitCoverage=63%, E-value=1e-22, Identity=46%"; Hit description =Putative uncharacterized protein P0636F09.16
MGISGASCEHFLGQLSSSDSASAPHQLMQREWDCGTGSRRGSRRWSSKKGRARGHRRGGGFCRTEEAARKRVVVVVDQSSGAKHAMMWALTHVANRGDFLTLLHVLPPHSGSGGGGRGAGEEDASALANSLGALCKACKPEVRVRVLTPSLVRSLFLLQRVPEHHSTPLSTVTHFFVSEPELKRQM

SEQ ID NO: 10514 - protein, 90 aa, Zea mays
  Coding DNA Sequence Number=SeqID_4452
  Gene Ontology: Mol. function=protein dimerization activity; Cellular component=nucleus; Biological process=regulation of transcription, DNA-dependent
  Homolog annotation: Hit_ID=Q6AT33; Match level="QueryCoverage=53%, HitCoverage=17%, E-value=1e-17, Identity=85%"; Hit description=Auxin- responsive protein IAA19
ACSSLLRRADTRWALGRLGSLACSGGPHLDPRRPGPGAWLSPGQSGSCKTSRRERLTDGSRADALQDQEYVLTYEDKDADWMLVGDLPWE

SEQ ID NO: 10515 - protein, 147 aa, Zea mays
  misc_feature (130)..(130): Xaa can be any naturally occurring amino acid
  Coding DNA Sequence Number=SeqID_4453
  Gene Ontology: Mol. function=lipid binding; Cellular component =extracellular region; Biological process=lipid transport
  Homolog annotation: Hit_ID=A2YDU2; Match level="QueryCoverage=66%, HitCoverage=65%, E-value=5e-20, Identity=54%"; Hit description=Non -specific lipid-transfer protein
  Pfam annotation: Domain name=Tryp_alpha_amyl; Domain location=48-135; Score=79.0; E_value=1.5e-20; Accession=PF00234.12; Description =Protease inhibitorseed storageLTP f
LAPLTAITRPAISLKEKSAAMKTTSSGIAVVLLVAMLAVHSALADISCSDVLNDLSPCLPFLQGKAAKPSESNNQCCDGVRALYAAADTRPDRQATCRCLKAAYVQVHAVLSAAQELPGDCGLSLSYNIXPDIDCEPESNGRNTRCR

SEQ ID NO: 10516 - protein, 122 aa, Zea mays
  Coding DNA Sequence Number=SeqID_4454
  Gene Ontology: Mol. function=nucleic acid binding
  Homolog annotation: Hit_ID=Q53JL6; Match level="QueryCoverage=100%, HitCoverage=26%, E-value=1e-14, Identity=41%"; Hit description=RNA recognition motif. (A.k.a. RRM, RBD, or RNP domain), putative
MSDRQPSEEPEEQVDLEGDDDGMDDDDAGYRRRGSRDDSEEPEEDDDNDERHGEADDDAGMEPEPAGSKGGDDTGKGPDVAGGGSEDEEERSKWDDMLALPPHGSEVFIGGLSRDITEDDLR

SEQ ID NO: 10517 - protein, 80 aa, Zea mays
  Coding DNA Sequence Number=SeqID_4455
FNPALPCIQSDLLAGQTWGKRLLQLVSLLQHRMTRELCTKYIGASRILETCTTSLSSVCDLLHERGMPFLTQRLTEGESL

SEQ ID NO: 10518 - protein, 185 aa, Zea mays
  Coding DNA Sequence Number=SeqID_4457
  Homolog annotation: Hit_ID=Q2QTA9; Match level="QueryCoverage=61%, HitCoverage=25%, E-value=4e-08, Identity=32%"; Hit description =Putative uncharacterized protein
FVHGGQGSMSFKRHHRHRRNNRRARANLIVVDSAALTNAHRSSIVDMILTQHQESCRRIQDAARRAMQASLERTICQDLNKLLPRVSMSGDDINGEIMRCAEAFAQWLDYQDWVKRNPQRKKYDKQVVNVRASRAGNKRREVALTADCMVKRVGCTTNVSGSHASPMYERHLRTYLKAYLLTALA

SEQ ID NO: 10519 - protein, 130 aa, Zea mays
  Coding DNA Sequence Number=SeqID_4458
  Homolog annotation: Hit_ID=A7QE54; Match level="QueryCoverage=30%, HitCoverage=7%, E-value=1e-08, Identity=65%"; Hit description =Chromosome chr4 scaffold_83, whole genome shotgun sequence
MAAVGRLFQEDVNKLYHLNSAYALSHGSFEAFALRFSMVARTRRRIWSSKPFRARWLNFPVADHLPGWKVLLIHLAGRATLVKSVLTAIPVIVGLAGMNKIISFDNVNGILTCEAGCVLENLSTFVENEG

SEQ ID NO: 10520 - protein, 68 aa, Zea mays
  Coding DNA Sequence Number=SeqID_4459
  Gene Ontology: Mol. function=phosphoglycerate kinase activity; Cellular component=cytoplasm; Biological process=glycolysis
  Homolog annotation: Hit_ID=P12783; Match level="QueryCoverage=80%, HitCoverage=13%, E-value=6e-21, Identity=85%"; Hit description =Phosphoglycerate kinase, cytosolic
MLRARFVYLHINTSDGTSEIVPATAIPDDWMGLDVGPDATKTFNEALDTTKTVIWNGPMGVFEFEKFA

SEQ ID NO: 10521 - protein, 184 aa, Zea mays
  misc_feature (157)..(157): Xaa can be any naturally occurring amino acid
  Coding DNA Sequence Number=SeqID_4460
  Gene Ontology: Mol. function=protein transporter activity; Cellular component=clathrin coat of trans-Golgi network vesicle; Biological process=intracellular protein transport
  Homolog annotation: Hit_ID=A2ZH90; Match level="QueryCoverage=100%, HitCoverage=11%, E-value=1e-92, Identity=92%"; Hit description =Putative uncharacterized protein
  Pfam annotation: Domain name=Clathrin; Domain location=1-122; Score =26.1; E_value=2.5e-05; Accession=PF00637.10; Description=Region in Clathrin and VPS
MERKTTAFLLDVLKPNLPEHAFLQTKVLEINLVAYPNVADAILANGMFSHYDRPRIAQLCEKAGLYLRALQHYSELPDIKRVIVNTHAIEPQALVEFFGTLSREWALECMKDLLLVNLRGNLQIVVQAAKEYSEQLGVDACIKLFEQFKSYEGPTAXVYFFLGSYLSSSEDPDIHFKYIEAAAR

SEQ ID NO: 10522 - protein, 71 aa, Zea mays
  Coding DNA Sequence Number=SeqID_4461
  Gene Ontology: Mol. function=serine-type endopeptidase inhibitor activity; Cellular component=extracellular region; Biological process=response to wounding
  Homolog annotation: Hit_ID=Q6E658; Match level="QueryCoverage=100%, HitCoverage=100%, E-value=3e-24, Identity=77%"; Hit description=MPI
  Pfam annotation: Domain name=potato_inhibit; Domain location=12-71; Score=102.2; E_value=1.6e-27; Accession=PF00280.8; Description =Potato inhibitor I family
MSSTGGGDDGAKKSWPEVVGLSLEEAKRVILCDKPDADIVVLPVGTPVTMDFRPNRVRIFVDTVAEAPHIG

SEQ ID NO: 10523 - protein, 112 aa, Zea mays
  Coding DNA Sequence Number=SeqID_4462
FGYEEGRRPRHVDAVRDGSRFGEAGEVGGRVGQAPALRAEVARDREAVGEGGRGFRRRRTREVEGVGSGGHGCRCGGEASQSRRRCADRRGSGFGSVLCTNVGGAGVQHACI

SEQ ID NO: 10524 - protein, 109 aa, Zea mays
  Coding DNA Sequence Number=SeqID_4464
  Gene Ontology: Mol. function=calmodulin binding
  Homolog annotation: Hit_ID=A2WV45; Match level="QueryCoverage=62%, HitCoverage=33%, E-value=1e-19, Identity=63%"; Hit description =Putative uncharacterized protein
RDLVPLLLCLLLLAGAADAAPLLVGVFPKGTSACPEGKFYCRNIGDTPRLLFSAFANDKICDWGDGSEEGECGFHCQNTCRSVMDTAEADGGGGDLAVTQVESADDFMS

SEQ ID NO: 10525 - protein, 153 aa, Zea mays
  Coding DNA Sequence Number=SeqID_4465
  Subcellular localization annotation: CTP_CleavageSite=50; ConfidenceScore=5.52e-01
PSPAPFVLLRSASFQLRRRPPSKLAKHPPLLGQGAVPLRTRRGRCLSCPSATSTPKLHSMAAPPLHGFFQLELAVVPGECPSSSPSSLARHGTAPLSNPVSSTPWRLSKLAGEVCRYPLVLARPALVHGCCHTELPPPAIPLLRPSSRSRLCS

SEQ ID NO: 10526 - protein, 111 aa, Zea mays
  Coding DNA Sequence Number=SeqID_4467
  Subcellular localization annotation: CTP_CleavageSite=41; ConfidenceScore=5.53e-01
LKKRHHHLWNLRQRLGSTSTSASPSLTHLLTKRTIWLRSPRSSQEKPLSSSRLVEVVNIATTAQEKMKPWKETSRSSKITTSSRRGLAATPSRLPVKAAAIYVSFPHFDLL

SEQ ID NO: 10527 - protein, 92 aa, Zea mays
  Coding DNA Sequence Number=SeqID_4469
  Gene Ontology: Mol. function=serine-type endopeptidase activity; Cellular component=integral to membrane
  Homolog annotation: Hit_ID=Q10SN4; Match level="QueryCoverage=100%, HitCoverage=29%, E-value=6e-34, Identity=76%"; Hit description =Membrane protein, putative, expressed
MATRADVEKGGPARKEPGKVPSPLYPQHEGEREWVPWLVPVIFVASITVFVVTMYANNCPARRDAKCVARFLGRFSFQPLRQNPLLGPSSAT

SEQ ID NO: 10528 - protein, 67 aa, Zea mays
  Coding DNA Sequence Number=SeqID_4470
  Gene Ontology: Mol. function=peptidase activity; Cellular component =membrane; Biological process=signal peptide processing
  Homolog annotation: Hit_ID=A3BAL3; Match level="QueryCoverage=85%, HitCoverage=27%, E-value=5e-25, Identity=92%"; Hit description =Putative uncharacterized protein
MPARVVILTKGDNNFGDDRLLYAHGQLWLQQHHIMGRAVGYLPYVGWVTIIMTEKPFIKVCSFLSKY

SEQ ID NO: 10529 - protein, 145 aa, Zea mays
  Coding DNA Sequence Number=SeqID_4471
  Gene Ontology: Mol. function=nucleoside-triphosphatase activity; Cellular component=integral to membrane; Biological process=transport
  Homolog annotation: Hit_ID=A2ZV99; Match level="QueryCoverage=96%, HitCoverage=10%, E-value=4e-52, Identity=72%"; Hit description =Putative uncharacterized protein
  Pfam annotation: Domain name=ABC2_membrane; Domain location=1-145; Score=24.8; E_value=0.00024; Accession=PF01061.14; Description=ABC-2 type transporter
  Subcellular localization annotation: CTP_CleavageSite=32; ConfidenceScore=5.12e-01
MFFFPLMARVGSMYSAVLFIGVMNCTSVQPVVAVERTVFYRQRAAGMYSAFPYAFGQVVIELPYALAQDILYAVIVYSMIGFEWTVAKFFWYLFFGYFTLLYFTFYGMMTVGLTPNYHIAAIVSAAFYAIWNLFSGFVIPRPKVP

SEQ ID NO: 10530 - protein, 111 aa, Zea mays
  misc_feature (30)..(30): Xaa can be any naturally occurring amino acid
  Coding DNA Sequence Number=SeqID_4472
  Gene Ontology: Mol. function=phosphotransferase activity, alcohol group as acceptor; Cellular component=cytoplasm; Biological process =metabolic process
  Homolog annotation: Hit_ID=Q6YX79; Match level="QueryCoverage=96%, HitCoverage=10%, E-value=5e-46, Identity=82%"; Hit description=GHMP kinase-like protein
MFQCHYSYNACGLGSDGTDRLVNLVQEIRXRKSSRAGGPSLFGAKITGGGSGGSVCVMGKNCLKSSEEILEIQKRYKAATGYLPTVFDGSSPGAGKFGYLKIRRRSTSPSD

SEQ ID NO: 10531 - protein, 180 aa, Zea mays
  Coding DNA Sequence Number=SeqID_4473
  Gene Ontology: Mol. function=hydrolase activity, hydrolyzing O -glycosyl compounds; Cellular component=cell wall; Biological process= carbohydrate metabolic process
  Homolog annotation: Hit_ID=A9NNJ5; Match level="QueryCoverage=43%, HitCoverage=26%, E-value=4e-14, Identity=45%"; Hit description =Putative uncharacterized protein
  Pfam annotation: Domain name=Glyco_hydro_16; Domain location=40-165; Score=-64.0; E_value=0.0084; Accession=PF00722.11; Description =Glycosyl hydrolases family 16
MALRNGGGGGGACPAAVVLVAAAVAALLGARGGRRRATKFDHVVQPSWANDHVVYDGDLLKLRLDSSSGGGFVSRTKFLYGKASADLKLCAGGLPPASSLGVYLTAGRGDMHHQFDFAVHWASDHNGPASSVPTSTEPPSHGEPCRLLAGAAACIQPTCSGERSCKPATTTASTVFANAQ

SEQ ID NO: 10532 - protein, 116 aa, Zea mays
  Coding DNA Sequence Number=SeqID_4474
KKLPSRGGKRKRERGEVRAGEMDRLEERNIKKGEREMEEARKEEERKEEAGDRNTQEPQQGQGLSLSLANGSDSGRSAMLPSERLRPSLALADITCQHSVSGLPVCAAKKKKKKKK

SEQ ID NO: 10533 - protein, 199 aa, Zea mays
  Coding DNA Sequence Number=SeqID_4476
  Gene Ontology: Mol. function=nucleic acid binding; Cellular component= ribonucleoprotein complex; Biological process=positive regulation of growth rate
  Homolog annotation: Hit_ID=Q7XDI5; Match level="QueryCoverage=69%, HitCoverage=38%, E-value=6e-33, Identity=53%"; Hit description=RNA recognition motif family protein, expressed
  Pfam annotation: Domain name=GRP; Domain location=24-73; Score=-27.1; E_value=0.047; Accession=PF07172.2; Description=Glycine rich protein family
  Pfam annotation: Domain name=RRM_1; Domain location=79-150; Score =72.5; E_value=1.4e-18; Accession=PF00076.12; Description=RNA recognition motif. (a.k.a. RRM, RBD, or
  Pfam module annotation: Pfam domain module=GRP::RRM_1; Domain location=24-73::79-150
  Subcellular localization annotation: CTP_CleavageSite=10; ConfidenceScore=5.05e-01
NQRRIFALVVFSSAPPSGLDQDFSRFAVLLLPQVDVKRALSREEQQASKAANPSGGRNSGGGGGGGGGSDASGARTKKIFVGGLPSTLTEDGFRQYFETFGIVTDVVVMYDQNTQRPRGFGFITFDSEDAVDRVLQGPRSIHTSSRAQMLQQRLLRQGRGHQPGGDELPGGGLPVRRRLRPQRGAGDVRRLLRRAAVGA

SEQ ID NO: 10534 - protein, 145 aa, Zea mays
  Coding DNA Sequence Number=SeqID_4477
  Gene Ontology: Mol. function=endoribonuclease activity; Cellular component=cytoplasm; Biological process=response to stress
  Homolog annotation: Hit_ID=P93641; Match level="QueryCoverage=93%, HitCoverage=50%, E-value=6e-47, Identity=64%"; Hit description=S -like RNase
  Pfam annotation: Domain name=Ribonuclease_T2; Domain location=1-124; Score=-83.2; E_value=0.048; Accession=PF00445.9; Description =Ribonuclease T2 family
  Subcellular localization annotation: CTP_CleavageSite=58; ConfidenceScore=5.20e-01
KPGRTTPVRWSTIRCPSTIWQSSWLTPGRRAGPCSGLRGKDYFRTALSFRGRFNQLVRLKAKGLGPDLGLYGLKATTRVLKGGLNPTPVFQGSRGPFARSLLFQFYFCAGGNGPLMDCPGPKKSTCSRGILFHPFKKGLLKQQFN

SEQ ID NO: 10535 - protein, 255 aa, Zea mays
  misc_feature (1)..(1): Xaa can be any naturally occurring amino acid
  misc_feature (185)..(185): Xaa can be any naturally occurring amino acid
  Coding DNA Sequence Number=SeqID_4478
  Homolog annotation: Hit_ID=A2ZA05; Match level="QueryCoverage=88%, HitCoverage=24%, E-value=1e-40, Identity=46%"; Hit description =Putative uncharacterized protein
XVFYEEARRHLSEMLKGNDCSINYPEVQISKSLEGILSLPHGNVSTTGSSLRGKDYLDPSPGETDVYDACEVQREECTQERSQSQEDFGSIAHCTCTTVDDQVTLREGYYTNEAQEGPRHAHDEPDTLYIEGLDKFICGENIRNEESSPAEQSRDDICQEILEEINQGKEHVKMSLASVEGIDKXLGQQEPETPEPRASAKLISDVSPNRSDEKQERCSPVSDLESSCIRVGRPDGIRDAIIPALKHRIPSELRS

SEQ ID NO: 10536 - protein, 76 aa, Zea mays
  Coding DNA Sequence Number=SeqID_4479
SVPEQFENDREKTVFETGRYGNFPSRFHPCSPLLILHPIPNMGSSATAERRLRAAVASHYIKPFLIKNKFNIEVSI

SEQ ID NO: 10537 - protein, 153 aa, Zea mays
  Coding DNA Sequence Number=SeqID_4481
  Subcellular localization annotation: CTP_CleavageSite=39; ConfidenceScore=5.52e-01
KKARSPSLIRSLPKSQTLTASLVSSVLPRHGHGQVQPPTAAAASSLRFLSTLLAQVPQQGLLQDLQAVVFRLSRSRSRLHHASAFPAAAGSPPTSSSPAAAAGLLRPCRPPASPAPRVQHRQVRLPRRRAEAHRLAVPPPAAAASAHSRHRSP

SEQ ID NO: 10538 - protein, 85 aa, Zea mays
  misc_feature (1)..(16): Xaa can be any naturally occurring amino acid
  Coding DNA Sequence Number=SeqID_4483
  Homolog annotation: Hit_ID=A2X241; Match level="QueryCoverage=57%, HitCoverage=14%, E-value=6e-08, Identity=59%"; Hit description =Putative uncharacterized protein
XXXXXXXXXXXXXXXXPLVLRPMVGLMLAGMGGSIDVFRMRPIAPVDLYRSIRDSQLIGLSGYTKEFSIGKLICRMKIALKRLKC

SEQ ID NO: 10539 - protein, 85 aa, Zea mays
  misc_feature (50)..(50): Xaa can be any naturally occurring amino acid
  Coding DNA Sequence Number=SeqID_4484
  Homolog annotation: Hit_ID=Q9ATL1; Match level="QueryCoverage=83%, HitCoverage=24%, E-value=7e-17, Identity=67%"; Hit description=Gag protein
HPAPQEPQSPEAERDTGGQAPARVRTSQSAADDTRRRAEGPRTSSRRSRXMQREGHLGLQHGPPLQQRAQLEDTREGHLGLQHGP

SEQ ID NO: 10540 - protein, 99 aa, Zea mays
  misc_feature (40)..(40): Xaa can be any naturally occurring amino acid
  misc_feature (76)..(76): Xaa can be any naturally occurring amino acid
  misc_feature (87)..(87): Xaa can be any naturally occurring amino acid
  Coding DNA Sequence Number=SeqID_4485
  Homolog annotation: Hit_ID=Q9FIJ2; Match level="QueryCoverage=77%, HitCoverage=78%, E-value=8e-16, Identity=55%"; Hit description=NADH dehydrogenase 10.5K chain-like protein
  Pfam annotation: Domain name=L51_S25_CI-B8; Domain location=19-93; Score=36.7; E_value=8.4e-08; Accession=PF05047.6; Description =Mitochondrial ribosomal protein L51  S25  CI-B8 domain
MTGPPGHFPLTHSDGLASQLSRSAPPPVEIVKNNYGDIKXRNPSLPFLVRECSGGQPQLWARYHMAAERCVNLDGXLTEAQIDKKMXELAKAAESLKTK

SEQ ID NO: 10541 - protein, 148 aa, Zea mays
  misc_feature (135)..(135): Xaa can be any naturally occurring amino acid
  Coding DNA Sequence Number=SeqID_4486
  Homolog annotation: Hit_ID=Q10N42; Match level="QueryCoverage=51%, HitCoverage=43%, E-value=3e-16, Identity=66%"; Hit description =Expressed protein
  Subcellular localization annotation: CTP_CleavageSite=40; ConfidenceScore=5.21e-01
WHLRSSKTADTAAPPPEVAATGEAAPGAASSTPAQNPNAAATAVAGATDLETMMRRAERFGTPVLVPQEHLRSSRAERFPTGSSSVKEEENKKSRAERFGLASPSSSDEEAKKKARLERFGQSAMSTRSKKKKKXARSFFFFFTQEKY

SEQ ID NO: 10542 - protein, 113 aa, Zea mays
  Coding DNA Sequence Number=SeqID_4487
  Gene Ontology: Mol. function=nucleic acid binding; Biological process= transcription
  Homolog annotation: Hit_ID=Q9FNZ2; Match level="QueryCoverage=88%, HitCoverage=23%, E-value=2e-31, Identity=63%"; Hit description=Zfwd1 protein
SAREFLLSCSLDQTIKVWAATESGNLEVTYTHKEDQGALALSGMPDAQSKPVLLCSLNDNTDDLYDQPSFTDRGTLSSTKEIRARHMVPGALIITGGGSGELKARRGVEGAEA

SEQ ID NO: 10543 - protein, 131 aa, Zea mays
  Coding DNA Sequence Number=SeqID_4488
  Homolog annotation: Hit_ID=UPI0000D9CB58; Match level="QueryCoverage =79%, HitCoverage=96%, E-value=1e-20, Identity=55%"; Hit description =PREDICTED: similar to involucrin, partial
MRSVRDHLWEDSNLNPLLVMGTRMMALSRDHPNKEASSNKVHHLLRESHKDHPNREAIPLLLKEGHKDHPNREAIPVLLEEGHKDHPNREAISKVLPHLLLESPRDHPPQGGPPHKDLHRGQSSLSNLGFT

SEQ ID NO: 10544 - protein, 130 aa, Zea mays
  misc_feature (48)..(48): Xaa can be any naturally occurring amino acid
  Coding DNA Sequence Number=SeqID_4489
  Gene Ontology: Mol. function=aspartic-type endopeptidase activity; Cellular component=chromatin; Biological process=chromatin assembly or disassembly
  Homolog annotation: Hit_ID=Q2QLN6; Match level="QueryCoverage=79%, HitCoverage=6%, E-value=4e-31, Identity=58%"; Hit description =Retrotransposon protein, putative, unclassified
VHKAGVKRKVSFYVFRQVISSEILLVAISNPRLLQILPIPNQAWQVVXLNFIEGLPRSGTTNCILVVVDTFSKYAHFIGLLHPFTAVKVPQDFMANVYKLRGPHALVSDRDRIFTSHIWQELFRLSGIKL

SEQ ID NO: 10545 - protein, 99 aa, Zea mays
  Coding DNA Sequence Number=SeqID_4490
  Homolog annotation: Hit_ID=A7PVN9; Match level="QueryCoverage=80%, HitCoverage=12%, E-value=3e-08, Identity=40%"; Hit description =Chromosome chr9 scaffold_33, whole genome shotgun sequence
GTSIGRVLSMLSLLLNLLTANYSGAGISNYSMLMDVILPSGIRPRPRRLCGPLVPRDHLHPFSKPTKPYAAPSKHNGFTYTKIYGGFEKIQSTICDLVA

SEQ ID NO: 10546 - protein, 166 aa, Zea mays
  misc_feature (68)..(68): Xaa can be any naturally occurring amino acid
  misc_feature (83)..(83): Xaa can be any naturally occurring amino acid
  misc_feature (85)..(85): Xaa can be any naturally occurring amino acid
  misc_feature (106)..(106): Xaa can be any naturally occurring amino acid
  misc_feature (114)..(114): Xaa can be any naturally occurring amino acid
  misc_feature (116)..(116): Xaa can be any naturally occurring amino acid
  misc_feature (133)..(133): Xaa can be any naturally occurring amino acid
  misc_feature (136)..(138): Xaa can be any naturally occurring amino acid
  misc_feature (142)..(143): Xaa can be any naturally occurring amino acid
  misc_feature (150)..(150): Xaa can be any naturally occurring amino acid
  misc_feature (153)..(153): Xaa can be any naturally occurring amino acid
  misc_feature (155)..(155): Xaa can be any naturally occurring amino acid
  misc_feature (161)..(161): Xaa can be any naturally occurring amino acid
  misc_feature (164)..(166): Xaa can be any naturally occurring amino acid
  Coding DNA Sequence Number=SeqID_4491
DHRRVAQSIIAVSLLREQRKRARRAVAMSGIIHKIEEKFHMGGDHKNKEEDTTRKAEEPPQGREEGEXHKKGTAGGHKGRLPXEXDQGQESPARPGEKSPATTKGXKKDKKKKXPXGEGTTPRRAATVAAERXRLXXXFGCXXHRCNTMXGWXGXGEDSYXLWXXX

SEQ ID NO: 10547 - protein, 267 aa, Zea mays
  misc_feature (1)..(105): Xaa can be any naturally occurring amino acid
  misc_feature (213)..(213): Xaa can be any naturally occurring amino acid
  Coding DNA Sequence Number=SeqID_4493
XXXXXXXXXXXXXXXXXXXXXXXXXXXXXXXXXXXXXXXXXXXXXXXXXXXXXXXXXXXXXXXXXXXXXXXXXXXXXXXXXXXXXXXXXXXXXXXXXXXXXXXXXPTRTRRPWRSPPADRRSTRRTSYPRRPIPRRHLHLNSVARGAARRSPGCARMLAANIAGRDRHVGNRSADHGYALRPRRTRRNGGVVHWSASHVRLHACCLLASSPAXWTPTLSAAAGGEKRDAQTRVPATTVSRQELPRSIVLTGALERISLSLPPRAGTH

SEQ ID NO: 10548 - protein, 163 aa, Zea mays
  misc_feature (1)..(2): Xaa can be any naturally occurring amino acid
  misc_feature (10)..(11): Xaa can be any naturally occurring amino acid
  misc_feature (14)..(14): Xaa can be any naturally occurring amino acid
  misc_feature (16)..(25): Xaa can be any naturally occurring amino acid
  misc_feature (27)..(27): Xaa can be any naturally occurring amino acid
  misc_feature (29)..(30): Xaa can be any naturally occurring amino acid
  misc_feature (32)..(33): Xaa can be any naturally occurring amino acid
  misc_feature (35)..(35): Xaa can be any naturally occurring amino acid
  misc_feature (37)..(49): Xaa can be any naturally occurring amino acid
  misc_feature (51)..(51): Xaa can be any naturally occurring amino acid
  misc_feature (53)..(55): Xaa can be any naturally occurring amino acid
  misc_feature (57)..(60): Xaa can be any naturally occurring amino acid
  misc_feature (62)..(63): Xaa can be any naturally occurring amino acid
  misc_feature (65)..(65): Xaa can be any naturally occurring amino acid
  misc_feature (68)..(72): Xaa can be any naturally occurring amino acid
  misc_feature (75)..(77): Xaa can be any naturally occurring amino acid
  misc_feature (80)..(80): Xaa can be any naturally occurring amino acid
  misc_feature (82)..(88): Xaa can be any naturally occurring amino acid
  misc_feature (90)..(91): Xaa can be any naturally occurring amino acid
  misc_feature (93)..(93): Xaa can be any naturally occurring amino acid
  misc_feature (95)..(96): Xaa can be any naturally occurring amino acid
  misc_feature (98)..(98): Xaa can be any naturally occurring amino acid
  misc_feature (100)..(100): Xaa can be any naturally occurring amino acid
  misc_feature (104)..(105): Xaa can be any naturally occurring amino acid
  misc_feature (133)..(133): Xaa can be any naturally occurring amino acid
  misc_feature (138)..(139): Xaa can be any naturally occurring amino acid
  misc_feature (142)..(142): Xaa can be any naturally occurring amino acid
  misc_feature (149)..(149): Xaa can be any naturally occurring amino acid
  misc_feature (152)..(154): Xaa can be any naturally occurring amino acid
  misc_feature (158)..(159): Xaa can be any naturally occurring amino acid
  misc_feature (162)..(163): Xaa can be any naturally occurring amino acid
  Coding DNA Sequence Number=SeqID_4494
XXEEEGQGEXXGEXNXXXXXXXXXXTXNXXDXXAXEXXXXXXXXXXXXXRXRXXXEXXXXNXXGXGRXXXXXEIXXXIQXKXXXXXXXGXXSXMXXLXVXASSXXTVVLEVVVTVVTLETCSIKVTDTKRMVXHNNNXXTLXIVLCCLXFYXXXSFWXXFGXX

SEQ ID NO: 10549 - protein, 166 aa, Zea mays
  misc_feature (68)..(68): Xaa can be any naturally occurring amino acid
  misc_feature (103)..(103): Xaa can be any naturally occurring amino acid
  misc_feature (107)..(109): Xaa can be any naturally occurring amino acid
  misc_feature (111)..(111): Xaa can be any naturally occurring amino acid
  misc_feature (117)..(166): Xaa can be any naturally occurring amino acid
  Coding DNA Sequence Number=SeqID_4496
LSRRHFPPDPLAQNRSARRRRCELPIFLRQPWRPRSERRRSSSADGVFYAELNEMLTREARGGRLLRXVGGARHTEAARRSSSAPRATQNVFGREGAAGIREXTSVXXXRXSTSPRXXXXXXXXXXXXXXXXXXXXXXXXXXXXXXXXXXXXXXXXXXXXXXXXXX

SEQ ID NO: 10550 - protein, 76 aa, Zea mays
  Coding DNA Sequence Number=SeqID_4498
TQATGDMPATSAKTFSSLSMTTITSIQPYGYTESLLLMLKQPQLRSMKSNYVLHHSHQHRFPALYAILPLRELPLT

SEQ ID NO: 10551 - protein, 199 aa, Zea mays
  misc_feature (143)..(143): Xaa can be any naturally occurring amino acid
  Coding DNA Sequence Number=SeqID_4500
  Gene Ontology: Mol. function=hydrolase activity; Cellular component =nucleus; Biological process=metabolic process
  Homolog annotation: Hit_ID=A3B9M5; Match level="QueryCoverage=61%, HitCoverage=15%, E-value=2e-33, Identity=56%"; Hit description =Putative uncharacterized protein
  Pfam annotation: Domain name=Abhydrolase_3; Domain location=45-199; Score=1.3; E_value=1.4e-07; Accession=PF07859.3; Description =alphabeta hydrolase fold
MDCALNPAWLLEVVGQYRRWPHADLRHGIQLLNRTAGGSGKASIGGMLSSGLYLNDLVARSGAIDVSVYYRLASEHKLPAAYDDAWAALRWAVTLGEDLWLLEHADLSGVFLVGCSAGANIVHDTARASLRRRRGHPRARLSXPYFTGREAMGGETVFGPEIRSSMDRTWRDDVRGRRGAQGLRACWQPEYRGLCRWPF

SEQ ID NO: 10552 - protein, 152 aa, Zea mays
  misc_feature (14)..(14): Xaa can be any naturally occurring amino acid
  misc_feature (18)..(18): Xaa can be any naturally occurring amino acid
  misc_feature (20)..(21): Xaa can be any naturally occurring amino acid
  misc_feature (24)..(24): Xaa can be any naturally occurring amino acid
  misc_feature (30)..(30): Xaa can be any naturally occurring amino acid
  misc_feature (32)..(32): Xaa can be any naturally occurring amino acid
  misc_feature (34)..(34): Xaa can be any naturally occurring amino acid
  misc_feature (37)..(37): Xaa can be any naturally occurring amino acid
  misc_feature (40)..(40): Xaa can be any naturally occurring amino acid
  misc_feature (43)..(43): Xaa can be any naturally occurring amino acid
  misc_feature (47)..(47): Xaa can be any naturally occurring amino acid
  misc_feature (49)..(49): Xaa can be any naturally occurring amino acid
  misc_feature (86)..(87): Xaa can be any naturally occurring amino acid
  misc_feature (102)..(102): Xaa can be any naturally occurring amino acid
  misc_feature (112)..(112): Xaa can be any naturally occurring amino acid
  misc_feature (118)..(118): Xaa can be any naturally occurring amino acid
  misc_feature (121)..(121): Xaa can be any naturally occurring amino acid
  misc_feature (132)..(132): Xaa can be any naturally occurring amino acid
  misc_feature (142)..(142): Xaa can be any naturally occurring amino acid
  misc_feature (149)..(149): Xaa can be any naturally occurring amino acid
  Coding DNA Sequence Number=SeqID_4501
  Gene Ontology: Mol. function=methyltransferase activity; Cellular component=mitochondrion; Biological process=ribosome biogenesis and assembly
  Homolog annotation: Hit_ID=A7F734; Match level="QueryCoverage=93%, HitCoverage=23%, E-value=3e-35, Identity=57%"; Hit description =Putative uncharacterized protein
NPNSFFDLRVSGLXTITXSXXFTXSMGHWXSXPXSIXCGXHNXSLNXLXPERCTFIAPDAGDLFKSVEYPADETVVVLDPPRKGCXXDFLDQLRRFGPRRVXYVSCNVHTQXRDVGVXVRXEGEGRRYEIEXLRGFDFFPQXGHVEGVXILS

SEQ ID NO: 10553 - protein, 142 aa, Zea mays
  misc_feature (1)..(5): Xaa can be any naturally occurring amino acid
  misc_feature (8)..(11): Xaa can be any naturally occurring amino acid
  misc_feature (13)..(13): Xaa can be any naturally occurring amino acid
  misc_feature (16)..(16): Xaa can be any naturally occurring amino acid
  misc_feature (18)..(18): Xaa can be any naturally occurring amino acid
  misc_feature (21)..(21): Xaa can be any naturally occurring amino acid
  misc_feature (23)..(23): Xaa can be any naturally occurring amino acid
  misc_feature (26)..(26): Xaa can be any naturally occurring amino acid
  misc_feature (28)..(28): Xaa can be any naturally occurring amino acid
  misc_feature (31)..(34): Xaa can be any naturally occurring amino acid
  misc_feature (38)..(38): Xaa can be any naturally occurring amino acid
  misc_feature (41)..(41): Xaa can be any naturally occurring amino acid
  misc_feature (43)..(44): Xaa can be any naturally occurring amino acid
  misc_feature (46)..(46): Xaa can be any naturally occurring amino acid
  misc_feature (48)..(50): Xaa can be any naturally occurring amino acid
  misc_feature (56)..(56): Xaa can be any naturally occurring amino acid
  misc_feature (60)..(60): Xaa can be any naturally occurring amino acid
  misc_feature (63)..(64): Xaa can be any naturally occurring amino acid
  misc_feature (66)..(66): Xaa can be any naturally occurring amino acid
  misc_feature (69)..(69): Xaa can be any naturally occurring amino acid
  misc_feature (73)..(73): Xaa can be any naturally occurring amino acid
  misc_feature (78)..(78): Xaa can be any naturally occurring amino acid
  misc_feature (84)..(84): Xaa can be any naturally occurring amino acid
  misc_feature (88)..(88): Xaa can be any naturally occurring amino acid
  misc_feature (99)..(100): Xaa can be any naturally occurring amino acid
  misc_feature (102)..(102): Xaa can be any naturally occurring amino acid
  misc_feature (107)..(108): Xaa can be any naturally occurring amino acid
  misc_feature (113)..(113): Xaa can be any naturally occurring amino acid
  misc_feature (117)..(117): Xaa can be any naturally occurring amino acid
  Coding DNA Sequence Number=SeqID_4502
XXXXXGSXXXXGXGGXSXEEXGXEEXGXGEXXXXIGDXKTXGXXAXQXXXFRTTPXSGPXPFXXAXPTXFPDXTGKEXEEGEGXGRGXPPLMAPGAVAXXPXLSQSXXQDPMXAAAXRCVTGLRLPCDAHVFMTLLFRDVNL

SEQ ID NO: 10554 - protein, 89 aa, Zea mays
  Coding DNA Sequence Number=SeqID_4504
TLLLIIFIPLGGVVLLTFGPHSRAGRAGLIAVATGAPPVGAPIAGVAIPTPPLGGPLKTPGAGLGGRPKEDHGFYSVGGGGLHVRGHAF

SEQ ID NO: 10555 - protein, 84 aa, Zea mays
  misc_feature (1)..(1): Xaa can be any naturally occurring amino acid
  misc_feature (9)..(9): Xaa can be any naturally occurring amino acid
  misc_feature (25)..(25): Xaa can be any naturally occurring amino acid
  misc_feature (35)..(35): Xaa can be any naturally occurring amino acid
  misc_feature (54)..(56): Xaa can be any naturally occurring amino acid
  misc_feature (59)..(59): Xaa can be any naturally occurring amino acid
  Coding DNA Sequence Number=SeqID_4506
XLSTFSERXQRKPERRPLKSLKISXTVRGLEDSAXIDIVTEEAKRNKITSIVRXXXSRXISGVRDGLRSASMVSKIRCARTREI

SEQ ID NO: 10556 - protein, 483 aa, Zea mays
  misc_feature (331)..(332): Xaa can be any naturally occurring amino acid
  misc_feature (379)..(379): Xaa can be any naturally occurring amino acid
  misc_feature (393)..(393): Xaa can be any naturally occurring amino acid
  misc_feature (416)..(416): Xaa can be any naturally occurring amino acid
  Coding DNA Sequence Number=SeqID_4507
  Gene Ontology: Mol. function=drug transporter activity; Cellular component=membrane; Biological process=multidrug transport
  Homolog annotation: Hit_ID=Q10HX0; Match level="QueryCoverage=75%, HitCoverage=73%, E-value=1e-150, Identity=74%"; Hit description=MATE efflux family protein, expressed
  Pfam annotation: Domain name=MatE; Domain location=292-443; Score =71.8; E_value=2.2e-18; Accession=PF01554.9; Description=MatE
  Pfam annotation: Domain name=MatE; Domain location=71-231; Score =150.0; E_value=6.8e-42; Accession=PF01554.9; Description=MatE
  Pfam module annotation: Pfam domain module=MatE::MatE; Domain location=292-443::71-231
MMSSTGGESKLESPLLGLPAPGSSAGSGHSHGEAVSGQLESILSDASLPWRRRMLSASMVEMRLLVRLAAPAVLVYMINYLMSMSTQIFSGHLGTLELAAASLGNTGIQVFAYGLMLGMGSAVETLCGQAYGAHKYDMLGIYLQRSTILLMATGVPLTVLYAFSRPILVLLGESPEIASAAAVFVYGLIPQIFAYAANFPIQKFMQAQSIMAPSAYISAATLAVHLALSWVVVYKVGLGLLGASLVLSLSWWLLVAAQFAYIVMSPRCRHTWTGFTWQAFSGLWDFLKLSAASAVMLCLETWYYQVLVLIAGLLPNPELALDALSVCMTVXXWVFMIAVGFNAAASVRVSNELGAGHPKSAYFSVWVVTALSTLISIMXALVLCLRNYISYLXTEGEVVSNAVADLCPLLLLTLVXPAGVLRCFKFRFGIKGLWGGMIGGTLIQTLALIWITLRTDWNKEVEEARKRLDKWDDTRQPLLASKE

SEQ ID NO: 10557 - protein, 638 aa, Zea mays
  misc_feature (35)..(35): Xaa can be any naturally occurring amino acid
  misc_feature (367)..(367): Xaa can be any naturally occurring amino acid
  misc_feature (457)..(457): Xaa can be any naturally occurring amino acid
  Coding DNA Sequence Number=SeqID_4508
  Gene Ontology: Mol. function=aspartic-type endopeptidase activity; Cellular component=chromatin; Biological process=DNA integration
  Homolog annotation: Hit_ID=Q2QSG2; Match level="QueryCoverage=81%, HitCoverage=32%, E-value=1e-131, Identity=48%"; Hit description =Retrotransposon protein, putative, Ty1-copia subclass
  Pfam annotation: Domain name=RVT_2; Domain location=369-584; Score =185.4; E_value=1.4e-52; Accession=PF07727.4; Description=Reverse transcriptase (RNA-dependent
  Subcellular localization annotation: CTP_CleavageSite=47; ConfidenceScore=5.20e-01
RTGREFDNHASRSFFLTSGIQLRLSCPYTSTQNGXQRMIRTTTNMIRCLLFQANLPASYWAEALHTATHLLNRLPSKAVSHPTPYFALYGTAPTYDHLRVFGCACYPNTSATAPHKLSPRSTRCLFLGYSFDHKGYRCLDLASHRIIISRHVVFDEDVFPLAGPPHPPTSTPSSSPIRLPLLPGAPPCAVTRTPCGLDAAARAYSRATRGPVDHACATRGLVDHACASRGPPTPLAPCAALLTPTTRFADPALVYYRRRHVTTSAPADPGPSTSPVRFADPAVYHRRESATPAAPDVPADRPEPPVYHPVAIHRDPGHVHPMVTRRAAGVLQPNSARVLAADTTTTPPDASPVPSSVRTALADPHWXRAMEEEYAALLANHTWDLVPCPLGTNVVTGKWLFRYKLTSNGSLDRYKARWVLQGFTQHPGVDYDETFSPVVKFAIVRTVLSLALSWDWXIHQLNVKNAFLHGTLTKTVYCSQLTGFVDEAHPDLVCRLNRSLYGLKQAPRAWYSRFASDIKFTGFGAGVSSIFPQAPASCRRPNQPTSWPPPLPRRFSAAPPRTTVSYYLSSLTSTAPFRNPRPHGSHPNTASSPPANQPAIPPRNRRLLLTRRSYGASYPPRTPPSDPAACRRPRGMPL

SEQ ID NO: 10558 - protein, 127 aa, Zea mays
  misc_feature (49)..(49): Xaa can be any naturally occurring amino acid
  misc_feature (54)..(54): Xaa can be any naturally occurring amino acid
  misc_feature (111)..(111): Xaa can be any naturally occurring amino acid
  misc_feature (115)..(115): Xaa can be any naturally occurring amino acid
  Coding DNA Sequence Number=SeqID_4509
  Gene Ontology: Mol. function=oxidoreductase activity; Biological process=ethylene biosynthetic process
  Homolog annotation: Hit_ID=O81093; Match level="QueryCoverage=89%, HitCoverage=35%, E-value=1e-30, Identity=63%"; Hit description=ACC oxidase
MEKNMKFPVVHLSKLNGEERDQTMALINEACENWGFFEIVNHGLPHDLXMTRSXKMTKDHYTTCQEPPFHVTRRPQGWDYLVSVVADLESACASRGRPPPLAILWPISAVXVDYXAHSTGFVVPDFL

SEQ ID NO: 10559 - protein, 104 aa, Zea mays
  Coding DNA Sequence Number=SeqID_4510
RGRKAGARRSIGPRASEGWRWGRHLQTPGGALASRSDARELRPWRRAWGDGENRPASEPEHGRHDHGWSRSGRPSSLQGSSMARTRDVGARAAWQGDGRRENLG

SEQ ID NO: 10560 - protein, 141 aa, Zea mays
  misc_feature (1)..(11): Xaa can be any naturally occurring amino acid
  misc_feature (13)..(17): Xaa can be any naturally occurring amino acid
  misc_feature (19)..(19): Xaa can be any naturally occurring amino acid
  misc_feature (21)..(23): Xaa can be any naturally occurring amino acid
  misc_feature (25)..(25): Xaa can be any naturally occurring amino acid
  misc_feature (29)..(29): Xaa can be any naturally occurring amino acid
  misc_feature (31)..(33): Xaa can be any naturally occurring amino acid
  misc_feature (36)..(41): Xaa can be any naturally occurring amino acid
  misc_feature (43)..(43): Xaa can be any naturally occurring amino acid
  misc_feature (47)..(62): Xaa can be any naturally occurring amino acid
  misc_feature (64)..(67): Xaa can be any naturally occurring amino acid
  misc_feature (69)..(72): Xaa can be any naturally occurring amino acid
  misc_feature (74)..(78): Xaa can be any naturally occurring amino acid
  misc_feature (80)..(80): Xaa can be any naturally occurring amino acid
  misc_feature (89)..(89): Xaa can be any naturally occurring amino acid
  misc_feature (98)..(98): Xaa can be any naturally occurring amino acid
  Coding DNA Sequence Number=SeqID_4512
XXXXXXXXXXXGXXXXXRXRXXXGXREGXGXXXGGXXXXXXGXGGEXXXXXXXXXXXXXXXXGXXXXKXXXXRXXXXXRXNPRSTTGSXDFTNVGIWXTWICPGGSRVYLRTAETTAGAARVGVQSAKNRTEVSAAARRGL

SEQ ID NO: 10561 - protein, 65 aa, Zea mays
  misc_feature (65)..(65): Xaa can be any naturally occurring amino acid
  Coding DNA Sequence Number=SeqID_4514
  Gene Ontology: Cellular component=ribonucleoprotein complex
  Homolog annotation: Hit_ID=Q08069; Match level="QueryCoverage=90%, HitCoverage=26%, E-value=3e-18, Identity=74%"; Hit description=40S ribosomal protein S8
PLLFVQGQEGEAIVEETKKSNHVQRKIEKPQQDRALDTHIEEQFGSGRLLACISACPGQCGQADX

SEQ ID NO: 10562 - protein, 423 aa, Zea mays
  Coding DNA Sequence Number=SeqID_4515
  Subcellular localization annotation: CTP_CleavageSite=31; ConfidenceScore=5.47e-01
RWLLRCSPYTSSKPPAWSSRSPPRSPRPLPLAGRVACPEARPPPHTRPGNPILIYRDARNVVATSAPVRAPSRSCGRRARHAAVAADAGDPRPASSPLSSLFGPAAPLAWPSWPAGLSPPSLPFPRCGPRGGPTGLATQRGPSAPHSPRRPPAGPTRQALPLPKPLSLLPCPTHPAPLPRSPNRRRRCSPPRGKPLPLLSPLPSPLLPSARRRPPRGAVPPARGVPARPRPALGARRLAPARPRRASPSRARAPRLAMARHGSGSPARDRGPVPLGAAPGAAPSPRGSPGPVRRPWRLAPARPRRALPLAFARPGGLLVRPARGGPACSPRPSPVPATAPARPQRGLGGASGAPARRVHARCPRRARRTHGSQPWRSARRPRLARPCAARPRPSAASARAAVVPLRSVARPRRVRDPFATRQR

SEQ ID NO: 10563 - protein, 233 aa, Zea mays
  Coding DNA Sequence Number=SeqID_4517
VRARISNSHLLLSSGSNADKLGMGGFGGYGGGGGRRGVWGGAGGTPGRAGEHGRRRGKPGRARGSPGTSAAGAAEPGAGAMAGDRRGGSPERRPSMGAGGSPGGGRAGARGGRARRGVAEPGHGAGSPGAAEPGRGGAGEGAAEAGDGGGSPDEAEARAGKGRGSSPEGAEHRGGRAEARRGGAELAGGRPSRDRAGSGRSGAGRLAGGAAEPGRRTDGAGGLAAARGERGPG

SEQ ID NO: 10564 - protein, 171 aa, Zea mays
  Coding DNA Sequence Number=SeqID_4519
  Subcellular localization annotation: CTP_CleavageSite=32; ConfidenceScore=5.09e-01
CHAARGYVKHPTKRGILKPPGVTLPYSYQFPSCSITMNLLTGLFAPSREAMTLPGELVAVGIVGARELEDLHLDVHELHAQALLDLLMRLAAQPCRVQIQQQPHRISFQLLVSLGQELHLVHALVCARGRITSRHRVPAGDKQNHRVACRLGLDGMDLTPIVLKGRGRDRA

SEQ ID NO: 10565 - protein, 806 aa, Zea mays
  misc_feature (62)..(62): Xaa can be any naturally occurring amino acid
  misc_feature (94)..(94): Xaa can be any naturally occurring amino acid
  misc_feature (208)..(208): Xaa can be any naturally occurring amino acid
  misc_feature (217)..(217): Xaa can be any naturally occurring amino acid
  misc_feature (279)..(279): Xaa can be any naturally occurring amino acid
  misc_feature (395)..(395): Xaa can be any naturally occurring amino acid
  misc_feature (511)..(511): Xaa can be any naturally occurring amino acid
  misc_feature (521)..(521): Xaa can be any naturally occurring amino acid
  misc_feature (729)..(729): Xaa can be any naturally occurring amino acid
  Coding DNA Sequence Number=SeqID_4521
  Gene Ontology: Mol. function=aspartic-type endopeptidase activity; Cellular component=chromatin; Biological process=chromatin assembly or disassembly
  Homolog annotation: Hit_ID=Q8W1D1; Match level="QueryCoverage=92%, HitCoverage=53%, E-value=0.0, Identity=52%"; Hit description=Gag-pol
  Pfam annotation: Domain name=RVP; Domain location=316-410; Score=3.1; E_value=0.0031; Accession=PF00077.10; Description=Retroviral aspartyl protease
  Pfam annotation: Domain name=RVP_2; Domain location=290-424; Score =162.7; E_value=9.9e-46; Accession=PF08284.2; Description=Retroviral aspartyl protease
  Pfam annotation: Domain name=RVT_1; Domain location=521-690; Score =148.8; E_value=1.5e-41; Accession=PF00078.17; Description=Reverse transcriptase (RNA-dependent
  Pfam annotation: Domain name=Retrotrans_gag; Domain location=64-156; Score=61.9; E_value=2.1e-15; Accession=PF03732.7; Description =Retrotransposon gag protein
  Pfam annotation: Domain name=zf-CCHC; Domain location=254-271; Score =32.8; E_value=1.3e-06; Accession=PF00098.13; Description=Zinc knuckle
  Pfam module annotation: Pfam domain module=RVP::RVP_2::RVT _1::Retrotrans_gag::zf-CCHC; Domain location=316-410::290-424::521 -690::64-156::254-271
MRIMQQMVDTMADMHAQMLPPRDKHWEFMSHKPPTFATSPDPLHADDWLKSVEKMLIIAQCXGRLTSPAADWWDSYTAAHDAADTITWAKFATXFKNYHIPAGLMKIKKKEFLSLKQRSMSVSEYHDRFIQLSGYAPDEVAEDERKQEHFIEGLNRPLQYGPVAHTFPSFQRLLDKALAIEHKRVQLGDLKRKAISQGQGSSSVHPRXCSTLGYTSXTRGGQRPAQYTPQGTPPTRQAAPTSTPTKFSGQSVGTTCYKCGKTGHYANVCPQRIATTPVXNKQQTPRSGKGFTISRVNQVSADATAEGADIALGMFYINAIPATILFDSGATHSFMFARYANTNDLPLRNMKTPMIVITPKGPVEANYMTHRLTLTIMGREFWATPIILEESRIDXILGMSWLRKAKVVIQCGRGTVELTSPKGEIFEVEITVTTSTRRAIFLVDGKFVADNIRVVRDFPYVFPEELLGMPPDREVEFIIDLLPGIAPISKRPYMMFIEELKELKKQLTELXEAGYIRPSSXPWGAPVLFVQKKDGSQRMCVDYRSLNDVTVKNKYPLPCIEDLFDQMRGARVFPKIDLRSGYHQMKIRPSDIPRTAFSTRYGLYEFTVMSFGLTNAPAYFMNMMNKVFMEYLDRFVVVFIDDILIYSKNDSDHEEHLRFVLQKLRDNQLYAKYSKCEFWIDEVPILGHIISNGGISVDPAKVKEIVECSIPSTITEVWSFLGLAGYYRXFIEGFSKLAKPLTSLLVGDERLPSSSINRALASLVSSHISLPLVAYSPPFYSLLLHHGQEQERRKFVAPFWRQAKAR

SEQ ID NO: 10566 - protein, 100 aa, Zea mays
  Coding DNA Sequence Number=SeqID_4522
  Subcellular localization annotation: CTP_CleavageSite=62; ConfidenceScore=5.18e-01
WGRHVDSPPRYCGPSRWPTSAFILTFIGVAVQDARVAGHASSGWPSSPSCGWSSTSTRTTGRASSGCSSPSTATTEIKQIKLLFACLLVFPIPFGVSRVD

SEQ ID NO: 10567 - protein, 174 aa, Zea mays
  misc_feature (3)..(3): Xaa can be any naturally occurring amino acid
  misc_feature (23)..(24): Xaa can be any naturally occurring amino acid
  misc_feature (33)..(33): Xaa can be any naturally occurring amino acid
  misc_feature (40)..(40): Xaa can be any naturally occurring amino acid
  misc_feature (47)..(47): Xaa can be any naturally occurring amino acid
  misc_feature (49)..(49): Xaa can be any naturally occurring amino acid
  misc_feature (61)..(61): Xaa can be any naturally occurring amino acid
  misc_feature (68)..(68): Xaa can be any naturally occurring amino acid
  misc_feature (73)..(73): Xaa can be any naturally occurring amino acid
  misc_feature (96)..(96): Xaa can be any naturally occurring amino acid
  misc_feature (100)..(100): Xaa can be any naturally occurring amino acid
  misc_feature (102)..(102): Xaa can be any naturally occurring amino acid
  misc_feature (105)..(106): Xaa can be any naturally occurring amino acid
  misc_feature (110)..(110): Xaa can be any naturally occurring amino acid
  misc_feature (112)..(112): Xaa can be any naturally occurring amino acid
  misc_feature (115)..(115): Xaa can be any naturally occurring amino acid
  misc_feature (117)..(117): Xaa can be any naturally occurring amino acid
  misc_feature (121)..(121): Xaa can be any naturally occurring amino acid
  misc_feature (123)..(123): Xaa can be any naturally occurring amino acid
  misc_feature (125)..(125): Xaa can be any naturally occurring amino acid
  misc_feature (129)..(129): Xaa can be any naturally occurring amino acid
  misc_feature (133)..(137): Xaa can be any naturally occurring amino acid
  misc_feature (139)..(141): Xaa can be any naturally occurring amino acid
  misc_feature (145)..(147): Xaa can be any naturally occurring amino acid
  misc_feature (149)..(149): Xaa can be any naturally occurring amino acid
  misc_feature (153)..(153): Xaa can be any naturally occurring amino acid
  misc_feature (155)..(157): Xaa can be any naturally occurring amino acid
  misc_feature (159)..(159): Xaa can be any naturally occurring amino acid
  misc_feature (161)..(163): Xaa can be any naturally occurring amino acid
  misc_feature (166)..(167): Xaa can be any naturally occurring amino acid
  misc_feature (169)..(169): Xaa can be any naturally occurring amino acid
  misc_feature (174)..(174): Xaa can be any naturally occurring amino acid
  Coding DNA Sequence Number=SeqID_4524
  Subcellular localization annotation: CTP_CleavageSite=34; ConfidenceScore=5.26e-01
TRXTQPNKGARGALLPSSHFSRXXVAYLASHSXRAGERQXRREGIKXRXSSRDSASRAPTXRYGPGRXIEAEXRGRTTMELGDEAKGRRPSPLGRXAPKXRXRTXXRSQXRXPQXSXPMLXGXGXGNKXAPPXXXXXHXXXGGGXXXWXLPTXQXXXQXNXXXQHXXAXGFHPX

SEQ ID NO: 10568 - protein, 127 aa, Zea mays
  Coding DNA Sequence Number=SeqID_4526
LLSPLPFPTLLCLNTAERFFLAEILCYAHFHPCSTHNSLIALLKATDELHHFIYFSVLFAHGIASSASCILICLSMEYLLSNNYNLQSYCRTLRRLFFKCVLGTLFIMRDASQYQVIFFFLPVPLCV

SEQ ID NO: 10569 - protein, 177 aa, Zea mays
  misc_feature (76)..(76): Xaa can be any naturally occurring amino acid
  misc_feature (112)..(112): Xaa can be any naturally occurring amino acid
  Coding DNA Sequence Number=SeqID_4528
  Gene Ontology: Mol. function=DNA binding; Cellular component =chromosome; Biological process=nucleosome assembly
  Homolog annotation: Hit_ID=P40280; Match level="QueryCoverage=69%, HitCoverage=76%, E-value=5e-31, Identity=62%"; Hit description =Histone H2A
  Pfam annotation: Domain name=Histone; Domain location=48-122; Score =39.5; E_value=1.2e-08; Accession=PF00125.14; Description=Core histone H2AH2BH3H4
  Subcellular localization annotation: CTP_CleavageSite=27; ConfidenceScore=5.29e-01
SFKSCGHFPAQVSTCSITWPPNGGGIKGKNVGGPGTTHADPRKKSLGRSVKPGLQFPVVRIGRYIKKARFAQGVGXGAPRSGSAAVLEYLLAEVLELSGQPPKVHKKTRILXRHVLLAIRNDEELGKLLVGVTITLGGVLTSIHCVLLPKKAAEKAAIGGSKERKSPKKGAKSHKKA

SEQ ID NO: 10570 - protein, 102 aa, Zea mays
  Coding DNA Sequence Number=SeqID_4529
HPSHPQISHCIVSGNCCLNATILYPILPPSKYLYALLLYIHTRSKHNLLTLSSSPITIHQSNHTFHPISVPSILNHYPLSPKKWLLCFNYHTISGTSKFFPP

SEQ ID NO: 10571 - protein, 349 aa, Zea mays
  misc_feature (1)..(33): Xaa can be any naturally occurring amino acid
  misc_feature (349)..(349): Xaa can be any naturally occurring amino acid
  Coding DNA Sequence Number=SeqID_4531
XXXXXXXXXXXXXXXXXXXXXXXXXXXXXXXXXMDKRQWLLARLAVAAASVPGNPMVAASARAPDQQQRCPPVSSASDGDARVWLLRLTATAVTEKGVRGRKWSASWSVSARASEEGAAMERGVGYKATRRSPTASKKSERITMPKRGAVREESAGGRKLRGHGGFVRQRGADPTDVVNLRAGRRRHGERAGGSGDSNAEACGSGGGGHGGDPEPGRFLHGEDICGWVFVQSRLFRGAGIDGLLGSPDHVEKKGSSPREWRMNLLGTPARKQWWADLGQSRGGYKRPRGRGSKRPQVSAYLVLVPARPTLPKRALPERFWHPAGVMSWPSEERWSLAEGQLSERLSPCX

SEQ ID NO: 10572 - protein, 93 aa, Zea mays
  misc_feature (57)..(57): Xaa can be any naturally occurring amino acid
  Coding DNA Sequence Number=SeqID_4533
  Gene Ontology: Mol. function=phosphoprotein phosphatase activity; Cellular component=nucleus
  Homolog annotation: Hit_ID=A2ZMT0; Match level="QueryCoverage=89%, HitCoverage=5%, E-value=5e-17, Identity=59%"; Hit description =Serine/threonine protein phosphatase
HHIEQIENLHRPITMEAGSVVLMDLLWSVFELLLSDYYCKILVFLFVDVMIYLFDAXRSDPTENDSVEGLRPNARGPGLVTFGVSIICYSAAF

SEQ ID NO: 10573 - protein, 121 aa, Zea mays
  misc_feature (23)..(23): Xaa can be any naturally occurring amino acid
  misc_feature (30)..(30): Xaa can be any naturally occurring amino acid
  misc_feature (34)..(34): Xaa can be any naturally occurring amino acid
  misc_feature (62)..(62): Xaa can be any naturally occurring amino acid
  Coding DNA Sequence Number=SeqID_4534
  Subcellular localization annotation: CTP_CleavageSite=70; ConfidenceScore=5.52e-01
GPTCHRPKGSFFFGLPSTGHTSXDGRAGLXRSGXMEGSQSWSRPRLARSCSQPGLRWPQMAXPCKRAAPACSNGGAAPPAMTGLGLGARTDQDGEGKVMMVPRQTTGDHVWRFDATGGMLE

SEQ ID NO: 10574 - protein, 116 aa, Zea mays
  misc_feature (1)..(1): Xaa can be any naturally occurring amino acid
  misc_feature (3)..(3): Xaa can be any naturally occurring amino acid
  misc_feature (5)..(5): Xaa can be any naturally occurring amino acid
  misc_feature (16)..(16): Xaa can be any naturally occurring amino acid
  misc_feature (20)..(20): Xaa can be any naturally occurring amino acid
  misc_feature (22)..(22): Xaa can be any naturally occurring amino acid
  misc_feature (24)..(25): Xaa can be any naturally occurring amino acid
  misc_feature (30)..(30): Xaa can be any naturally occurring amino acid
  misc_feature (32)..(32): Xaa can be any naturally occurring amino acid
  misc_feature (34)..(34): Xaa can be any naturally occurring amino acid
  misc_feature (39)..(39): Xaa can be any naturally occurring amino acid
  misc_feature (46)..(48): Xaa can be any naturally occurring amino acid
  misc_feature (52)..(52): Xaa can be any naturally occurring amino acid
  misc_feature (54)..(54): Xaa can be any naturally occurring amino acid
  misc_feature (56)..(56): Xaa can be any naturally occurring amino acid
  misc_feature (59)..(59): Xaa can be any naturally occurring amino acid
  misc_feature (77)..(77): Xaa can be any naturally occurring amino acid
  misc_feature (81)..(81): Xaa can be any naturally occurring amino acid
  misc_feature (107)..(108): Xaa can be any naturally occurring amino acid
  Coding DNA Sequence Number=SeqID_4536
  Subcellular localization annotation: CTP_CleavageSite=15; ConfidenceScore=5.07e-01
XLXGXGPLTATIMPAXMLKXRXRXXSSPRXFXKXRVLGXCENPHSXXXQEPXGXHXWYXTFIHPCSSNNHQPLLHQXTFWXIYWHKNIRAQQLQQLVLAKPCCLLSXXSSFFHSTN

SEQ ID NO: 10575 - protein, 88 aa, Zea mays
  Coding DNA Sequence Number=SeqID_4538
  Subcellular localization annotation: CTP_CleavageSite=33; ConfidenceScore=5.08e-01
SHGEAGVQMRMQQHQWRMMPHSGPLPCLTPPHRAAHLQRRGRGRTQKPMLRSALLNQRYVCSTSNLHTCSRHHYSSFCDNVFSNLVDL

SEQ ID NO: 10576 - protein, 122 aa, Zea mays
  Coding DNA Sequence Number=SeqID_4540
  Gene Ontology: Mol. function=nucleic acid binding; Biological process= DNA integration
  Homolog annotation: Hit_ID=Q8W0X3; Match level="QueryCoverage=99%, HitCoverage=12%, E-value=2e-41, Identity=70%"; Hit description =Putative gag protein
FLMAKEKKVSARDSPKYSTSCDEDSSDDEVDYSSLFKGLDRAKVEKINELIDALNEKDRLLEKQEDILYEEHDKFVSVQKSLALEIKRNEMLSSELSACHDTVSLEEANKSSSCVEHVNICN

SEQ ID NO: 10577 - protein, 74 aa, Zea mays
  misc_feature (52)..(53): Xaa can be any naturally occurring amino acid
  Coding DNA Sequence Number=SeqID_4541
  Gene Ontology: Mol. function=hydrolase activity, hydrolyzing O -glycosyl compounds; Cellular component=beta-galactosidase complex; Biological process=carbohydrate metabolic process
  Homolog annotation: Hit_ID=UPI0000ECC20B; Match level="QueryCoverage =67%, HitCoverage=56%, E-value=8e-13, Identity=68%"; Hit description =UPI0000ECC20B related cluster
QTCYLSSNSRILGGGAYAADSRGVPVPNSPYKEPHYNSLAAILQRPDWKNPXXTQLKRLAAHPPFDNWRNSEEG

SEQ ID NO: 10578 - protein, 154 aa, Zea mays
  misc_feature (29)..(29): Xaa can be any naturally occurring amino acid
  misc_feature (34)..(34): Xaa can be any naturally occurring amino acid
  misc_feature (49)..(50): Xaa can be any naturally occurring amino acid
  misc_feature (58)..(58): Xaa can be any naturally occurring amino acid
  misc_feature (78)..(78): Xaa can be any naturally occurring amino acid
  misc_feature (81)..(81): Xaa can be any naturally occurring amino acid
  misc_feature (100)..(100): Xaa can be any naturally occurring amino acid
  misc_feature (105)..(107): Xaa can be any naturally occurring amino acid
  misc_feature (110)..(110): Xaa can be any naturally occurring amino acid
  misc_feature (115)..(115): Xaa can be any naturally occurring amino acid
  misc_feature (131)..(131): Xaa can be any naturally occurring amino acid
  misc_feature (138)..(138): Xaa can be any naturally occurring amino acid
  misc_feature (140)..(140): Xaa can be any naturally occurring amino acid
  misc_feature (152)..(152): Xaa can be any naturally occurring amino acid
  Coding DNA Sequence Number=SeqID_4542
  Gene Ontology: Mol. function=structural constituent of ribosome; Cellular component=ribonucleoprotein complex; Biological process =translation
  Homolog annotation: Hit_ID=Q05761; Match level="QueryCoverage=98%, HitCoverage=90%, E-value=4e-30, Identity=61%"; Hit description=40S ribosomal protein S13
  Pfam annotation: Domain name=Ribosomal_S13_N; Domain location=1-63; Score=82.5; E_value=1.4e-21; Accession=PF08069.3; Description =Ribosomal S13S15 N-terminal domain
MGRMHSRGKGISSSALPYKRTPPTWLKTXASDVXEEMITKAAKKGQMPXXKSAFLLRXDQHGIPLGQEASPGSKILRXILXGPMGLAPENPPRDLYFFIXKKGGXXXRKXPWRGXQGRTKTSKFRVHFLGXKEGFHRXLXGYYKRTKKLHPXRE

SEQ ID NO: 10579 - protein, 120 aa, Zea mays
  misc_feature (75)..(75): Xaa can be any naturally occurring amino acid
  Coding DNA Sequence Number=SeqID_4543
  Gene Ontology: Mol. function=protein serine/threonine kinase activity; Biological process=protein amino acid phosphorylation
  Homolog annotation: Hit_ID=Q2QRH9; Match level="QueryCoverage=98%, HitCoverage=22%, E-value=1e-12, Identity=40%"; Hit description =Protein kinase AFC1, putative, expressed
MECIAEMPRAPLGLRKRKRQRLGWDVGPAEMYKAVRPRHGGGPGPAEMLQLGLCGQVIVNGVAAAGFGLSWGSSXVKEEQDQAHPRSPPQGEDDGHDDYVFAVGDNLTSRYKMKWKMGAN

SEQ ID NO: 10580 - protein, 99 aa, Zea mays
  Coding DNA Sequence Number=SeqID_4544
  Subcellular localization annotation: CTP_CleavageSite=53; ConfidenceScore=5.12e-01
WCKKYPLPLQLIYSISSIFVVQKNRVQTFFSRILYIGPPKRRLRVTLSLPYASAMQPDYQQSFCKPAFKCGEMQFLTCILKGELRRDRQVLIKKKKKGG

SEQ ID NO: 10581 - protein, 195 aa, Zea mays
  Coding DNA Sequence Number=SeqID_4546
IGYRAPPRERSQRSFELESDYCPALYKGPWSTHYNRARWLLFTSHKKFPMSFPSVIGLVAEHAGDKTICSTQAKRASAKRDCGGSPLSEGYWNGEPCIWIAPAMIFLKAKKQRSLPLAALVKSCSRIHFLGGKIHELVPTKATCTRRLTFTTTNPSITNFPKCWDSDDLKGARGTGLILPADPAPQTTSWGLTFE

SEQ ID NO: 10582 - protein, 139 aa, Zea mays
  misc_feature (5)..(9): Xaa can be any naturally occurring amino acid
  misc_feature (11)..(12): Xaa can be any naturally occurring amino acid
  misc_feature (15)..(16): Xaa can be any naturally occurring amino acid
  misc_feature (18)..(18): Xaa can be any naturally occurring amino acid
  misc_feature (20)..(23): Xaa can be any naturally occurring amino acid
  misc_feature (27)..(28): Xaa can be any naturally occurring amino acid
  misc_feature (30)..(30): Xaa can be any naturally occurring amino acid
  misc_feature (37)..(39): Xaa can be any naturally occurring amino acid
  misc_feature (41)..(43): Xaa can be any naturally occurring amino acid
  misc_feature (45)..(46): Xaa can be any naturally occurring amino acid
  misc_feature (50)..(52): Xaa can be any naturally occurring amino acid
  misc_feature (54)..(55): Xaa can be any naturally occurring amino acid
  misc_feature (58)..(61): Xaa can be any naturally occurring amino acid
  misc_feature (63)..(64): Xaa can be any naturally occurring amino acid
  misc_feature (66)..(67): Xaa can be any naturally occurring amino acid
  misc_feature (71)..(71): Xaa can be any naturally occurring amino acid
  misc_feature (73)..(73): Xaa can be any naturally occurring amino acid
  misc_feature (77)..(77): Xaa can be any naturally occurring amino acid
  misc_feature (82)..(83): Xaa can be any naturally occurring amino acid
  misc_feature (85)..(86): Xaa can be any naturally occurring amino acid
  misc_feature (89)..(90): Xaa can be any naturally occurring amino acid
  misc_feature (92)..(93): Xaa can be any naturally occurring amino acid
  misc_feature (114)..(115): Xaa can be any naturally occurring amino acid
  misc_feature (121)..(121): Xaa can be any naturally occurring amino acid
  misc_feature (135)..(135): Xaa can be any naturally occurring amino acid
  misc_feature (137)..(137): Xaa can be any naturally occurring amino acid
  Coding DNA Sequence Number=SeqID_4548
  Subcellular localization annotation: CTP_CleavageSite=11; ConfidenceScore=5.20e-01
FFFFXXXXXPXXKKXXPXQXXXXSPLXXFXKKTPPPXXXKXXXFXXGGGXXXTXXFLXXXXGXXEXXLGGXRXNPPXGPFVXXPXXGFXXNXXTFLAIAGGALSHGSRQKGVPXXNSFEIXGVAVLVGSGALEEXAXDV

SEQ ID NO: 10583 - protein, 84 aa, Zea mays
  Coding DNA Sequence Number=SeqID_4550
  Subcellular localization annotation: CTP_CleavageSite=66; ConfidenceScore=5.05e-01
KDAKTDLLLRVRMKRRGLSLDAKGSLAHRHLNRASSGVCASLQLTRRLQKQKRRVAQVRTPVKIPPCAEGNGSSWGVIPRGPGL

SEQ ID NO: 10584 - protein, 71 aa, Zea mays
  Coding DNA Sequence Number=SeqID_4552
RGLATDMTTRIGIFVILQSISLDAESIRLYLSVLPRTSAPIPTSPNNEPYQSRSVYAIYDDATVMTLGLAA

SEQ ID NO: 10585 - protein, 64 aa, Zea mays
  Coding DNA Sequence Number=SeqID_4554
IQLGKFQNRMTDENDFFEGEHQTSSMIDLLSCSAFNEVVYCHFFLFRQHLTNSCWGAGLFFLIY

SEQ ID NO: 10586 - protein, 79 aa, Zea mays
  Coding DNA Sequence Number=SeqID_4556
LWPSMLASLDKLPTEYTSPEICIRRSLIRQRLPRWSCNVATHERCLDERFKDRALSSRTLASPSDVHCHCLKLYHISST

SEQ ID NO: 10587 - protein, 171 aa, Zea mays
  misc_feature (1)..(1): Xaa can be any naturally occurring amino acid
  misc_feature (4)..(4): Xaa can be any naturally occurring amino acid
  misc_feature (7)..(8): Xaa can be any naturally occurring amino acid
  misc_feature (18)..(18): Xaa can be any naturally occurring amino acid
  misc_feature (24)..(24): Xaa can be any naturally occurring amino acid
  misc_feature (40)..(40): Xaa can be any naturally occurring amino acid
  misc_feature (48)..(48): Xaa can be any naturally occurring amino acid
  misc_feature (51)..(51): Xaa can be any naturally occurring amino acid
  misc_feature (56)..(56): Xaa can be any naturally occurring amino acid
  misc_feature (60)..(60): Xaa can be any naturally occurring amino acid
  misc_feature (63)..(99): Xaa can be any naturally occurring amino acid
  misc_feature (102)..(171): Xaa can be any naturally occurring amino acid
  Coding DNA Sequence Number=SeqID_4558
XERXSVXXYCSFHSEHRXPSDHEXDRRTEHDGRPRESWLXVGRSHPAXTMXVGITXREDXHDXXXXXXXXXXXXXXXXXXXXXXXXXXXXXXXXXXXXXGGXXXXXXXXXXXXXXXXXXXXXXXXXXXXXXXXXXXXXXXXXXXXXXXXXXXXXXXXXXXXXXXXXXXXXX

SEQ ID NO: 10588 - protein, 450 aa, Zea mays
  Coding DNA Sequence Number=SeqID_4560
  Gene Ontology: Mol. function=oxidoreductase activity; Cellular component=cytosol; Biological process=L-lysine catabolic process
  Homolog annotation: Hit_ID=Q2UAF3; Match level="QueryCoverage=96%, HitCoverage=100%, E-value=1e-176, Identity=67%"; Hit description=FAD- dependent oxidoreductase
  Pfam annotation: Domain name=DAO; Domain location=21-407; Score =135.8; E_value=1.2e-37; Accession=PF01266.14; Description=FAD dependent oxidoreductase
  Pfam annotation: Domain name=Pyr_redox_2; Domain location=21-284; Score=-47.6; E_value=0.076; Accession=PF07992.4; Description =Pyridine nucleotide-disulphide oxidoreduc
  Pfam module annotation: Pfam domain module=DAO::Pyr_redox_2; Domain location=21-407::21-284
MDIGFIPDGIDISRMTSQRRSYLIVGAGVFGVSTAYHLIQKYPDADVTLVDRDAYDSDNRVAASWDWNKVVRADYDDLIYCKLAIEAQDVFKADPLWQPYFHETGVYWMCRGSYAQDVIRNYKTLGRKAEISALPVAEAKLLYDGLFKDADYNGVTEVLINKTSGWAAAGDCLQAVTKRAMELGVKYVTQEVSTLIMDKGRCKGIRTRSGQSLLADHVLLCTGAYTSKLLELSAIEAGNDDLRAGSRIVAGGITTGMAILDEELYGQFETMPVGFQGYPADIGPFMGSLPPTKDRELKWWGPTIFRNTVEMSPGYQISAPPEGRDFGQWKVSKRLQEDIQAAKKLFYGEKSEKWPMAKHRICWDAFTTSGDFIISPHSSAKGLYIATCGSFHGFKFFPVLGKYITQMLEGSLAPELVEKWAWDRERPDPALNPEWPRAEMNDLQDTVAKL

SEQ ID NO: 10589 - protein, 249 aa, Zea mays
  misc_feature (78)..(78): Xaa can be any naturally occurring amino acid
  misc_feature (110)..(110): Xaa can be any naturally occurring amino acid
  misc_feature (243)..(243): Xaa can be any naturally occurring amino acid
  Coding DNA Sequence Number=SeqID_4561
  Gene Ontology: Mol. function=protein serine/threonine phosphatase activity; Cellular component=protein serine/threonine phosphatase complex; Biological process=protein amino acid dephosphorylation
  Homolog annotation: Hit_ID=P49599; Match level="QueryCoverage=86%, HitCoverage=55%, E-value=1e-106, Identity=91%"; Hit description =Protein phosphatase 2C PPH1
  Pfam annotation: Domain name=PP2C; Domain location=2-202; Score=6.1; E_value=2.8e-06; Accession=PF00481.12; Description=Protein phosphatase 2C
HRIFTGVRRKNDTWFLHATLENLSENKCCLPLLFIAHMGDSCAVLSRSGQIEELTDYHRPYGSSRAAIQEVKRVKEAXGGWIVNGRICGDIAVSRAFGDIRFKTKKNDMXKKGVDEGRWSEKLVSRIEFKGDMVVATPDILQVPLASDVEFIILASDGLWAYMKNSDVVSYFRDQLREHGNVQLACESLAQVALDRRSQDNVSIIIVDLVRTEWKNFLSQRQNVVVELVQAATTIGLVSVGIXKSSHLS

SEQ ID NO: 10590 - protein, 780 aa, Zea mays
  misc_feature (212)..(212): Xaa can be any naturally occurring amino acid
  misc_feature (443)..(443): Xaa can be any naturally occurring amino acid
  misc_feature (456)..(456): Xaa can be any naturally occurring amino acid
  misc_feature (486)..(486): Xaa can be any naturally occurring amino acid
  Coding DNA Sequence Number=SeqID_4562
  Gene Ontology: Mol. function=aspartic-type endopeptidase activity; Biological process=DNA integration
  Homolog annotation: Hit_ID=Q8H6I0; Match level="QueryCoverage=98%, HitCoverage=44%, E-value=0.0, Identity=66%"; Hit description =Putative gag-pol polyprotein
  Pfam annotation: Domain name=zf-CCHC; Domain location=327-344; Score =18.8; E_value=0.0022; Accession=PF00098.13; Description=Zinc knuckle
MAAHRTVRCAHRRDFQSPSTSGSDTPSVTSKCHERKKFSKIPLCYPRISKHTPLLSVPLGKPPDFDSEDYCMWSDKMRHYLTSLHASIWDIVEFGAHVPSVGGEGYDSDEVAQIRHFNSQATTILLASLCREEYNKMEGLKSAKEIWDVLKTVHEGDEVTKITKRETIEGELGRFILNQGEEPQAMYNRLKTLVNQVHNLGRTKWDDHEMVXILRSLVFRNPTQVQLICGDPRYKLMSPEEVIGKFVSSELMIKGSKQIVEQGGTSTLEVQPVAFKATEEKKEESTTSRLPIDASKLDNEEMALIIKSFCQILKQMRGKDYKPHSKKLCYNCGKPSHFIAKCSLSSDSDRGDDKKGKRKEKKRHYKKKGGDAHVCREWDSDESTTDSSSDEDAANIVVNKGLLFPNIGHKCLMAKDGKKNKVKSRASTKYTISSDEGSSIDDXDDLLALFANLNMXQQKEKLNELIGVIHEKDELLDSQEEFLIKXNKNNVKVKNAYAKEIEKCEKLTSELSICHDTIPNLRIENANLIAKVEKRNGCDDSIANLKNDNASLFAKIDKFNESISSLKIENDKLISKAKDLNVCNVSISCLRDENAMLKSKIDELKSCKPSTSTVDHVSICMRCININVGAIHDHLALIKEQNDHIAQLTAKINEHEIENEKFKFARSMLYNGRRPAIKDDIGFQQGDNVKLNAPKRLSNFVKGKAPMAQDNEGYILYPAGYPEHKIRRIHSRKYHSGPHHAFMYKNETSSSRQNVEWGLERIATYPFLTSENVSYGSLSA

SEQ ID NO: 10591 - protein, 101 aa, Zea mays
  misc_feature (17)..(17): Xaa can be any naturally occurring amino acid
  misc_feature (34)..(34): Xaa can be any naturally occurring amino acid
  Coding DNA Sequence Number=SeqID_4563
SSLQWQLLSSLGRLVSXYHFGNGRPAQPEGNQGXLCSDVKISARSSESVHRDQSCHLRSMTTHLMAMYTLALCSLRDLPNPPAPAAARLPAALVFILRLPY

SEQ ID NO: 10592 - protein, 109 aa, Zea mays
  Coding DNA Sequence Number=SeqID_4565
  Gene Ontology: Mol. function=RNA-directed DNA polymerase activity; Cellular component=chromatin; Biological process=RNA-dependent DNA replication
  Homolog annotation: Hit_ID=Q2QSH9; Match level="QueryCoverage=94%, HitCoverage=6%, E-value=3e-32, Identity=61%"; Hit description =Retrotransposon protein, putative, unclassified, expressed
TWALTVPTTIVSDRDCTFMSSFWQHLFQLLGTMLVSSTAYHPQTDGQSERVNQCLEMYLRCAVSASTKDWSAWLSLAELWYNSAHHSAIGLAPFKALYGTDINMGILPQ

SEQ ID NO: 10593 - protein, 153 aa, Zea mays
  misc_feature (56)..(56): Xaa can be any naturally occurring amino acid
  misc_feature (85)..(85): Xaa can be any naturally occurring amino acid
  Coding DNA Sequence Number=SeqID_4566
  Gene Ontology: Mol. function=glyceraldehyde-3-phosphate dehydrogenase (NADP+) (phosphorylating) activity; Cellular component=chloroplast; Biological process=reductive pentose-phosphate cycle
  Homolog annotation: Hit_ID=P09672; Match level="QueryCoverage=75%, HitCoverage=48%, E-value=1e-47, Identity=88%"; Hit description =Glyceraldehyde-3-phosphate dehydrogenase A, chloroplast
  Pfam annotation: Domain name=Gp_dh_C; Domain location=16-131; Score =37.1; E_value=9.9e-10; Accession=PF02800.10; Description =Glyceraldehyde 3-phosphate dehydrogenase, C-
  Subcellular localization annotation: CTP_CleavageSite=62; ConfidenceScore=5.03e-01
CATPRCFKGEPRPPRFGPFFPHFQEPAKSWGSWAFLTSKGKFTGIACGVPTPNLSXVVGLKSCQSPKKTFAEEVNAAFRDAAEKXELKGILDVCDEPLVSVDFRCSDVSSTIDSSLTMVMGDDMVKVIAWYDNEWGYSQRVVDLADIVANNWK

SEQ ID NO: 10594 - protein, 283 aa, Zea mays
  Coding DNA Sequence Number=SeqID_4567
  Gene Ontology: Mol. function=oxidoreductase activity; Cellular component=cytoplasm; Biological process=metabolic process
  Homolog annotation: Hit_ID=A9GEX9; Match level="QueryCoverage=98%, HitCoverage=86%, E-value=3e-87, Identity=57%"; Hit description =Alcohol dehydrogenase zinc-binding domain protein
  Pfam annotation: Domain name=ADH_N; Domain location=1-67; Score=36.0; E_value=1.3e-07; Accession=PF08240.2; Description=Alcohol dehydrogenase GroES-like doma
  Pfam annotation: Domain name=ADH_zinc_N; Domain location=98-243; Score=153.2; E_value=7.1e-43; Accession=PF00107.16; Description=Zinc- binding dehydrogenase
  Pfam module annotation: Pfam domain module=ADH_N::ADH_zinc_N; Domain location=1-67::98-243
GRHTYLRTGAFSPPGLPFTPGKEGAGEVVAVGDGVTEFARGDRVAYVETLGAYAEQCVVSEHFLVHLPEAIDFETAAASMLKGLTAQYLLRRTFRVEPGHTVLIHAAAGGVGLILSQWAKHLGATVIGTVGTPEKAEAAAQYGCDYVINYGEENFAERVREITQGEGCDVVYDGVGKATFPASLDCLKPMGCFVSFGVSSGPIESFNIMMLAEKGSLYATWPVLTQYLAKREDILSMSQELFDVIGSGAVAIRIHDRLPLAEAATAHRLIESRKIVGGTVLLP

SEQ ID NO: 10595 - protein, 170 aa, Zea mays
  misc_feature (1)..(1): Xaa can be any naturally occurring amino acid
  Coding DNA Sequence Number=SeqID_4568
  Gene Ontology: Mol. function=aspartic-type endopeptidase activity; Biological process=DNA integration
  Homolog annotation: Hit_ID=Q7XBD2; Match level="QueryCoverage=71%, HitCoverage=8%, E-value=8e-55, Identity=88%"; Hit description =Retrotransposon Opie-2
XTYNRLRTLINKIRSYGSTRWTDHDVVRLMLRSFTVFDPHLVNNIRENPRYTNMTPEEVLRKFISSRMMIKEARYVDYALNGPIYPPQPLAVKATRSKEALPSMVAQIDAAGLNDEEMALIIFFFFFFFFFFFFFFFFFFFFFFFFFFFFLQRQLPTIHANASGYRKSTK

SEQ ID NO: 10596 - protein, 221 aa, Zea mays
  Coding DNA Sequence Number=SeqID_4569
ILWVGGAPKKKKKNRGAGGNYWGGNRKTPPGGVNGLGANEGGGGPPRGAGSDWEGGGVAGRAGQAGEADAIAPVLQGRGARRCHPSAQGENRGAGRGGQSTPARKRAAKDQGGEMPGHEARAFLSGPMSMPWISVVSSASCYHVSVQILSSSQFVSLSIVMWHVSCRQCMPSPVVRGIHGRDDLVDVAWKRILSLPMACDSLGITVKRALGASHRDEPRMS

SEQ ID NO: 10597 - protein, 53 aa, Zea mays
  Coding DNA Sequence Number=SeqID_460
GQGERTSDRRGAREKGAELLSLSAPFSRVPRWPWPSTGRSRAQLEHELDSTTA

SEQ ID NO: 10598 - protein, 483 aa, Zea mays
  Coding DNA Sequence Number=SeqID_462
  Gene Ontology: Mol. function=nucleic acid binding
  Homolog annotation: Hit_ID=A3AUP0; Match level="QueryCoverage=71%, HitCoverage=72%, E-value=1e-17, Identity=37%"; Hit description =Putative uncharacterized protein
  Pfam annotation: Domain name=RRM_1; Domain location=146-222; Score =6.2; E_value=0.04; Accession=PF00076.12; Description=RNA recognition motif. (a.k.a. RRM, RBD, or
MDGDDAGGQLPAAPASPRTEEAIAAAHDDARFPPTPSDGEDYDDLYGDVNVGFNSLLPLSPSPAPTSPPKTPSPGPSFQLPPQWPHRPPPPEPLPAPAPQREPEPQPRQDTPRHQPPQPTPSVPRHHMTPRGGGASYSSSPRCTSLYISELHWWTTDAEVEAALALAPDGAAAALYGLHFYTEKITGMSRGICRADFLHPAAAAAAATALHGHAFHGRKCVASLARSPSLNLLGDDLDSYAEAAWSWNPPGGLGNGGHGASDATAGRGNVALALADRLPLARPQLSVVPRPTPRSVPFAGIGGYGGFQSMRQYSAGMGIAMMPSALAHLVNPPFLALQGSGVWYDQGISGSFWGAQQERNFGGCQMPWQLQHQQAQQQFGNWNYGMQGRGLRHERLSNTRSVGNVRYLDRRQANCDGGDRYKENDFEKGRHQEGILDKEREQEKHWNQRDRHGGDNQMDRRVRARSRSQSSDDSDDDNPRRRR

SEQ ID NO: 10599 - protein, 324 aa, Zea mays
  Coding DNA Sequence Number=SeqID_463
  Homolog annotation: Hit_ID=A3AM91; Match level="QueryCoverage=78%, HitCoverage=18%, E-value=1e-52, Identity=47%"; Hit description =Putative uncharacterized protein
SKPYTARLHTLILPPWRQPAEEVDDDWLLGGSEPIPGVDPTGDWADEDDDGGEPAPPAKRSTSADDIDPLMGGGAGDSGPVIPGLSSSSAAGAAGSDEWDSDSEDDIQIVLNETDGRPGLVEDEGDDEDGEDLVIVADGPAMEEQDWGEDPAAAGAEGERKDGGEPGKTVAAPTGRIGYSGGGPGFHQQHHSMFKYVRPGAPGASVGGVPGGPGQFRPPGPLGPFSGRGRGEWRPAAGRGMNKSFHSGYGITPWGGSGRNFGGGLDFALPPHKSTQMTLCINEECMNLCFFWNDNSHVKNEVENLFLMRDVVRTHSASATSVPQ

SEQ ID NO: 10600 - protein, 123 aa, Zea mays
  Coding DNA Sequence Number=SeqID_464
LHHSYKLYMLSCFHICKHFTESFIKELMLQEVQKPSHNNYSFLYPPVLRHKLSLSRISISMNLMCTCISSEPPLVAHEFPRFLVVAQTKTGDTSCSLRMELGTNIADRGKTRLQSMTNNDSDD

SEQ ID NO: 10601 - protein, 581 aa, Zea mays
  misc_feature (415)..(415): Xaa can be any naturally occurring amino acid
  misc_feature (432)..(432): Xaa can be any naturally occurring amino acid
  misc_feature (437)..(437): Xaa can be any naturally occurring amino acid
  misc_feature (439)..(439): Xaa can be any naturally occurring amino acid
  misc_feature (441)..(441): Xaa can be any naturally occurring amino acid
  Coding DNA Sequence Number=SeqID_466
  Gene Ontology: Mol. function=transporter activity; Cellular component= integral to membrane; Biological process=transport
  Homolog annotation: Hit_ID=Q173P9; Match level="QueryCoverage=93%, HitCoverage=96%, E-value=1e-114, Identity=42%"; Hit description =Monocarboxylate transporter
  Pfam annotation: Domain name=DctM; Domain location=42-552; Score= -237.1; E_value=0.045; Accession=PF06808.2; Description=DctM-like transporters
  Pfam annotation: Domain name=MFS_1; Domain location=21-523; Score =146.9; E_value=5.5e-41; Accession=PF07690.6; Description=Major Facilitator Superfamily
  Pfam annotation: Domain name=Sugar_tr; Domain location=20-480; Score=- 171.4; E_value=0.028; Accession=PF00083.14; Description=Sugar (and other) transporter
  Pfam module annotation: Pfam domain module=DctM::MFS_1::Sugar_tr; Domain location=42-552::21-523::20-480
MEKIDKSGKKTKLIPPDGGYGWVIVFASALNNFVLIPLLQNFGLVFKDTFAELGLSATQGSLIINVNSAFGLLTGLVNGPLLNKYGYRKVSFLAGFLLVIGVILTSFAKSFLAFLITYGCITSLGFGMTMSSYSLAINTYFKEKKGKAIGIAMTITGLGPIIMPQIINLLIENYPISGVTLILGGILGHSLVAAALLQPVKWHMKRVPIDEGENELLKKNGAVGETQNQNGSAEKNNPQENGVERGRKDSTSSKLSINYETEQGAILGLDSNLGGSVISLNSINETVATNRRKISTVSRTKTQWWKSQSTVNLESSVDLFDEKNRKNQLDGIEYSKPRDNTRYTSVYNPEMTEKVETKSFWKRFFLRLAKIFDLNLLKDPIYVNIMIGMSLAVFAELNFSVLTAFILNDFGLTTXQIATFMSCLGIADIIFXFLAPXIXRXLKKPPRMMYMFTLSALIATRFGLLFSNDYYYLLGVSVALGIAKGVRTVYMSLVIPTYVPLERLAAASGIQMMVNGVFILIGGPFLGWVRDLTGSYSLCIVLMNCVTFSTIIMWSTEYIYFYFKDKAEEETIETVEVTTTK

SEQ ID NO: 10602 - protein, 108 aa, Zea mays
  Coding DNA Sequence Number=SeqID_467
EGCEIAAVAALPRCESSTRGCPEILAEATWSDSRAMMRRFSISAVSIARRLRPTPSCRTSLWSALSTACQPREVTSHLKSKLVPGILSPRQVMPLTTFYPIMFSIITY

SEQ ID NO: 10603 - protein, 129 aa, Zea mays
  misc_feature (65)..(65): Xaa can be any naturally occurring amino acid
  Coding DNA Sequence Number=SeqID_469
  Gene Ontology: Mol. function=protein serine/threonine kinase activity; Cellular component=cytoplasm; Biological process=protein amino acid phosphorylation
  Homolog annotation: Hit_ID=Q8H643; Match level="QueryCoverage=75%, HitCoverage=24%, E-value=1e-30, Identity=59%"; Hit description =Calcium-dependent calmodulin-independent protein kinase CDPK-like
CDSLYKATRLHGVLLEVAHVPFLKDRYALCLQLECIQFGIIRSCSDLVTGKALACKSIAKPNIVXLKAVYEDRDSVHLIMELCAGGELFHRLQERDCFSERERVLNGEAKYDRKIVTISSIDGKDNKLC

SEQ ID NO: 10604 - protein, 196 aa, Zea mays
  Coding DNA Sequence Number=SeqID_470
  Homolog annotation: Hit_ID=A3ATG6; Match level="QueryCoverage=35%, HitCoverage=35%, E-value=2e-09, Identity=45%"; Hit description =Putative uncharacterized protein
MPATVAITLDLGCCRCKTKIHKILCCLQQRCGFVFDKVVYDKDKVLVSGTFDAMDLVCKLRCKAGHFATKIEIVPPPPPPPQQKKDPPPAQTAPAAAVGSPQQPVVTSNRPDPPPTCTKALIPYPCPYPYPYPLPCPSPQPRSCHCHSCKPPPCPTPPQPPRPCPTPPPPPLPCPPPVSVCKCPAWTPCQCRGHPW

SEQ ID NO: 10605 - protein, 117 aa, Zea mays
  Coding DNA Sequence Number=SeqID_471
LIHLVGRTVKIDSGETCNRGRVRSGCGRLTPPRSNQAYGDEGVHGIGPICLAMSCTIHSEHRLGGFVLGWWGIAHRCSKFVVDRPHCGLMVLCRRSGSKVNNRFHRMRRMEDAAMCL

SEQ ID NO: 10606 - protein, 262 aa, Zea mays
  Coding DNA Sequence Number=SeqID_473
  Homolog annotation: Hit_ID=Q5NAW5; Match level="QueryCoverage=89%, HitCoverage=32%, E-value=1e-49, Identity=48%"; Hit description =Putative uncharacterized protein P0702F03.35
LSLKLVVLVAFRTAGVRTTIMDTVIYKHDDISQEGTLPFGETMNMGGSNVEILTRIELDIAFASEKLLNLEMLVMEIARQATDFEPSTLEDESISSEIAENALELDILYGILDAEVKELHNLISSLQADVKSIEHEVYEEESGGKVKTRMDAAKLSLKQMQELIADIQNESAKFEKVVEFSQDKEGTIEAVGCDNDHLSYQTGAQTEDQHRNVLHMLEQSIASEIDLEKKLSDSISVIEDLRLKLHHQEEEIYFLEESTETV

SEQ ID NO: 10607 - protein, 165 aa, Zea mays
  misc_feature (86)..(86): Xaa can be any naturally occurring amino acid
  misc_feature (95)..(95): Xaa can be any naturally occurring amino acid
  misc_feature (119)..(119): Xaa can be any naturally occurring amino acid
  Coding DNA Sequence Number=SeqID_474
  Gene Ontology: Mol. function=RNA-directed DNA polymerase activity; Cellular component=chromatin; Biological process=RNA-dependent DNA replication
  Homolog annotation: Hit_ID=Q53J92; Match level="QueryCoverage=60%, HitCoverage=10%, E-value=2e-19, Identity=51%"; Hit description =Retrotransposon protein, putative, Ty3-gypsy sub-class
MFVAGLGDTDHWDDRNEHRIRPSPRPAPTKHPFATSKPLRTLVFSRWIILSRSSLKDLCTTATLLYELIKNGVAFQWGAAQATRFXDLLMSKLTXTPLLQLQEFNKTFELECDARGITXGELHIQGSKPIVFFSEKLHDLALNFLCMAKTLQFSVSVLIPIGLCS

SEQ ID NO: 10608 - protein, 158 aa, Zea mays
  Coding DNA Sequence Number=SeqID_475
CCCGHSARRSLVLPAGALCSSARRPLPAALGACDEPTGHRSTATRAPPRQTGRALLAVGPPLRDPAAAAASLRPCLRRAVPPLAGGRLNSLSTTVPSRHPPPASTASLPQCRAGLPSLVEGRHRHLLNCDNVSDSPLPNGPIPPLFGKNFCLMQTLFL

SEQ ID NO: 10609 - protein, 167 aa, Zea mays
  Coding DNA Sequence Number=SeqID_4570
  Gene Ontology: Mol. function=hydrolase activity; Biological process =metabolic process
  Homolog annotation: Hit_ID=A2QBH8; Match level="QueryCoverage=73%, HitCoverage=40%, E-value=4e-41, Identity=64%"; Hit description =Localization: est of A. calcoaceticus is external to the cytoplasmic membrane
  Pfam annotation: Domain name=Abhydrolase_3; Domain location=2-132; Score=-76.8; E_value=0.011; Accession=PF07859.3; Description =alphabeta hydrolase fold
ELTSPPPPPLAARVRCVVLISPCLDTSLSHPELFEMEKNDPWLAVDGMKVLMPYLSGGLPMDDPRVSPLHGEIEGLPPVMMLAGTHDMICSDARRLSAKYQGKGTDRGVPGSFHNDKLTYIEYPEMIHVYPLLPHAEGAEARGFIMDFIRQHIAWNIEVVQNRVVHK

SEQ ID NO: 10610 - protein, 138 aa, Zea mays
  misc_feature (27)..(27): Xaa can be any naturally occurring amino acid
  misc_feature (53)..(53): Xaa can be any naturally occurring amino acid
  misc_feature (79)..(79): Xaa can be any naturally occurring amino acid
  misc_feature (115)..(115): Xaa can be any naturally occurring amino acid
  Coding DNA Sequence Number=SeqID_4571
  Gene Ontology: Mol. function=aspartic-type endopeptidase activity; Cellular component=chromatin; Biological process=DNA integration
  Homolog annotation: Hit_ID=Q2QSG2; Match level="QueryCoverage=92%, HitCoverage=7%, E-value=1e-36, Identity=58%"; Hit description =Retrotransposon protein, putative, Ty1-copia subclass
  Pfam annotation: Domain name=RVT_2; Domain location=30-138; Score= -81.8; E_value=8.8e-10; Accession=PF07727.4; Description=Reverse transcriptase (RNA-dependent
LVLTIDTPPDASPVPSSIHTTLVDPCXHHAMEEEYAALLANHTWDLVPRSPGXNMATDKWIFHHKLTSDGSLDPYKSHXVLWGFTQHPRVDYNDIFNPVVKFVAIQVVLSLAFSXDWVVHQLDVKNVFLHGTLIEMVY

SEQ ID NO: 10611 - protein, 350 aa, Zea mays
  misc_feature (1)..(10): Xaa can be any naturally occurring amino acid
  Coding DNA Sequence Number=SeqID_4572
XXXXXXXXXXERHRRRPVQRDDNPSPEPAPAAASSAVPSPETPLAYPQSGGDDDAPPKDKGEAAAAVRPRDQVPRARDPPSASAPLLPPPRPPSLPLFPSLPPPVPPVPRPHEHFHVGQNVGHLQLHRIHVHHRRRRRILLALGRVIHLRGRLLHVRLGAARRRPSTTGHHHPHPPRPHSPRYTTHWSSARRCGAALLPPFAAPSHTDCRSSHDSRFPRELHPLFKRDALSRQSSPSPPPPPLLPPTRPFPLFSLPRRGPPGSDCPGANPPPSPLFLQPSTRPLCPRVSCPFPEESSLSPGAAAPAPPLKLTTPMSTSLPSAPPRRPPAPWHHTPIAAPLATPAPPITPQ

SEQ ID NO: 10612 - protein, 78 aa, Zea mays
  Coding DNA Sequence Number=SeqID_4574
KNRIQYCILRNIEYNFKTHTVLSAGTHTSLVSCKPQPRIQFFLTMLSTFRVDRSGYQNFRCYGSIHAYAVHSSSWYGT

SEQ ID NO: 10613 - protein, 54 aa, Zea mays
  Coding DNA Sequence Number=SeqID_4576
ITNSFYAVLHSRRTEHPLKPSLNVNASLLSPYINGMLAVMSATRCPPGSSLLFS

SEQ ID NO: 10614 - protein, 278 aa, Zea mays
  misc_feature (71)..(278): Xaa can be any naturally occurring amino acid
  Coding DNA Sequence Number=SeqID_4578
GYIRMFRGSLIELNWSTKALTDLRELRSSFRTSIRAVGFFSMMASLASDAASEYRAAMTTWAPLSGRLLMXXXXXXXXXXXXXXXXXXXXXXXXXXXXXXXXXXXXXXXXXXXXXXXXXXXXXXXXXXXXXXXXXXXXXXXXXXXXXXXXXXXXXXXXXXXXXXXXXXXXXXXXXXXXXXXXXXXXXXXXXXXXXXXXXXXXXXXXXXXXXXXXXXXXXXXXXXXXXXXXXXXXXXXXXXXXXXXXXXXXXXXXXXXXXXXXXXXXXXXXXXXXXXXX

SEQ ID NO: 10615 - protein, 116 aa, Zea mays
  Coding DNA Sequence Number=SeqID_4579
  Homolog annotation: Hit_ID=A9I038; Match level="QueryCoverage=87%, HitCoverage=8%, E-value=6e-26, Identity=63%"; Hit description =Putative uncharacterized protein
PAGPGPEFPGSTPQDRVNKDDFLNRKRLGFSGMNIAVAGEKIVAGLGDIALDDFYGRILLNAQGRLNVMDLVAAPGQAGGSITQDTQTPGRRAEAPAPAAKGGGMPDISLNSVTLT

SEQ ID NO: 10616 - protein, 128 aa, Zea mays
  misc_feature (49)..(49): Xaa can be any naturally occurring amino acid
  Coding DNA Sequence Number=SeqID_4580
MGKDKNGQGSPHRSGNKRKHEPSLPSEDISDSEYTEEEVSFDSEGSSVXLPPASSDDSDDSQGIAAEVWTYIRSIERARLKGSDESEVSSNEENSSDSSGGREQRAYGDDRGGDRPGHSGGRGGGDSD

SEQ ID NO: 10617 - protein, 228 aa, Zea mays
  misc_feature (138)..(228): Xaa can be any naturally occurring amino acid
  Coding DNA Sequence Number=SeqID_4581
PTNFVVPQPNQFVGLNCLAQLDRPCARPEKATPPAATKPSMGQPNYKMCEHEGGIVLFAQCRLQEMLDPVSHHRLARSRLLEHLLPQFPPLCLGLLPVFPLRLNCCILVSVSLLILCAFLLVLFAQTMRGALLAVVAXXXXXXXXXXXXXXXXXXXXXXXXXXXXXXXXXXXXXXXXXXXXXXXXXXXXXXXXXXXXXXXXXXXXXXXXXXXXXXXXXXXXXXXXXXX

SEQ ID NO: 10618 - protein, 49 aa, Zea mays
  Coding DNA Sequence Number=SeqID_4582
EHIPRSPPKSSFGLPPLVSRRVLDPLTRLTRSYPNVALLFLVPGAPCPA

SEQ ID NO: 10619 - protein, 255 aa, Zea mays
  misc_feature (1)..(1): Xaa can be any naturally occurring amino acid
  Coding DNA Sequence Number=SeqID_4583
  Subcellular localization annotation: CTP_CleavageSite=81; ConfidenceScore=5.81e-01
XSASPDPRALTQPRLRKTVSASPDPRARTQPRPRKTVSASPDPRARTQPRLRKTVSASPDPRARTQPRPRRSHHLARPRARTDHVTGGAIITLPLASSGYGEQDQRPIWLAPVKQRRRRPLPALAPPPPLPPQRRRRAALPRRGEAPPLIPSPPPSPSSFLARPAARRAARLGRPRRPPPGLARPPPRHPRPAPPRPAPARPSRAGPVPLRPDLGRPRLAVPRAPCSARSGEPPRPFPAPVSPRLGRPPGEPAPP

SEQ ID NO: 10620 - protein, 116 aa, Zea mays
  misc_feature (44)..(44): Xaa can be any naturally occurring amino acid
  Coding DNA Sequence Number=SeqID_4584
  Gene Ontology: Mol. function=catalytic activity; Cellular component =membrane; Biological process=metabolic process
  Homolog annotation: Hit_ID=Q8SAG4; Match level="QueryCoverage=87%, HitCoverage=30%, E-value=1e-36, Identity=74%"; Hit description =Phospholipase D nu-2
RWPEGNPTTAAMQEILYWQGHTMSMMYKIVADALRKEGSHERHXQEYLNFYFLGKREVSNEVPHTGNSNENSAARLPRKFRLHMIYVHSKGMIYCLEYVLIGSEVTTKGNSNENSA

SEQ ID NO: 10621 - protein, 165 aa, Zea mays
  Coding DNA Sequence Number=SeqID_4585
  Subcellular localization annotation: CTP_CleavageSite=79; ConfidenceScore=5.52e-01
IHARVGGVLARPPLRPAASYSARPPSPPLSPLRPLLTSPLSPPPLLPGSLPLSGLPLPLPPSFPPPTNLPPPPPPPLPRAHDRPLAPLLLIRPEFPLAIDTLRYLVLYFLLSELSNPSISHIQCPLTAVCWKFSLWYIALHRSSSSLQIRNSPNISINFFLFIVK

SEQ ID NO: 10622 - protein, 176 aa, Zea mays
  Coding DNA Sequence Number=SeqID_4586
  Subcellular localization annotation: CTP_CleavageSite=57; ConfidenceScore=5.60e-01
RRPYPPALAPPLPRRRSAAPLGRPAPSPSPVSPLPLPLSSLSHPPSPFPSPLGAMAAAMAGSASPRPCPPAGAPPSRPAVRPPGPLAAWPPWPRPALAAPRPCPPAGVPSAARLAALAARSPGRLAGSAAWPARPPRALAWPPVQPGRLSRPAAQLAAQPAGSTAPRAGSTAPPPS

SEQ ID NO: 10623 - protein, 226 aa, Zea mays
  Coding DNA Sequence Number=SeqID_4588
IEHSVIKCSSYQTIMAGRDPRSAARIPQPRIPPALPPRPPAAAPAAPPPLLPSPAPLAAPRSPSSAGFHPCLPACPAPPFLARRETDRRDRHKSRGEMAAVPRSPSRAPLPHGPIGVAPPALAALGASSQWLSGSRASKCGSSPTFSRSFFSSHLGGLRLATDLLLGLVGAAAGATCVQKNQAAGVGTRRRRRRVLEMMTDHQMHVMTITSTCPALLPLVGSALPL

SEQ ID NO: 10624 - protein, 99 aa, Zea mays
  misc_feature (10)..(11): Xaa can be any naturally occurring amino acid
  misc_feature (30)..(30): Xaa can be any naturally occurring amino acid
  misc_feature (32)..(32): Xaa can be any naturally occurring amino acid
  misc_feature (39)..(40): Xaa can be any naturally occurring amino acid
  misc_feature (44)..(44): Xaa can be any naturally occurring amino acid
  misc_feature (47)..(47): Xaa can be any naturally occurring amino acid
  misc_feature (50)..(51): Xaa can be any naturally occurring amino acid
  misc_feature (53)..(53): Xaa can be any naturally occurring amino acid
  misc_feature (55)..(55): Xaa can be any naturally occurring amino acid
  misc_feature (63)..(63): Xaa can be any naturally occurring amino acid
  misc_feature (65)..(65): Xaa can be any naturally occurring amino acid
  misc_feature (67)..(67): Xaa can be any naturally occurring amino acid
  misc_feature (74)..(74): Xaa can be any naturally occurring amino acid
  misc_feature (76)..(76): Xaa can be any naturally occurring amino acid
  misc_feature (78)..(78): Xaa can be any naturally occurring amino acid
  misc_feature (80)..(80): Xaa can be any naturally occurring amino acid
  misc_feature (82)..(82): Xaa can be any naturally occurring amino acid
  Coding DNA Sequence Number=SeqID_4589
  Gene Ontology: Cellular component=oxygen evolving complex; Biological process=photosynthesis
  Homolog annotation: Hit_ID=P10690; Match level="QueryCoverage=96%, HitCoverage=67%, E-value=3e-14, Identity=44%"; Hit description =Photosystem II 10 kDa polypeptide, chloroplast precursor
  Pfam annotation: Domain name=PsbR; Domain location=3-99; Score=89.1; E_value=1.4e-23; Accession=PF04725.3; Description=Photosystem II 10 kDa polypeptide PsbR
ELQVNIDSPXXLYGSALTRRTVDSQQGERXRXRAVYQFXXKYGXANXDGXXPXYXEDDWSPTXDXYXGGTTGLXIXAXTXAXILGGGALLVYNTSALSG

SEQ ID NO: 10625 - protein, 127 aa, Zea mays
  misc_feature (38)..(38): Xaa can be any naturally occurring amino acid
  Coding DNA Sequence Number=SeqID_4590
  Gene Ontology: Biological process=ubiquitin-dependent protein catabolic process
  Homolog annotation: Hit_ID=Q5ZBL5; Match level="QueryCoverage=76%, HitCoverage=35%, E-value=4e-16, Identity=43%"; Hit description =Putative ubiquitin fusion degradation protein
RLSYVFTQASQEYNFSKFLCVTAGEKITMTEGERQCYXDMLGARSADVVCSVDMDCAVDFMLLLDYTEELAPTAIQGSNEPLQPSRFPGTRRRVDGKPVELPTPSPTAVSVVASICPYRRYLVAKSI

SEQ ID NO: 10626 - protein, 153 aa, Zea mays
  Coding DNA Sequence Number=SeqID_4591
  Gene Ontology: Mol. function=binding; Cellular component=cell outer membrane; Biological process=intein-mediated protein splicing
  Homolog annotation: Hit_ID=A9I254; Match level="QueryCoverage=92%, HitCoverage=4%, E-value=3e-53, Identity=75%"; Hit description =Filamentous hemagglutinin/adhesin
  Pfam annotation: Domain name=Haemagg_act; Domain location=13-146; Score=152.9; E_value=8.6e-43; Accession=PF05860.3; Description =haemagglutination activity domain
  Subcellular localization annotation: CTP_CleavageSite=58; ConfidenceScore=5.57e-01
ASREPGPGISGSNKSVPGQKPVVGVTNGVPVVNIAPPSAGGVSNNRYTQFNVGPSGVVLNNSGAASQTQLAGQVAGNPMLGNQRAATILNQVTAPNPSQLMGMLEVAGNRANVIVANPAGITCNGCGFLNANRATLTTGKPVIGPDGTLGFDI

SEQ ID NO: 10627 - protein, 143 aa, Zea mays
  misc_feature (124)..(124): Xaa can be any naturally occurring amino acid
  Coding DNA Sequence Number=SeqID_4592
HPQYSTSVDACTDHGRRIRSCIISWGCTWETQRAIVRRTPLMKDTSSLKMANLRLARNPHRGRNKCSPPPQLGGGAAGCVVLMGLGGQSVLSCPGASVPDGSRCSVGAAGDPKVPLRPHENGPXGARIMGSNHSRNEKTQNLS

SEQ ID NO: 10628 - protein, 73 aa, Zea mays
  Coding DNA Sequence Number=SeqID_4594
CESSHGSPIAVARYRSAFIELYQTGARAWCIMHIRDRHYLGKDSPGAKGHSMRGVCITIITSHFEQSVSIGHP

SEQ ID NO: 10629 - protein, 83 aa, Zea mays
  Coding DNA Sequence Number=SeqID_4596
  Gene Ontology: Mol. function=calcium ion binding; Cellular component =multivesicular body; Biological process=cellular calcium ion homeostasis
  Homolog annotation: Hit_ID=UPI0000E1EB35; Match level="QueryCoverage =95%, HitCoverage=61%, E-value=3e-17, Identity=52%"; Hit description =PREDICTED: similar to Chain A, Crystal Structure Of Human Translationally ...
  Homolog annotation: Hit description=Controlled Tumour Associated Protein isoform 1
PGSAADTVMNHLLHETSSTKGALEEQRPERVKPFMTGPAEQIPHSLAPFMTGPACVGEALPPDGLDPPVDYREDGVTPFLVIS

SEQ ID NO: 10630 - protein, 124 aa, Zea mays
  misc_feature (91)..(91): Xaa can be any naturally occurring amino acid
  misc_feature (93)..(94): Xaa can be any naturally occurring amino acid
  Coding DNA Sequence Number=SeqID_4597
  Gene Ontology: Mol. function=peptidyl-prolyl cis-trans isomerase activity; Biological process=protein folding
  Homolog annotation: Hit_ID=Q9STK2; Match level="QueryCoverage=53%, HitCoverage=13%, E-value=1e-15, Identity=68%"; Hit description =Peptidyl-prolyl cis-trans isomerase
RGETGGGAPEEKTARGRAPAEKGEQGGQTGGRGTAAGALRGGGKEGGEGEENPGPEKGANPTKRKSRGSAGAQAKRGKGGVAGADAPVLEXAXXEDEDGLPIPKGKSSEVENASGEKMVVDNDE

SEQ ID NO: 10631 - protein, 104 aa, Zea mays
  Coding DNA Sequence Number=SeqID_4598
  Subcellular localization annotation: CTP_CleavageSite=56; ConfidenceScore=5.87e-01
SSGAPFPCRWNGCPPSKSWTLATPPCAGRSPRGPGSSSPGANRTGPTSSPKGPPSRAARTLSGVSYPGALVFYNLVCFPPPGWFSLPDRGVGKELRTPVPGLGV

SEQ ID NO: 10632 - protein, 162 aa, Zea mays
  misc_feature (149)..(162): Xaa can be any naturally occurring amino acid
  Coding DNA Sequence Number=SeqID_4600
QHPRVIHIKNKCKINFLQRNHYQHLSTVLNDLLCSSAAALTFRKSVARPGSDSEGQPRGVAGAARPQTGRPAPRPSRATTASRPANGAAAVLRRKRADRAGEGEAREGSGAPRTRPVRGAERTARPHGDDNGGGCAGQIRHFLSPCLLXXXXXXXXXXXXXX

SEQ ID NO: 10633 - protein, 213 aa, Zea mays
  Coding DNA Sequence Number=SeqID_4602
RLGDVAGAPDCLVRPSTSAPPNGHFGDLSTYSPHPPLPAALTPSLAPPLTIFTAPPPAAVLPFSPVPLTSLSWLVTTHLAPQLHSARHGSSTRLANTLQSLRLHHLLFSPVRARSFAPSSRAGSFTSTSHLPPALCLVALFLHDIPSRAYSLHTSHLTECRPTLSPRHTHRYTQRLATAPCPFVSYSLTACLYGLPLLDSNTPASSRTALILP

SEQ ID NO: 10634 - protein, 202 aa, Zea mays
  Coding DNA Sequence Number=SeqID_4604
  Subcellular localization annotation: CTP_CleavageSite=70; ConfidenceScore=5.41e-01
AIPSASTSTKSNMAPGYHHHFTSAAHYGSAAVKPYPSPTPPNGPKPRTREQTPRTFRRHRARPCPRAPAPAAAKDPTALSDDLITWRRAAWRGGGRRPPPGRSGSSCGRRPWTPCGAWCAGGHASPRGSWACCCARRPPPGRYPAVRDVRRAAGRGAVGAQGDCAPAAPGRAREARGVAAGEGRAAAGGWGAGAAPGRAGRA

SEQ ID NO: 10635 - protein, 101 aa, Zea mays
  misc_feature (50)..(50): Xaa can be any naturally occurring amino acid
  Coding DNA Sequence Number=SeqID_4606
  Gene Ontology: Mol. function=lipoic acid binding; Cellular component =glycine cleavage complex; Biological process=glycine catabolic process
  Homolog annotation: Hit_ID=Q6H713; Match level="QueryCoverage=81%, HitCoverage=43%, E-value=2e-16, Identity=59%"; Hit description =Putative glycine decarboxylase complex H-protein
  Pfam annotation: Domain name=GCV_H; Domain location=2-96; Score=13.5; E_value=1.3e-09; Accession=PF01597.9; Description=Glycine cleavage H -protein
MNRGLGDVVYVELPEVGVSVSLWKNTSAVESVKATSDINSPVSGSVWLRXNSYSPMSGEVVEVNEKLSDKPRLLNTTTVGNGWLIKDQAHHYQVSLIRSWM

SEQ ID NO: 10636 - protein, 166 aa, Zea mays
  misc_feature (27)..(27): Xaa can be any naturally occurring amino acid
  misc_feature (46)..(46): Xaa can be any naturally occurring amino acid
  misc_feature (106)..(106): Xaa can be any naturally occurring amino acid
  Coding DNA Sequence Number=SeqID_4607
  Gene Ontology: Mol. function=RNA-directed DNA polymerase activity; Biological process=RNA-dependent DNA replication
  Homolog annotation: Hit_ID=Q7XBD9; Match level="QueryCoverage=93%, HitCoverage=8%, E-value=8e-65, Identity=78%"; Hit description =Putative gag-pol
GRNGFPGPPSRSARGEPQQPQQQEGGXGGAFPCVDREVNVIFGGHXGRQESKRQQKLNDRQILMAATGPPAPYRWSEHSITFTRADQWLNFDHPGKYPLLVDPVIXESRVKKVLVDEGSSINITFPRTLQGLGVNLKEFHESDTPFFGIVPTEGEYPLGHMGGGGG

SEQ ID NO: 10637 - protein, 101 aa, Zea mays
  Coding DNA Sequence Number=SeqID_4608
LQDYFCQSTTRFIRCLLGLFYSFGSAVHLLNPALLIKGIEPPSYYNSPASTLSGEVSCHSLFRLFFLASTFFFSAGIMTTSAPSFLCADDGPTEGSEGAAF

SEQ ID NO: 10638 - protein, 192 aa, Zea mays
  Coding DNA Sequence Number=SeqID_4609
  Subcellular localization annotation: CTP_CleavageSite=50; ConfidenceScore=5.44e-01
APSVIHAAQRFFHPQSAIGWPHAFSGRPCSPRPSLVIARRAPCPARPEQTANHGVGPQHLGVGRPSFIFLRWPLRALLPHDELTRNSLPARAHPGCDLAKLHSPCSLSPAVHTPVQLPCHHPWLPLLGPLPAANPISAGTLIFSHPPWPTSSPFSTGTLAENRAKRRVWIKATHKTMSTDDPEARWTKRVSE

SEQ ID NO: 10639 - protein, 136 aa, Zea mays
  Coding DNA Sequence Number=SeqID_4611
  Gene Ontology: Mol. function=alcohol dehydrogenase activity; Cellular component=membrane; Biological process=electron transport
  Homolog annotation: Hit_ID=A9I0P1; Match level="QueryCoverage=100%, HitCoverage=31%, E-value=2e-64, Identity=82%"; Hit description =Cytochrome C
YLALAGNCMACHTARGGKAYAGGTPIPTPFGTIYGPNITPDEKTGIGAWSADDFWQALHNGKSRDGTLLYPAFPYTEYTRVTRADADALFAYLRTITPVNQPSRAPDLDFPYDQRLLLAAWRALYFRPGVQEADPG

SEQ ID NO: 10640 - protein, 105 aa, Zea mays
  misc_feature (40)..(40): Xaa can be any naturally occurring amino acid
  Coding DNA Sequence Number=SeqID_4612
  Gene Ontology: Mol. function=glyceraldehyde-3-phosphate dehydrogenase (phosphorylating) activity; Cellular component=cytoplasm; Biological process=glucose metabolic process
  Homolog annotation: Hit_ID=P08735; Match level="QueryCoverage=94%, HitCoverage=29%, E-value=2e-25, Identity=66%"; Hit description =Glyceraldehyde-3-phosphate dehydrogenase, cytosolic 1
  Pfam annotation: Domain name=Gp_dh_N; Domain location=1-95; Score= -48.2; E_value=1.7e-05; Accession=PF00044.14; Description =Glyceraldehyde 3-phosphate dehydrogen
IPHSVDSRTLLFGDNTVTVFDIIYPVRNHIFFTPIPPMSXSTEVFTDQDKNKEHLKVGAHKVVISAPSKDAPMFVVRFYADNYTSDVNIVSNASCTTNCLAPLAN

SEQ ID NO: 10641 - protein, 133 aa, Zea mays
  Coding DNA Sequence Number=SeqID_4613
  Homolog annotation: Hit_ID=A3AYJ7; Match level="QueryCoverage=36%, HitCoverage=12%, E-value=7e-11, Identity=77%"; Hit description =Putative uncharacterized protein
GTAAGGAGRVPVPGGGGRGAGARGLGGGGEGGRARAGGVKVRWGGRGGGVGGRRRCRAGGGAVRAAGAGGGLGGRTARGAVRPAAQEVGRRTEELAPRLDRLSDAVGGVFRAALGLRNAELDCLMVGPAGKPV

SEQ ID NO: 10642 - protein, 238 aa, Zea mays
  misc_feature (191)..(191): Xaa can be any naturally occurring amino acid
  Coding DNA Sequence Number=SeqID_4614
  Gene Ontology: Mol. function=sequence-specific DNA binding; Cellular component=nucleus; Biological process=regulation of transcription, DNA-dependent
  Homolog annotation: Hit_ID=Q2QM96; Match level="QueryCoverage=85%, HitCoverage=24%, E-value=2e-91, Identity=83%"; Hit description=Class III HD-Zip protein 4, putative, expressed
  Pfam annotation: Domain name=Homeobox; Domain location=20-80; Score =63.9; E_value=5.3e-16; Accession=PF00046.19; Description=Homeobox domain
  Pfam annotation: Domain name=bZIP_1; Domain location=61-120; Score =9.3; E_value=0.032; Accession=PF00170.11; Description=bZIP transcription factor
  Pfam module annotation: Pfam domain module=Homeobox::bZIP_1; Domain location=20-80::61-120
MAAVASRERLSPGAAPQVDAGKYVRYTPEQVEALERVYSECPKPSSLRRQHLIRDCPILRNIEPKQIKVWFQNRRCREKQRKESSRLQTVNRKLSAMNKLLMEENDRLQKQVSRLVFDNGYMKNRLHSPSVATTDTSCESVVTSGQHNQQQNPAVLHPPQRDANNPAGLLAIAEETLAEFMSKATGTAVTXLQMVAIRRAADSVRSSLFRASRTSPVACVCRAWGGRCRTSRRWRGRS

SEQ ID NO: 10643 - protein, 101 aa, Zea mays
  Coding DNA Sequence Number=SeqID_4615
QSVRSPSLLSRCLHAVRDRPQLPVTTPEGVILLLHSQQVLESGIAYPFGEGCFTDFLLRFIGCSPPSDCITMTAEAAHEDYGKCWHLSLVFHIQIPNLSTC

SEQ ID NO: 10644 - protein, 394 aa, Zea mays
  Coding DNA Sequence Number=SeqID_4617
  Homolog annotation: Hit_ID=Q84MG8; Match level="QueryCoverage=93%, HitCoverage=68%, E-value=1e-117, Identity=62%"; Hit description =Putative uncharacterized protein
IPGPADAYAQIEKLKVRIDMIGSACQTASKVIARGRKSYGLGSRPWTNLGPTLDKAQAAKIQEQEGLLRAAVNYGEGLRVPGDQRHPQSLPIHLIEVLPLGDGAQNFGDSSGSYPKNMSTFAPNSVNSQGNQIQASGGQLLGRPAPSPGTTGTPNFENVSTPPMPYANSPRSGTNMMNTPSPQQHLTPQQQRQKLMQHSQPLHQPVRPSAAGMLAQSALPQLQDLQGQAQQKLQVPGQQQMQYNQALSQQFHNRQMQPGRMQPGMAQSQLNQGTQLRSHLGQFTGAANNAMFNAAQASSNSQMMANMHGSQSLMPQMQYGMAGGHPHRSHPQMLTDQMFGMGATNSSMMGMQQQQQGLYGNMQAGAQNVPQGMAGLQNQTQNPNFTQQRQQNQQ

SEQ ID NO: 10645 - protein, 159 aa, Zea mays
  Coding DNA Sequence Number=SeqID_4618
  Gene Ontology: Mol. function=hydrolase activity, acting on ester bonds; Biological process=lipid metabolic process
  Homolog annotation: Hit_ID=Q0C8M6; Match level="QueryCoverage=87%, HitCoverage=9%, E-value=2e-52, Identity=66%"; Hit description =Putative uncharacterized protein
  Pfam annotation: Domain name=FG-GAP; Domain location=21-50; Score =32.1; E_value=2.1e-06; Accession=PF01839.13; Description=FG-GAP repeat
  Pfam annotation: Domain name=FG-GAP; Domain location=76-105; Score =14.1; E_value=0.11; Accession=PF01839.13; Description=FG-GAP repeat
  Pfam module annotation: Pfam domain module=FG-GAP::FG-GAP; Domain location=21-50::76-105
GSSPPSFNHIGLWKASDAAYPQAQVRLADMDGDGRADFIGLSPNGDVRIWRNGWVKDKPEYFQALGLRFPGQNKGDLRGVRFEDINGDGRDDWMWVSNTGATSTFTNSRSCARGKLGDGLNIAWREAFNGNANSGPTHLGGFGDDVRNRIHPPYHILIP

SEQ ID NO: 10646 - protein, 163 aa, Zea mays
  Coding DNA Sequence Number=SeqID_4619
LTLKKNWEGYLFFFPLFRPWGKKKVLKKLFFFPGGYQIFFLISKKASPLFFPNQGILNFGLGANPPLSRLGFLGLGPFGKIVRYSFFPPFLIESRFPFSGLAGSNPNKNNFPGGVFPNNFFFWKQRGGVFFFFPPTPFPINQGGGPPFFPRGDLGTILSPGPF

SEQ ID NO: 10647 - protein, 190 aa, Zea mays
  Coding DNA Sequence Number=SeqID_4621
KLVKFMGLSALDGDSTSGPINRMVKNFMSIFSGLWPGVSLERILGVVLSKENRFEGTWGFKTFVAEWNHPQKKFGGNGAPFPNFQKSGGENPTPGGVVFLRNFRKGGPPWGPPSKGGFRGGFSRPHSRAFGTFFHLASLVFLEPKKNPGAETKNNFFKTSKKNPPLPIQRFFYCQICCGASAPLWVGVLI

SEQ ID NO: 10648 - protein, 176 aa, Zea mays
  Coding DNA Sequence Number=SeqID_4623
  Subcellular localization annotation: CTP_CleavageSite=30; ConfidenceScore=5.11e-01
IWGFLGKIWFPIFLGVFFGKFSPPFSKNFSGKREKGESPFFVFGAHFLAPGGPHPPGGKTPAPARGAIGLFPGGVLWFFSYLGTRSFPVFMCRCRFAVWSLDFFFFTRHTFGGVRAWGRASASKTGRRGPRTALPSSGHNLGSTPTVSPKLIARMATYSALPTGTAEASDRIACSP

SEQ ID NO: 10649 - protein, 148 aa, Zea mays
  Coding DNA Sequence Number=SeqID_4625
  Subcellular localization annotation: CTP_CleavageSite=3; ConfidenceScore=5.20e-01
VFSAPARKKPGSDLIPPPGENPPGADFFWFLTLFFGTKLTQKPRENFSFKTPSSGSGPMTPSSYGATAFRFDGKPNVPPSSAPKIFPPPPAVILFPPGPRRFGLPRRQNPGGGAPPFPFLEAPTKFGRPRPPLFLGIPQQDENLNLNP

SEQ ID NO: 10650 - protein, 174 aa, Zea mays
  misc_feature (10)..(10): Xaa can be any naturally occurring amino acid
  misc_feature (28)..(28): Xaa can be any naturally occurring amino acid
  misc_feature (37)..(37): Xaa can be any naturally occurring amino acid
  Coding DNA Sequence Number=SeqID_4627
  Gene Ontology: Mol. function=transporter activity; Cellular component= integral to membrane; Biological process=transport
  Homolog annotation: Hit_ID=A5DDB4; Match level="QueryCoverage=89%, HitCoverage=26%, E-value=2e-13, Identity=31%"; Hit description =Putative uncharacterized protein
TLNRRTFWGXRRLILLCTAFCFVGSILXAERLSMTMXIAGSLMAGVGSGSTSLLYTVASEILPRRWRPLAQAGVNIMNSFAGIFTLLVGFALTKQSDEGFRIIWYIGIGLFAVNFLAVFCLFKPPPRPLEVSLTTRDKLKALDWIGYFLFSLGMILFSVGLTWANNPWGGGTSD

SEQ ID NO: 10651 - protein, 66 aa, Zea mays
  Coding DNA Sequence Number=SeqID_4628
EFMCIALFHIMSVVCFIVTFQSPSIINQKPAFASVSSEEIAATITLVSESPTQSINRRISRHNLLR

SEQ ID NO: 10652 - protein, 108 aa, Zea mays
  Coding DNA Sequence Number=SeqID_4630
  Subcellular localization annotation: CTP_CleavageSite=40; ConfidenceScore=5.12e-01
KKKKKRKSTYSHRTITTVAGDAGGGQKHAPATVRRDRTARGDAGNGFPSKGSDRAVFREFVFRLTDRAGVGTPPAAREYLGRLPVGRWTFLPLHVLPFVQERPVACGN

SEQ ID NO: 10653 - protein, 81 aa, Zea mays
  Coding DNA Sequence Number=SeqID_4632
RPASDGGPRFGDFLGRDHVFCLFYIISGGRSFPPRPSSFPLLNSTQYWLYKINIRKCFHHQLLNGDWGQITPNIMRYHKVK

SEQ ID NO: 10654 - protein, 218 aa, Zea mays
  Coding DNA Sequence Number=SeqID_4634
  Gene Ontology: Mol. function=four-way junction helicase activity; Biological process=response to DNA damage stimulus
  Homolog annotation: Hit_ID=Q2KVY2; Match level="QueryCoverage=89%, HitCoverage=54%, E-value=6e-99, Identity=93%"; Hit description =Holliday junction ATP-dependent DNA helicase ruvB
  Pfam annotation: Domain name=AAA; Domain location=8-187; Score=121.2; E_value=3e-33; Accession=PF00004.19; Description=ATPase family associated with various cellular activities (AAA)
  Pfam annotation: Domain name=AAA_3; Domain location=8-128; Score= -6.8; E_value=0.0018; Accession=PF07726.2; Description=ATPase family associated with various
  Pfam annotation: Domain name=AAA_5; Domain location=8-135; Score =25.4; E_value=3.4e-05; Accession=PF07728.4; Description=ATPase family associated with various
  Pfam annotation: Domain name=Mg_chelatase; Domain location=4-140; Score=-134.2; E_value=0.0018; Accession=PF01078.11; Description =Magnesium chelatase, subunit ChlI
  Pfam module annotation: Pfam domain module=AAA::AAA_3::AAA_5::Mg _chelatase; Domain location=8-187::8-128::8-135::4-140
KRGEALDHVLLFGPPGLGKTTLAHIIAHEMGVQLRQTSGPVLERPGDLAALLTNLEKNDVLFIDEIHRLSPVVEEILYPALEDFQIDILIGEGPAARSVKLDLQPFTLVGATTRAGMLTNPLRDRFGIVSRLEFYNADDLGRIVTRSAGLLNAGITPDGAAEVARRARGTPRIANRLLRRVRDYAEVKAGGTVDADVAGRALARARGRPGRSRTRSAR

SEQ ID NO: 10655 - protein, 120 aa, Zea mays
  misc_feature (50)..(50): Xaa can be any naturally occurring amino acid
  Coding DNA Sequence Number=SeqID_4635
  Homolog annotation: Hit_ID=Q10F65; Match level="QueryCoverage=75%, HitCoverage=8%, E-value=1e-09, Identity=41%"; Hit description =Retrotransposon protein, putative, unclassified
ELTSPPPPPPTRGGARWENWCSDWVIASAEANDRLVLPSDGPTLDRKLWXTKSSLAPVFLPILDRIKGLAMGGLTLMHVVNDLLKRRTAPLQRRPRLCSWFTRPERHRPDPARGRGSTWS

SEQ ID NO: 10656 - protein, 295 aa, Zea mays
  Coding DNA Sequence Number=SeqID_4636
  Subcellular localization annotation: CTP_CleavageSite=26; ConfidenceScore=5.32e-01
PQHAARTAQPPQQNCTRQPLAARLLLARPVGRLLVRPWPRPPARLRLWLWLAASCGLRSCLTTSAFLLCAARWALAGRRPHGRAPLHCSTAASACLLCCLLCCLLCCACSACFGRATLLRLLALLLANSAACKLQILLDVTKIIADLAYNLQGILHLMHIVYITCTRTKRHRGKESMDRCNSWRHHTCVHKTRLSPSEREGKKVKYTEKIAEEEDEDSEYSTLAPSVGHHGDDDNHVDAGRGCWILWGAEEWEVGAYQEPFNTYEYYHNESSSIRVCCERGGPLCRWKTVKELVF

SEQ ID NO: 10657 - protein, 122 aa, Zea mays
  misc_feature (23)..(23): Xaa can be any naturally occurring amino acid
  Coding DNA Sequence Number=SeqID_4638
  Homolog annotation: Hit_ID=A2ZNX9; Match level="QueryCoverage=88%, HitCoverage=13%, E-value=1e-34, Identity=64%"; Hit description =Putative uncharacterized protein
MFWWRRIIQIFRKVRKYQHSHFXFDSIIESLDSKFCNLGKCGYKAWLKLPHSLSKDLLKRQLLENISNWRESSGTALRQVSDKEVDQVTDRWDANLEAFDISIAIENDILEALVGEFAVDLW

SEQ ID NO: 10658 - protein, 278 aa, Zea mays
  misc_feature (80)..(80): Xaa can be any naturally occurring amino acid
  misc_feature (124)..(124): Xaa can be any naturally occurring amino acid
  Coding DNA Sequence Number=SeqID_4639
  Homolog annotation: Hit_ID=A2YP74; Match level="QueryCoverage=35%, HitCoverage=20%, E-value=3e-07, Identity=31%"; Hit description =Putative uncharacterized protein
  Subcellular localization annotation: CTP_CleavageSite=86; ConfidenceScore=5.24e-01
NFVGRNRKRFKFISPAPFFLFPIFLKKKKGPLKVFFLTISPLAVGAFFQKKGIVQGANSVPFFCMGKLRMSLFKKKPFFXKEFFSSSNHFWGFKGGGNPSPQRFFWQPKKGPTFFWPFEPTRKXNWGFIFPRGLPLGAKFILGGPGDKPPGGRETPTPLGTLKPARFLNSPSVSSFLPSNPWGYGHPLYPFISVVPGFGPDPFFLILGHRAVSPRLGRVVVKYTSFLHKEQYWEFLGFKKKKKKKKKKKKKKKKKKKKKKKKKKKKKKKNRGGARYPI

SEQ ID NO: 10659 - protein, 74 aa, Zea mays
  Coding DNA Sequence Number=SeqID_4640
  Gene Ontology: Mol. function=hydrolase activity, acting on carbon -nitrogen (but not peptide) bonds, in linear amides; Biological process=metabolic process
  Homolog annotation: Hit_ID=A7PLN9; Match level="QueryCoverage=66%, HitCoverage=10%, E-value=2e-14, Identity=65%"; Hit description =Chromosome chr7 scaffold_20, whole genome shotgun sequence
DDTLDQISQRLDAPLTPRLVVPIDVKKQPWEQKVPLHNRWHPDIPPVADVTEGELDGIALITISQPARGGCAIA

SEQ ID NO: 10660 - protein, 125 aa, Zea mays
  Coding DNA Sequence Number=SeqID_4641
  Subcellular localization annotation: CTP_CleavageSite=48; ConfidenceScore=5.47e-01
KAAHQRHAGPSSRPRRGRHDASRTRRGGRASTPGRASTGERGHRGSRRAAMAAPWPGRGRGRAGKRARAGRGRRVPGTGERGRARSGLASAGRGQGRRAGAKGEAERARGGRAPWPVSTGTGWPG

SEQ ID NO: 10661 - protein, 153 aa, Zea mays
  misc_feature (108)..(108): Xaa can be any naturally occurring amino acid
  misc_feature (110)..(114): Xaa can be any naturally occurring amino acid
  misc_feature (117)..(117): Xaa can be any naturally occurring amino acid
  misc_feature (120)..(120): Xaa can be any naturally occurring amino acid
  misc_feature (123)..(123): Xaa can be any naturally occurring amino acid
  misc_feature (126)..(127): Xaa can be any naturally occurring amino acid
  misc_feature (129)..(129): Xaa can be any naturally occurring amino acid
  misc_feature (135)..(135): Xaa can be any naturally occurring amino acid
  misc_feature (137)..(137): Xaa can be any naturally occurring amino acid
  misc_feature (139)..(145): Xaa can be any naturally occurring amino acid
  misc_feature (147)..(149): Xaa can be any naturally occurring amino acid
  misc_feature (151)..(151): Xaa can be any naturally occurring amino acid
  misc_feature (153)..(153): Xaa can be any naturally occurring amino acid
  Coding DNA Sequence Number=SeqID_4643
  Subcellular localization annotation: CTP_CleavageSite=38; ConfidenceScore=5.14e-01
KFVARPLYFSVADAQLLALARVPLLSSGREQLPGAWTRLSALPVPITACAFSLPNRPLSSSPSRAPRGSPLPLLGRRRPALVKDPPRPTPPLACLSCSCLSPPPPPKXKXXXXXTHXIYXHKXKKXXKXGGGGGXHXPXXXXXXXTXXXGXDX

SEQ ID NO: 10662 - protein, 110 aa, Zea mays
  misc_feature (2)..(3): Xaa can be any naturally occurring amino acid
  misc_feature (5)..(10): Xaa can be any naturally occurring amino acid
  misc_feature (12)..(12): Xaa can be any naturally occurring amino acid
  Coding DNA Sequence Number=SeqID_4645
VXXRXXXXXXPXFQTSRATDPTPRNGGPKISDPFGVDGAHKQLGRRRGRLMLFILSISDLLQACRECQRAARCPGIARTYPRIGYCRAFSPYINSQLCLSNCSLPIPYTK

SEQ ID NO: 10663 - protein, 98 aa, Zea mays
  Coding DNA Sequence Number=SeqID_4646
GRGCRCLHVAGMTPSKAGFCCLGPWMDHHRNNHQHMPQVGNTVKVFETSNAMVARDPPQRTQLIHAMMRWQECILLFFQRIFHVKHETEQVPTKNRMF

SEQ ID NO: 10664 - protein, 105 aa, Zea mays
  misc_feature (4)..(4): Xaa can be any naturally occurring amino acid
  misc_feature (9)..(9): Xaa can be any naturally occurring amino acid
  misc_feature (14)..(14): Xaa can be any naturally occurring amino acid
  misc_feature (23)..(23): Xaa can be any naturally occurring amino acid
  misc_feature (29)..(29): Xaa can be any naturally occurring amino acid
  misc_feature (38)..(38): Xaa can be any naturally occurring amino acid
  misc_feature (51)..(51): Xaa can be any naturally occurring amino acid
  misc_feature (54)..(54): Xaa can be any naturally occurring amino acid
  misc_feature (67)..(67): Xaa can be any naturally occurring amino acid
  Coding DNA Sequence Number=SeqID_4647
WQRXARSSXLLSCXSSVFITKKXSKVIIXPQALIPREXLPQELIPPGPDYXQQXPFPKEFEATAAEXRSRTSGAGIRKLSRPRLRRHRGRKALMSILLKGVTRHH

SEQ ID NO: 10665 - protein, 117 aa, Zea mays
  misc_feature (65)..(65): Xaa can be any naturally occurring amino acid
  Coding DNA Sequence Number=SeqID_4649
  Homolog annotation: Hit_ID=A3BHN5; Match level="QueryCoverage=52%, HitCoverage=5%, E-value=2e-18, Identity=72%"; Hit description =Putative uncharacterized protein
RLPGRLLRAARPTADKAWSGSGELADRNEVYADAEAWVDAGKVLDDVIELIGDAAAGSAPLEIVXEVVGSIKEFRFHIPVKGLISRSVSISPAYSGNHKPGLLLSASVGGSRFPRIF

SEQ ID NO: 10666 - protein, 86 aa, Zea mays
  misc_feature (18)..(18): Xaa can be any naturally occurring amino acid
  misc_feature (67)..(67): Xaa can be any naturally occurring amino acid
  misc_feature (70)..(70): Xaa can be any naturally occurring amino acid
  Coding DNA Sequence Number=SeqID_4650
TRRGGRPPWAGWTMRLAXKEMGAGSRPPAVPRCGEWPHPWGSARYLPSFSGGGGATPGGIACACSRXSYXMTIMHSYTFESAARDC

SEQ ID NO: 10667 - protein, 65 aa, Zea mays
  Coding DNA Sequence Number=SeqID_4652
EDGIHLLDVVLDVVVSVDQPARGAKLLNDEGAEERNIPDTLVSGTVVGSEIDEQAELSSPRAIGM

SEQ ID NO: 10668 - protein, 301 aa, Zea mays
  Coding DNA Sequence Number=SeqID_4653
  Homolog annotation: Hit_ID=Q9LVZ7; Match level="QueryCoverage=100%, HitCoverage=100%, E-value=1e-166, Identity=98%"; Hit description =Arabidopsis thaliana genomic DNA, chromosome 3, P1 clone: MSJ11
  Pfam annotation: Domain name=PAP2; Domain location=169-284; Score= -5.7; E_value=0.014; Accession=PF01569.12; Description=PAP2 superfamily
MSAAAAETDVSLRRRSNSLNGNHTNGVAIDGTLDNNNRRVGDTNTHMDISAKKTDNGYANGVGGGGWRSKASFTTWTARDIVYVVRYHWIPCMFAAGLLFFMGVEYTLQMIPARSEPFDLGFVVTRSLNRVLASSPDLNTVLAALNTVFVGMQTTYIVWTWLVEGRARATIAALFMFTCRGILGYSTQLPLPQDFLGSGVDFPVGNVSFFLFFSGHVAGSMIASLDMRRMQRLRLAMVFDILNVLQSIRLLGTRGHYTIDLAVGVGAGILFDSLAGKYEEMMSKRHLGTGFSLISKDSLVN

SEQ ID NO: 10669 - protein, 203 aa, Zea mays
  Coding DNA Sequence Number=SeqID_4654
APAQLLQPAAHQDPRSRALRRFWSSDTRPRKKLDPTADIDFDEPIPILRSFCARHYIQKDNMKWRHHSEGPGLGPGENRPELPRGRGPMRASPSAPFATRGREQAWCKHGAPRRPLPRPPGGVWPLPAGLGGAQVGPQVRRHNIPGPTAHSHSAAAYRPAPALRNPVDERGRQVRGPRQRSTAGSREPRPRHGVAAGEVSAWR

SEQ ID NO: 10670 - protein, 143 aa, Zea mays
  misc_feature (80)..(143): Xaa can be any naturally occurring amino acid
  Coding DNA Sequence Number=SeqID_4656
  Subcellular localization annotation: CTP_CleavageSite=20; ConfidenceScore=5.29e-01
NKRVPGKSHRAAFSVIQTTNCPTLSTLLSTSKLLAIVLHKCDRGALVSNTKARKISGTYLFPLPKKREAGKGLSPRNTSXXXXXXXXXXXXXXXXXXXXXXXXXXXXXXXXXXXXXXXXXXXXXXXXXXXXXXXXXXXXXXXX

SEQ ID NO: 10671 - protein, 749 aa, Zea mays
  Coding DNA Sequence Number=SeqID_4658
  Gene Ontology: Mol. function=aspartic-type endopeptidase activity; Cellular component=chromatin; Biological process=chromatin assembly or disassembly
  Homolog annotation: Hit_ID=Q2R8S5; Match level="QueryCoverage=81%, HitCoverage=40%, E-value=0.0, Identity=64%"; Hit description =Retrotransposon protein, putative, Ty3-gypsy subclass
  Pfam annotation: Domain name=zf-H2C2; Domain location=305-346; Score =10.4; E_value=0.016; Accession=PF09337.1; Description=His(2)-Cys(2) zinc finger
ISVDRAKVKEIMEWRVPTTVTEIRSFLGLAGYYRRFIEGFSKIAKPMTSLLEKGREFKWNEKCQDSFEQLKKRLMSPPVLVMPDLQKGFNIYCDACGQGLGWTLMQERHVIAYASRQLWKHELNYPTHDLELAAVVHALKIWRHYIMGTKCQVYTDHKSLKYIFTQKDLNLRQRRWLELIKDYDLEIHYHPGRANLVADALSRKEHVHSAIVAQLPDEIVEDFRRLNLGIVAHTEGVIIDVEPTLEQEIRKGQNGDAKIQEIKDLITEGRGPEFTEDEQGTVWFKDRMCVPDIESLRETILKEAHDSDYSIHPGSTKMYQDLKRKYWWYGLKRDVAAHVAMCDVCQRVKAKHQRPDGLLHPLKIPEWKWEEIGMDFITGLPRTQKGYDVIWTDGQTERTNQVLEDMLRACALQHGGSWDKSLPYAEFSYNNSYQASLKMSPFEALYGRKCRTPLYWDQTGERQFFGPELIQEAEEQVRIIRENLRVAQTRQKSYADNRRRPLEFEEGDYVYLKVSPLRGMRRFKVKGKLSPCYIAPFLIFRRVGEMAYQLELPATLSDVHNVFHVSQLKKCLRVPEEQLPMEELSVQGDLTYTEYPIKILDTLTRVTRNKSRARLCLLLATDPGGPLVWLRFLLPVAGEWDLGARSVLNEIAENGGLMRGAVGVFRDPRSRASNDQFHGALVHIMACLVASAPLGDSGWASQRAAIGPLLGELSACVYVGNREEPVTEDPGEQQVEVAKQELIEGKLCP

SEQ ID NO: 10672 - protein, 188 aa, Zea mays
  misc_feature (27)..(27): Xaa can be any naturally occurring amino acid
  misc_feature (52)..(52): Xaa can be any naturally occurring amino acid
  misc_feature (61)..(61): Xaa can be any naturally occurring amino acid
  misc_feature (69)..(69): Xaa can be any naturally occurring amino acid
  misc_feature (76)..(76): Xaa can be any naturally occurring amino acid
  misc_feature (90)..(90): Xaa can be any naturally occurring amino acid
  misc_feature (95)..(95): Xaa can be any naturally occurring amino acid
  misc_feature (97)..(97): Xaa can be any naturally occurring amino acid
  misc_feature (106)..(106): Xaa can be any naturally occurring amino acid
  misc_feature (112)..(116): Xaa can be any naturally occurring amino acid
  misc_feature (118)..(123): Xaa can be any naturally occurring amino acid
  misc_feature (125)..(125): Xaa can be any naturally occurring amino acid
  misc_feature (127)..(127): Xaa can be any naturally occurring amino acid
  misc_feature (129)..(129): Xaa can be any naturally occurring amino acid
  misc_feature (132)..(188): Xaa can be any naturally occurring amino acid
  Coding DNA Sequence Number=SeqID_4659
  Subcellular localization annotation: CTP_CleavageSite=58; ConfidenceScore=5.59e-01
NFFEPAAAPSPRIRKLGGLGNHFRFNXRRTSKAGRRASSGGFAGRTVTHRRXGCGAIRAQXTGGGLPQXPTRPAGXRGKPKFYPGPNDVXGPGVXRXPARPKPNKXQGRASXXXXXGXXXXXXRXLXWXKKXXXXXXXXXXXXXXXXXXXXXXXXXXXXXXXXXXXXXXXXXXXXXXXXXXXXXXXXX

SEQ ID NO: 10673 - protein, 128 aa, Zea mays
  misc_feature (10)..(10): Xaa can be any naturally occurring amino acid
  misc_feature (14)..(16): Xaa can be any naturally occurring amino acid
  misc_feature (18)..(18): Xaa can be any naturally occurring amino acid
  misc_feature (23)..(23): Xaa can be any naturally occurring amino acid
  misc_feature (25)..(25): Xaa can be any naturally occurring amino acid
  misc_feature (33)..(34): Xaa can be any naturally occurring amino acid
  misc_feature (37)..(37): Xaa can be any naturally occurring amino acid
  misc_feature (39)..(39): Xaa can be any naturally occurring amino acid
  misc_feature (43)..(43): Xaa can be any naturally occurring amino acid
  misc_feature (48)..(48): Xaa can be any naturally occurring amino acid
  misc_feature (51)..(51): Xaa can be any naturally occurring amino acid
  misc_feature (53)..(53): Xaa can be any naturally occurring amino acid
  misc_feature (56)..(56): Xaa can be any naturally occurring amino acid
  misc_feature (60)..(60): Xaa can be any naturally occurring amino acid
  misc_feature (62)..(62): Xaa can be any naturally occurring amino acid
  misc_feature (65)..(65): Xaa can be any naturally occurring amino acid
  misc_feature (69)..(69): Xaa can be any naturally occurring amino acid
  misc_feature (71)..(71): Xaa can be any naturally occurring amino acid
  misc_feature (75)..(75): Xaa can be any naturally occurring amino acid
  misc_feature (82)..(82): Xaa can be any naturally occurring amino acid
  misc_feature (92)..(92): Xaa can be any naturally occurring amino acid
  misc_feature (102)..(104): Xaa can be any naturally occurring amino acid
  misc_feature (108)..(108): Xaa can be any naturally occurring amino acid
  misc_feature (128)..(128): Xaa can be any naturally occurring amino acid
  Coding DNA Sequence Number=SeqID_4661
  Gene Ontology: Mol. function=catalytic activity; Cellular component =cytosol; Biological process=pyridoxine biosynthetic process
  Homolog annotation: Hit_ID=Q69LA6; Match level="QueryCoverage=93%, HitCoverage=37%, E-value=2e-30, Identity=65%"; Hit description =Probable pyridoxal biosynthesis protein PDX1.1
  Pfam annotation: Domain name=SOR_SNZ; Domain location=18-128; Score =1.5; E_value=0.0013; Accession=PF01680.7; Description=SORSNZ family
  Subcellular localization annotation: CTP_CleavageSite=26; ConfidenceScore=5.23e-01
CTATARQLLXPSQXXXSXTFSVXVXLTQMLRGXXIMXVXTPEXARLAXEAXAXAVXTLEXAXPAXIRAXGXVSRXSDPGLIXDIKRAVTIPXMFQVRIEHFXXXQILXAVGVDYLDESEVLTPADDAX

SEQ ID NO: 10674 - protein, 171 aa, Zea mays
  misc_feature (1)..(3): Xaa can be any naturally occurring amino acid
  misc_feature (6)..(8): Xaa can be any naturally occurring amino acid
  misc_feature (11)..(12): Xaa can be any naturally occurring amino acid
  misc_feature (14)..(20): Xaa can be any naturally occurring amino acid
  misc_feature (23)..(23): Xaa can be any naturally occurring amino acid
  misc_feature (26)..(32): Xaa can be any naturally occurring amino acid
  misc_feature (35)..(37): Xaa can be any naturally occurring amino acid
  misc_feature (39)..(39): Xaa can be any naturally occurring amino acid
  misc_feature (42)..(43): Xaa can be any naturally occurring amino acid
  misc_feature (49)..(49): Xaa can be any naturally occurring amino acid
  misc_feature (51)..(51): Xaa can be any naturally occurring amino acid
  misc_feature (53)..(54): Xaa can be any naturally occurring amino acid
  misc_feature (57)..(58): Xaa can be any naturally occurring amino acid
  misc_feature (63)..(64): Xaa can be any naturally occurring amino acid
  misc_feature (67)..(67): Xaa can be any naturally occurring amino acid
  misc_feature (71)..(71): Xaa can be any naturally occurring amino acid
  misc_feature (77)..(78): Xaa can be any naturally occurring amino acid
  misc_feature (83)..(83): Xaa can be any naturally occurring amino acid
  misc_feature (85)..(85): Xaa can be any naturally occurring amino acid
  misc_feature (87)..(88): Xaa can be any naturally occurring amino acid
  misc_feature (91)..(91): Xaa can be any naturally occurring amino acid
  misc_feature (94)..(95): Xaa can be any naturally occurring amino acid
  misc_feature (99)..(99): Xaa can be any naturally occurring amino acid
  misc_feature (107)..(107): Xaa can be any naturally occurring amino acid
  misc_feature (140)..(140): Xaa can be any naturally occurring amino acid
  Coding DNA Sequence Number=SeqID_4662
XXXFPXXXGGXXPXXXXXXXGGXPLXXXXXXXRGXXXKXGGXXPPKNKXPXMXXPPXXGGNTXXPPXPTNXGLFSKXXPSGVXGXRXXLWXTSXXPPPXPFEFACPXLFVSPNGPGPWPSLRRSLSLAACGWGDQSQMEXRRDPEARRGRWEMGSRKVAAAHVGEKERIEI

SEQ ID NO: 10675 - protein, 107 aa, Zea mays
  Coding DNA Sequence Number=SeqID_4664
QAYDFAPVVHDPFKRLLILYWTLEYFYYTFPSIHRPLMHYCYDRSDFMSVSSHTERHHHLKLVLCRPAPLWSHALMPAWTLLMIGHIAYPVGHDASLSAELYKPNLS

SEQ ID NO: 10676 - protein, 500 aa, Zea mays
  misc_feature (49)..(49): Xaa can be any naturally occurring amino acid
  misc_feature (56)..(56): Xaa can be any naturally occurring amino acid
  misc_feature (66)..(66): Xaa can be any naturally occurring amino acid
  misc_feature (214)..(214): Xaa can be any naturally occurring amino acid
  misc_feature (231)..(231): Xaa can be any naturally occurring amino acid
  misc_feature (253)..(253): Xaa can be any naturally occurring amino acid
  misc_feature (258)..(258): Xaa can be any naturally occurring amino acid
  misc_feature (431)..(431): Xaa can be any naturally occurring amino acid
  misc_feature (439)..(439): Xaa can be any naturally occurring amino acid
  Coding DNA Sequence Number=SeqID_4666
  Gene Ontology: Mol. function=RNA-directed DNA polymerase activity; Cellular component=chromatin; Biological process=RNA-dependent DNA replication
  Homolog annotation: Hit_ID=Q7XBD9; Match level="QueryCoverage=92%, HitCoverage=25%, E-value=1e-148, Identity=59%"; Hit description =Putative gag-pol
  Pfam annotation: Domain name=Retrotrans_gag; Domain location=41-162; Score=13.5; E_value=0.0026; Accession=PF03732.7; Description =Retrotransposon gag protein
LPNFKVTNVDNFELKQDSGGWLAVYTTTAQATGAIEDVMIVYLPIVLGXDSLQWLXHLPYHYIDDXADFCHRFVTNFKSLSNKLARSWDLKSVKRQSDESLRSFLKRFQTMMNRIPDRVVVGASTVESASGSGGTVLKGGTHGSERELASERASALMSGARGSAREGMRARTLDENLDAQCPYHKEMCHTLCNCSDFKNSVGNDRPFQQLLPPXHEGSKLNKNNCHNRKEXGGNAFLRIDMEVNVIFGGHGSXENNRXQKLTNRQVLVTTHSILTPYWWSEHSITFSQVDQWLNFDHLGKYPLHVDPSIQESQVKKALVDGGSVTPQVLLRNTPGPQDPDTNLIKSNTPFFGIELTGEYPLGHLYMPVTFGALDNYRTEFLCFEVARLECGYNTIIGRPGLVKFMAIPHYPYMIVKMPRPQGIIPARADFXGVAECYRXAIQTTLTARPLVAPRQPTTNADTSPRMTSQSQRKKRPLPPPCGQSNKPRKPTSTSQMNTRR

SEQ ID NO: 10677 - protein, 139 aa, Zea mays
  Coding DNA Sequence Number=SeqID_4667
  Gene Ontology: Mol. function=ion channel activity; Cellular component= integral to membrane; Biological process=ion transport
  Homolog annotation: Hit_ID=A2XM62; Match level="QueryCoverage=62%, HitCoverage=92%, E-value=3e-16, Identity=66%"; Hit description =Putative uncharacterized protein
MPPLAFLRRYLPARLLARACDGGVRGSPGVARDEEAGGSGGLSGRSAGAPSGECYACTQPGVPAFHSTACDQVHSPDWDANAGSSLVPDHWRRYRARTWATDLAAQPAPPLVGGPDDGDRRLRHYAAMFMSLRPHDHLE

SEQ ID NO: 10678 - protein, 132 aa, Zea mays
  misc_feature (2)..(3): Xaa can be any naturally occurring amino acid
  misc_feature (7)..(8): Xaa can be any naturally occurring amino acid
  misc_feature (10)..(11): Xaa can be any naturally occurring amino acid
  misc_feature (13)..(16): Xaa can be any naturally occurring amino acid
  misc_feature (19)..(19): Xaa can be any naturally occurring amino acid
  misc_feature (23)..(23): Xaa can be any naturally occurring amino acid
  misc_feature (38)..(38): Xaa can be any naturally occurring amino acid
  misc_feature (40)..(40): Xaa can be any naturally occurring amino acid
  misc_feature (42)..(42): Xaa can be any naturally occurring amino acid
  misc_feature (44)..(45): Xaa can be any naturally occurring amino acid
  misc_feature (49)..(50): Xaa can be any naturally occurring amino acid
  misc_feature (52)..(53): Xaa can be any naturally occurring amino acid
  misc_feature (60)..(61): Xaa can be any naturally occurring amino acid
  misc_feature (69)..(69): Xaa can be any naturally occurring amino acid
  misc_feature (72)..(72): Xaa can be any naturally occurring amino acid
  misc_feature (93)..(93): Xaa can be any naturally occurring amino acid
  misc_feature (100)..(100): Xaa can be any naturally occurring amino acid
  misc_feature (105)..(107): Xaa can be any naturally occurring amino acid
  misc_feature (111)..(111): Xaa can be any naturally occurring amino acid
  misc_feature (115)..(115): Xaa can be any naturally occurring amino acid
  misc_feature (118)..(118): Xaa can be any naturally occurring amino acid
  misc_feature (123)..(123): Xaa can be any naturally occurring amino acid
  misc_feature (126)..(127): Xaa can be any naturally occurring amino acid
  misc_feature (130)..(131): Xaa can be any naturally occurring amino acid
  Coding DNA Sequence Number=SeqID_4668
  Gene Ontology: Mol. function=translation initiation factor activity; Cellular component=nucleolus; Biological process=translational initiation
  Homolog annotation: Hit_ID=P80639; Match level="QueryCoverage=91%, HitCoverage=73%, E-value=1e-27, Identity=60%"; Hit description =Eukaryotic translation initiation factor 5A
EXXFESXXDXXTXXXXPQXAGTXRKNGFIVIKNRPCKXVXVXSXXLTGXXGXXKWLFVAXXLFNGEKAXKIXVPSSHNCDIPHGNRTEYHLIXISEGWIXALLTXXXNPKXDDLXLPXDETPXGPXXRKXXE

SEQ ID NO: 10679 - protein, 142 aa, Zea mays
  Coding DNA Sequence Number=SeqID_4669
  Subcellular localization annotation: CTP_CleavageSite=56; ConfidenceScore=5.86e-01
IFSKGQSHRVLFSKPRSYSLSLLISQRPSRLLPASSSTRRTPATLFPTRRSTPTLRAQVSRRPGPHEQPSAGLPPLCTVCTGNFSPWPSAPHQHALLLSSLLNAADWPSLPRPPSLSDSIAQQVFDKKSSPRIPTQPPPCRR

SEQ ID NO: 10680 - protein, 165 aa, Zea mays
  misc_feature (135)..(135): Xaa can be any naturally occurring amino acid
  Coding DNA Sequence Number=SeqID_4671
  Gene Ontology: Mol. function=nucleoside-triphosphatase activity; Cellular component=membrane; Biological process=DNA metabolic process
  Homolog annotation: Hit_ID=Q3KCW1; Match level="QueryCoverage=90%, HitCoverage=29%, E-value=5e-57, Identity=76%"; Hit description =Possible circadian clock protein KaiC
IWRAPDGAADYLFVTRGHFLSTSKELFTAKAATGIEGLDDILAGGLSRSHLFLLEGEPGTGKTTVALHFLQSGAKNGERSLYITLSETERELRQGAKSHGWDLDEHIHIFELTPPESLLNAEHQQSLLYSSTLSXGRSTRQIFEVVERVKPTRVVIDSFSEIRLL

SEQ ID NO: 10681 - protein, 138 aa, Zea mays
  Coding DNA Sequence Number=SeqID_4672
MIAIRDTVQVARTSGQQMCDRARARWIYLSHWFFFALLCLRVKKDVAHATNVFDSLICLMVVGGICAHSQKVTAPKARESTRAAPRHFGAALICSPRRGAARRDATDSSQEFRRTGTLGRSSGMRGQLAITVPSPSRP

SEQ ID NO: 10682 - protein, 208 aa, Zea mays
  Coding DNA Sequence Number=SeqID_4674
IAHEERRARARPPDAGSWMPGAGGGGGDNQRQPGRVGGGVWRGWRPGGAGAPPGRGRGAARGGGKGGRGQGVPGRGGACRRRRGAAGPGRARARGGGPGRWAGGADAGGDRANGRGRRAAARGDRGRAVARRRAGGACRGSRSRRRLIGLGRLAEAFRECEEAVRLDHGQRPRARPPRRLMPQVRFSPSLVSSAAPVSLFSCSSDTGN

SEQ ID NO: 10683 - protein, 123 aa, Zea mays
  misc_feature (23)..(23): Xaa can be any naturally occurring amino acid
  misc_feature (90)..(90): Xaa can be any naturally occurring amino acid
  Coding DNA Sequence Number=SeqID_4676
  Gene Ontology: Mol. function=lipid binding; Cellular component =extracellular region; Biological process=lipid transport
  Homolog annotation: Hit_ID=Q43304; Match level="QueryCoverage=95%, HitCoverage=100%, E-value=9e-25, Identity=52%"; Hit description=Non -specific lipid-transfer protein D precursor
  Pfam annotation: Domain name=Tryp_alpha_amyl; Domain location=29-114; Score=41.8; E_value=2.4e-09; Accession=PF00234.12; Description =Protease inhibitorseed storageLTP f
MWGLKKLARVVLARVSVGAPHTXRAALCCGTVSVYVAPHIVSLAQGAGPFPKGACSGVTSLNNLARTTPDRQQACRCLLEAPNASPLLPXARAAALPKTCVVNTPYMIRKTNNCNGIRGAAVG

SEQ ID NO: 10684 - protein, 97 aa, Zea mays
  misc_feature (56)..(56): Xaa can be any naturally occurring amino acid
  Coding DNA Sequence Number=SeqID_4677
  Gene Ontology: Mol. function=RNA-directed DNA polymerase activity
  Homolog annotation: Hit_ID=Q8W233; Match level="QueryCoverage=88%, HitCoverage=88%, E-value=6e-27, Identity=72%"; Hit description =Putative non-LTR retroelement reverse transcriptase
ARKYKPVEKIYEKLTKNGFSVEKTGLRLVQIVEAFNHKPIPSILQVIFRDTHWFRXWRLLQKEESQQQILDVCQALEVVAAVFANHGWRSNARIDDG

SEQ ID NO: 10685 - protein, 147 aa, Zea mays
  misc_feature (35)..(35): Xaa can be any naturally occurring amino acid
  Coding DNA Sequence Number=SeqID_4678
  Gene Ontology: Mol. function=hydrogen ion transporting ATP synthase activity, rotational mechanism; Cellular component=proton -transporting two-sector ATPase complex; Biological process=ATP synthesis coupled proton transport
  Homolog annotation: Hit_ID=P59229; Match level="QueryCoverage=89%, HitCoverage=78%, E-value=5e-39, Identity=66%"; Hit description =Vacuolar ATP synthase 16 kDa proteolipid subunit 4
  Pfam annotation: Domain name=ATP-synt_C; Domain location=25-90; Score= 31.8; E_value=2.4e-06; Accession=PF00137.12; Description=ATP synthase subunit C
ARTGAGSRRPRCTTELSGDDTVPFFGFLGAVAGLXFSCMGAADGTAKSGARATTMGVMRPEIVMKSIATVIMAGVLAIYGLIIAVIIMTGINPEAKPYYLFDGYDHLSAVLDGALAGPPVGMGIGIAGDAAIMANAQQTKLFVTMIL

SEQ ID NO: 10686 - protein, 51 aa, Zea mays
  Coding DNA Sequence Number=SeqID_4679
FSWVAAICSCATTIFYDRITIVFTTKIALLDNKMRHRYTKNSGGTPAPNSP

SEQ ID NO: 10687 - protein, 167 aa, Zea mays
  misc_feature (39)..(39): Xaa can be any naturally occurring amino acid
  misc_feature (66)..(66): Xaa can be any naturally occurring amino acid
  misc_feature (69)..(69): Xaa can be any naturally occurring amino acid
  misc_feature (72)..(72): Xaa can be any naturally occurring amino acid
  misc_feature (74)..(74): Xaa can be any naturally occurring amino acid
  misc_feature (76)..(76): Xaa can be any naturally occurring amino acid
  misc_feature (84)..(84): Xaa can be any naturally occurring amino acid
  misc_feature (105)..(105): Xaa can be any naturally occurring amino acid
  misc_feature (110)..(110): Xaa can be any naturally occurring amino acid
  misc_feature (112)..(112): Xaa can be any naturally occurring amino acid
  misc_feature (116)..(116): Xaa can be any naturally occurring amino acid
  misc_feature (120)..(120): Xaa can be any naturally occurring amino acid
  misc_feature (126)..(127): Xaa can be any naturally occurring amino acid
  misc_feature (149)..(149): Xaa can be any naturally occurring amino acid
  misc_feature (153)..(153): Xaa can be any naturally occurring amino acid
  misc_feature (157)..(157): Xaa can be any naturally occurring amino acid
  misc_feature (162)..(162): Xaa can be any naturally occurring amino acid
  misc_feature (165)..(167): Xaa can be any naturally occurring amino acid
  Coding DNA Sequence Number=SeqID_4681
VLGRHKQLLCCLALRHIPSSTGSITINLQGLGGCQVELXPGGWWHVAALRGWYLIFPPFCAHFFYXPLXLMXKXLXLDLLPPPXPATIPLLTYPPRLPPPLNPPXFPPFXGXTPLXFFTXFFSPTXXPGKMSLSIPLPHQITAAPQILXTPPXPTHXIPPLXLSXXX

SEQ ID NO: 10688 - protein, 139 aa, Zea mays
  Coding DNA Sequence Number=SeqID_4682
  Gene Ontology: Mol. function=structural constituent of ribosome; Cellular component=ribonucleoprotein complex; Biological process =translation
  Homolog annotation: Hit_ID=P59223; Match level="QueryCoverage=72%, HitCoverage=66%, E-value=7e-51, Identity=99%"; Hit description=40S ribosomal protein S13-1
  Pfam annotation: Domain name=Ribosomal_S13_N; Domain location=1-60; Score=137.7; E_value=3.3e-38; Accession=PF08069.3; Description =Ribosomal S13S15 N-terminal domain
MGRMHSRGKGISASALPYKRSSPSWLKTTSQDVDESICKFAKKGLTPSQIGVILRDSHGIPQVKSVTGSKILRILKAHGLAPEIPEDLYHLIKKAVAIRKHLEGGPGTHPPLPPLLSGIPSPALAPPRALSYTLPVPPL

SEQ ID NO: 10689 - protein, 75 aa, Zea mays
  Coding DNA Sequence Number=SeqID_4683
  Homolog annotation: Hit_ID=Q7F0M7; Match level="QueryCoverage=73%, HitCoverage=13%, E-value=3e-14, Identity=73%"; Hit description =Putative adenyl cyclase
NVEEMYPKMLKSVEGEIMPLNAWLWSMIDSCSNEDDIKLPFQILQKLRVFVSSLHIPHTGRIFHFIFVYQVILPL

SEQ ID NO: 10690 - protein, 118 aa, Zea mays
  Coding DNA Sequence Number=SeqID_4684
LCYSTAEKGGIRGRGDGGAGGGREVGAGVGQEDGQGSSQAQGRGAGGPQGSSERGQDRAGRAVKVGVGRADDIEGPTTDDEGGIRVLQGGVGGEDRVGEGGEGGGDGVRRGRGDLGRG

SEQ ID NO: 10691 - protein, 190 aa, Zea mays
  misc_feature (69)..(69): Xaa can be any naturally occurring amino acid
  misc_feature (71)..(73): Xaa can be any naturally occurring amino acid
  misc_feature (75)..(76): Xaa can be any naturally occurring amino acid
  misc_feature (79)..(79): Xaa can be any naturally occurring amino acid
  misc_feature (82)..(82): Xaa can be any naturally occurring amino acid
  misc_feature (87)..(91): Xaa can be any naturally occurring amino acid
  misc_feature (94)..(103): Xaa can be any naturally occurring amino acid
  misc_feature (106)..(108): Xaa can be any naturally occurring amino acid
  misc_feature (110)..(112): Xaa can be any naturally occurring amino acid
  misc_feature (116)..(121): Xaa can be any naturally occurring amino acid
  misc_feature (124)..(125): Xaa can be any naturally occurring amino acid
  misc_feature (128)..(131): Xaa can be any naturally occurring amino acid
  misc_feature (133)..(135): Xaa can be any naturally occurring amino acid
  misc_feature (137)..(138): Xaa can be any naturally occurring amino acid
  misc_feature (140)..(146): Xaa can be any naturally occurring amino acid
  misc_feature (149)..(149): Xaa can be any naturally occurring amino acid
  misc_feature (151)..(151): Xaa can be any naturally occurring amino acid
  misc_feature (153)..(159): Xaa can be any naturally occurring amino acid
  misc_feature (162)..(162): Xaa can be any naturally occurring amino acid
  misc_feature (164)..(165): Xaa can be any naturally occurring amino acid
  misc_feature (167)..(172): Xaa can be any naturally occurring amino acid
  misc_feature (174)..(175): Xaa can be any naturally occurring amino acid
  misc_feature (177)..(180): Xaa can be any naturally occurring amino acid
  misc_feature (182)..(182): Xaa can be any naturally occurring amino acid
  misc_feature (186)..(189): Xaa can be any naturally occurring amino acid
  Coding DNA Sequence Number=SeqID_4686
HWPLPSLPHQQPNATELPASAARNILLSPELLLLHVRSELTIGRQTPVASHEAAPEAALPHGIGIGGGXGXXXGXXRPXQAXHREGXXXXXKKXXXXXXXXXXPIXXXIXXXPVPXXXXXXPFXXPHXXXXVXXXQXXTXXXXXXXRCXSXPXXXXXXXPPXRXXYXXXXXXPXXYXXXXLXLSLXXXXI

SEQ ID NO: 10692 - protein, 76 aa, Zea mays
  misc_feature (1)..(1): Xaa can be any naturally occurring amino acid
  misc_feature (3)..(4): Xaa can be any naturally occurring amino acid
  misc_feature (6)..(8): Xaa can be any naturally occurring amino acid
  misc_feature (10)..(11): Xaa can be any naturally occurring amino acid
  misc_feature (15)..(17): Xaa can be any naturally occurring amino acid
  misc_feature (21)..(21): Xaa can be any naturally occurring amino acid
  misc_feature (23)..(30): Xaa can be any naturally occurring amino acid
  misc_feature (32)..(32): Xaa can be any naturally occurring amino acid
  misc_feature (34)..(35): Xaa can be any naturally occurring amino acid
  misc_feature (37)..(37): Xaa can be any naturally occurring amino acid
  misc_feature (40)..(40): Xaa can be any naturally occurring amino acid
  misc_feature (52)..(55): Xaa can be any naturally occurring amino acid
  Coding DNA Sequence Number=SeqID_4688
XGXXLXXXKXXRRGXXXGAKXKXXXXXXXXQXAXXDXRRXLYIYLHLGETNXXXXLRAFRRRRSPTVAPRSINLLR

SEQ ID NO: 10693 - protein, 149 aa, Zea mays
  misc_feature (9)..(9): Xaa can be any naturally occurring amino acid
  misc_feature (12)..(12): Xaa can be any naturally occurring amino acid
  misc_feature (36)..(36): Xaa can be any naturally occurring amino acid
  misc_feature (41)..(41): Xaa can be any naturally occurring amino acid
  misc_feature (104)..(104): Xaa can be any naturally occurring amino acid
  Coding DNA Sequence Number=SeqID_4690
  Gene Ontology: Mol. function=structural molecule activity; Cellular component=protein complex; Biological process=microtubule-based movement
  Homolog annotation: Hit_ID=P29513; Match level="QueryCoverage=80%, HitCoverage=26%, E-value=7e-27, Identity=52%"; Hit description =Tubulin beta-5 chain
MREILHIQXGQXGNQIGAKFWEVICDEHGIDHTGSXTSAIXPLQLERIHGPFHQATGGQDAPRAVLIDLPPRTTDSLASAPRGHLLPPDACVFGRPGAGTSSAXGHDTDGPECIDSVLVVRAGPPEHPAALHGFLLGLSSRGGPGSAAV

SEQ ID NO: 10694 - protein, 111 aa, Zea mays
  misc_feature (110)..(111): Xaa can be any naturally occurring amino acid
  Coding DNA Sequence Number=SeqID_4691
RRARRRGGPTAQWRRKAARSAARQPTESCAERAPAPDIGAGAGASVAEAAVNSASTTTAAVITAATTAEMRAIESMRSDDEVAASERGQLRVLLLEAWRRREERARPASXX

SEQ ID NO: 10695 - protein, 264 aa, Zea mays
  Coding DNA Sequence Number=SeqID_4693
  Subcellular localization annotation: CTP_CleavageSite=35; ConfidenceScore=5.46e-01
DPSPPCSPPPTGTHALSVSLLPSPDKRRREPTVVPAARAPRMHSGARKLRWGTRPDGPEDHDVVVVLASLRCPLVDVRRRGGVGRCGAGGAGGAPAVDGARGGVRTSGGGGSPPCATHAWPRGAGDQTADLPVCGAEFDGRGHARGVRRCAHALRAACLARRPAAHAACPSCRRVQDVPRAARRAVPPLRRAAPGRRGRWVEAHLLQRHAAVPGVSGGGIARSGDQAEQSKANLNVIVVFRRFGENLNAMLLGSTCKFFFLRRT

SEQ ID NO: 10696 - protein, 100 aa, Zea mays
  misc_feature (31)..(31): Xaa can be any naturally occurring amino acid
  misc_feature (70)..(70): Xaa can be any naturally occurring amino acid
  misc_feature (96)..(96): Xaa can be any naturally occurring amino acid
  Coding DNA Sequence Number=SeqID_4695
  Subcellular localization annotation: CTP_CleavageSite=80; ConfidenceScore=5.19e-01
RYLIPYTPPSIPAQTSSHDLLSSTIQQKFSXPPLIRPTISAPKSYTPINTTPYRHIASQKLILSRSLLSXWPSCFNSTICSRSPSSSPLKLSFLTXHVFF

SEQ ID NO: 10697 - protein, 42 aa, Zea mays
  Coding DNA Sequence Number=SeqID_4697
IYLIDASHPSRMNKIPCVVILQKAPELTREHKRDQVNCLTPN

SEQ ID NO: 10698 - protein, 156 aa, Zea mays
  misc_feature (1)..(9): Xaa can be any naturally occurring amino acid
  misc_feature (11)..(11): Xaa can be any naturally occurring amino acid
  misc_feature (13)..(30): Xaa can be any naturally occurring amino acid
  misc_feature (32)..(73): Xaa can be any naturally occurring amino acid
  misc_feature (75)..(75): Xaa can be any naturally occurring amino acid
  misc_feature (77)..(77): Xaa can be any naturally occurring amino acid
  misc_feature (89)..(89): Xaa can be any naturally occurring amino acid
  misc_feature (109)..(109): Xaa can be any naturally occurring amino acid
  misc_feature (116)..(116): Xaa can be any naturally occurring amino acid
  misc_feature (119)..(120): Xaa can be any naturally occurring amino acid
  misc_feature (122)..(123): Xaa can be any naturally occurring amino acid
  misc_feature (125)..(125): Xaa can be any naturally occurring amino acid
  misc_feature (131)..(131): Xaa can be any naturally occurring amino acid
  misc_feature (142)..(146): Xaa can be any naturally occurring amino acid
  misc_feature (155)..(156): Xaa can be any naturally occurring amino acid
  Coding DNA Sequence Number=SeqID_4698
XXXXXXXXXKXGXXXXXXXXXXXXXXXXXXEXXXXXXXXXXXXXXXXXXXXXXXXXXXXXXXXXXXXXXXXXXGXLXLQVLSYAEACTXLLGEATLTARTRLTKLPAIXRPLDPPXAAXXRXXVXERRGSXAETEGNAAIGXXXXXGLMKGRGWXX

SEQ ID NO: 10699 - protein, 126 aa, Zea mays
  Coding DNA Sequence Number=SeqID_4700
AAQEHVVSNSCELAACNGACRLSGQPMDQSSLSQVSNRSHQTDSTISQCHVSRPCQSSVECIVSIFYCAIGILSLVHRSSRCLVAGENDAQNNQRSQHVSPSENRHHCFCRYSVYPSADVPSSTGA

SEQ ID NO: 10700 - protein, 179 aa, Zea mays
  misc_feature (89)..(90): Xaa can be any naturally occurring amino acid
  misc_feature (114)..(114): Xaa can be any naturally occurring amino acid
  misc_feature (132)..(132): Xaa can be any naturally occurring amino acid
  misc_feature (144)..(144): Xaa can be any naturally occurring amino acid
  Coding DNA Sequence Number=SeqID_4702
  Gene Ontology: Mol. function=small conjugating protein ligase activity; Cellular component=synaptonemal complex; Biological process=embryonic development ending in seed dormancy
  Homolog annotation: Hit_ID=Q42551; Match level="QueryCoverage=89%, HitCoverage=98%, E-value=6e-84, Identity=94%"; Hit description =Ubiquitin carrier protein
  Pfam annotation: Domain name=UQ_con; Domain location=9-157; Score =209.0; E_value=1.1e-59; Accession=PF00179.16; Description=Ubiquitin -conjugating enzyme
MASGIARGRLAEERKSWRKNHPHGFVAKPETGQDGTVNLMVWHCTIPGKAGTDWEGGFFPLTMHFSEDYPSKPPKCKFPQGFFHPNVYXXSGTVCLSILNEDYGWRPAITVKQXILVGIQDLLDTPNPADPXAQTDGYHPFLSXDPVEYKKRGKLQSKQYPCSCLKPQKRERTKTDDKL

SEQ ID NO: 10701 - protein, 87 aa, Zea mays
  Coding DNA Sequence Number=SeqID_4703
SADEEHIRHGSGLGHAGRANVKRRMPHLAVEQEDCRERHPRLPAHPRFNRRLRHQASARSEAAGGSAARPWQIPQTLWSRHPAAGGG

SEQ ID NO: 10702 - protein, 130 aa, Zea mays
  Coding DNA Sequence Number=SeqID_4705
KLPPGTFCPCFPKRHWPTRGGGGPCRGGGGTRGGRAGRRERQHGRGHASEEVRPSTPRENAAQPPNEPVRGKIRIDRPLSDDRYSQQGDYRISSGKLCINWGVHSESQISRMRDGTFGHTRCSWVEHPET

SEQ ID NO: 10703 - protein, 155 aa, Zea mays
  Coding DNA Sequence Number=SeqID_4707
  Subcellular localization annotation: CTP_CleavageSite=24; ConfidenceScore=5.42e-01
IVHELHQGTIPVDCMLSTPGPPLSSSLTGGSSAPRRGASSLAALSPDPGRPSAQPPFLSLLGRRAPLPLPRRSFLCSPRPAGTPGSPLRSPWRFPLLAAELVTRLCSSRLSALSSFPLRAAHRALPSHGASAPCSASIPPAREALCSPSGGAAVS

SEQ ID NO: 10704 - protein, 88 aa, Zea mays
  misc_feature (84)..(84): Xaa can be any naturally occurring amino acid
  Coding DNA Sequence Number=SeqID_4709
RGTLRRFRGAWVPEASLTGHLHLVRSSETTSRVLRPPHRQQIKVGAHSVCIQFALTSGHLRPWRNKLYCLKATHDLSMFPPGRXPAAP

SEQ ID NO: 10705 - protein, 118 aa, Zea mays
  Coding DNA Sequence Number=SeqID_4711
  Gene Ontology: Mol. function=structural constituent of ribosome; Cellular component=ribonucleoprotein complex; Biological process =translation
  Homolog annotation: Hit_ID=Q5I7L0; Match level="QueryCoverage=100%, HitCoverage=63%, E-value=6e-29, Identity=58%"; Hit description =Ribosomal protein L18
  Pfam annotation: Domain name=Ribosomal_L18e; Domain location=1-116; Score=80.6; E_value=5e-21; Accession=PF00828.9; Description =Eukaryotic ribosomal protein L18
FLEGKEKTLAVIVGPVPNVKRIPGVPAMKVSALRFPETTRARIVNAGGEGLTFDQLAFCAPLGENPVLFRGPKNAREAVRPFGKAPGVPPTPPKPYVRPKERKFKKARGRRNTRGFKV

SEQ ID NO: 10706 - protein, 85 aa, Zea mays
  misc_feature (41)..(41): Xaa can be any naturally occurring amino acid
  misc_feature (67)..(67): Xaa can be any naturally occurring amino acid
  Coding DNA Sequence Number=SeqID_4712
  Gene Ontology: Mol. function=nutrient reservoir activity
  Homolog annotation: Hit_ID=P04704; Match level="QueryCoverage=80%, HitCoverage=28%, E-value=2e-17, Identity=67%"; Hit description=Zein -alpha ZG99 precursor
MAAQMFCPLMLLGLSASAATATIFPECSRAPIASLLPPYLXSPAVSSECESPILQPYRIQQEIAAGXILPLSPLFLPQSSALLLQ

SEQ ID NO: 10707 - protein, 73 aa, Zea mays
  Coding DNA Sequence Number=SeqID_4713
  Gene Ontology: Mol. function=nucleic acid binding; Biological process= DNA integration
  Homolog annotation: Hit_ID=UPI00005A975E; Match level="QueryCoverage =72%, HitCoverage=3%, E-value=1e-23, Identity=92%"; Hit description =PREDICTED: similar to Retrovirus-related Pol polyprotein from transposon 297
SGACGRHAAPRALVGNAFRQGFYWPTAVADATRIVRTCQGCQFYARQTHMPPQLQASKISEYHIHYKSSSIHS

SEQ ID NO: 10708 - protein, 200 aa, Zea mays
  misc_feature (87)..(87): Xaa can be any naturally occurring amino acid
  misc_feature (103)..(103): Xaa can be any naturally occurring amino acid
  misc_feature (128)..(128): Xaa can be any naturally occurring amino acid
  Coding DNA Sequence Number=SeqID_4714
  Gene Ontology: Mol. function=structural constituent of ribosome; Cellular component=ribonucleoprotein complex; Biological process =translation
  Homolog annotation: Hit_ID=A3ANN4; Match level="QueryCoverage=83%, HitCoverage=45%, E-value=2e-23, Identity=45%"; Hit description =Putative uncharacterized protein
  Pfam annotation: Domain name=Ribosomal_S19; Domain location=71-153; Score=6.6; E_value=7.8e-05; Accession=PF00203.11; Description =Ribosomal protein S19
MSDVLRSQVSVLSSHMSDVDVEWEVSYGAIKKRMFCKYSCRGVALDAILVMFTRGPCSAFKSADVRRRFQRGLRVVEHVGHQEGGQXRQKYAPVVSNSEPVKXIWRIMVQVAEMIGSIVGVSRGKTFXQVEIQLAMIVQHQSEFFISCNAVTLGWPVRGAPHSRRVIPVRSVVMHIRGLARVFSDMPCQRLWEMGARNII

SEQ ID NO: 10709 - protein, 95 aa, Zea mays
  misc_feature (6)..(6): Xaa can be any naturally occurring amino acid
  misc_feature (9)..(9): Xaa can be any naturally occurring amino acid
  misc_feature (22)..(22): Xaa can be any naturally occurring amino acid
  misc_feature (25)..(25): Xaa can be any naturally occurring amino acid
  misc_feature (27)..(28): Xaa can be any naturally occurring amino acid
  misc_feature (33)..(33): Xaa can be any naturally occurring amino acid
  misc_feature (35)..(35): Xaa can be any naturally occurring amino acid
  misc_feature (40)..(41): Xaa can be any naturally occurring amino acid
  misc_feature (43)..(49): Xaa can be any naturally occurring amino acid
  misc_feature (53)..(58): Xaa can be any naturally occurring amino acid
  misc_feature (61)..(61): Xaa can be any naturally occurring amino acid
  misc_feature (66)..(69): Xaa can be any naturally occurring amino acid
  misc_feature (71)..(72): Xaa can be any naturally occurring amino acid
  misc_feature (76)..(76): Xaa can be any naturally occurring amino acid
  misc_feature (78)..(79): Xaa can be any naturally occurring amino acid
  misc_feature (84)..(84): Xaa can be any naturally occurring amino acid
  misc_feature (87)..(87): Xaa can be any naturally occurring amino acid
  misc_feature (89)..(89): Xaa can be any naturally occurring amino acid
  Coding DNA Sequence Number=SeqID_4715
LLLQHXLRXGVASDIVASIICXIIXGXXIGDIXLXIINGXXMXXXXXXXITAXXXXXXKTXSCLSXXXXLXXIAHXDXXHHTVXHTXVXGHQWRA

SEQ ID NO: 10710 - protein, 141 aa, Zea mays
  Coding DNA Sequence Number=SeqID_4717
  Subcellular localization annotation: CTP_CleavageSite=23; ConfidenceScore=5.09e-01
KPFFPDLHRAFKAPFQLHPPNTMDSHFAPPGFPPRFPPPRKFCPPPGYDTLYPPNPPGTPPPKENTPLPSFAAPKTLVSPQKKPRKHLGDKTPPIAPPPFLLRNAAGTTHQSWGRPLLFFKKKNQSPPPLPGGAHPPYKIR

SEQ ID NO: 10711 - protein, 149 aa, Zea mays
  Coding DNA Sequence Number=SeqID_4719
GGRVGGGERRGDRAGGGRRRAAREGVRPPPPPPGGGGEKNAVPPIKDPGWVIIGGVSLEFKPFTHSNWPFQIEEHVHVFRPQCRWVEWRIKQVASSVISLYKWRCIVTMAQQENERTNETGNAADHTTTKTQKKTVIGDETTSRRVLLE

SEQ ID NO: 10712 - protein, 152 aa, Zea mays
  Coding DNA Sequence Number=SeqID_4721
  Homolog annotation: Hit_ID=A2Y5Y2; Match level="QueryCoverage=38%, HitCoverage=27%, E-value=9e-12, Identity=63%"; Hit description =Putative uncharacterized protein
PADSGSASEQAGRMERHAEKPPPPFLALSCLLLLAPPLVSAVPTPRSLRLGSQQQHPPALKLNSSQDTAAIAAAMNTGRPTARVAVEVNDYQPSGPNNRHDPPKGPGRPCERGSAGRPRINNPFSVVVVFTTGSTKWVLCLCSCISTARASN

SEQ ID NO: 10713 - protein, 139 aa, Zea mays
  misc_feature (16)..(23): Xaa can be any naturally occurring amino acid
  misc_feature (25)..(25): Xaa can be any naturally occurring amino acid
  misc_feature (27)..(28): Xaa can be any naturally occurring amino acid
  misc_feature (30)..(34): Xaa can be any naturally occurring amino acid
  misc_feature (36)..(36): Xaa can be any naturally occurring amino acid
  misc_feature (38)..(38): Xaa can be any naturally occurring amino acid
  misc_feature (40)..(40): Xaa can be any naturally occurring amino acid
  misc_feature (44)..(44): Xaa can be any naturally occurring amino acid
  misc_feature (46)..(50): Xaa can be any naturally occurring amino acid
  misc_feature (53)..(53): Xaa can be any naturally occurring amino acid
  misc_feature (60)..(60): Xaa can be any naturally occurring amino acid
  misc_feature (64)..(64): Xaa can be any naturally occurring amino acid
  misc_feature (66)..(68): Xaa can be any naturally occurring amino acid
  misc_feature (70)..(71): Xaa can be any naturally occurring amino acid
  misc_feature (74)..(74): Xaa can be any naturally occurring amino acid
  misc_feature (76)..(76): Xaa can be any naturally occurring amino acid
  misc_feature (80)..(80): Xaa can be any naturally occurring amino acid
  misc_feature (82)..(83): Xaa can be any naturally occurring amino acid
  misc_feature (85)..(85): Xaa can be any naturally occurring amino acid
  misc_feature (91)..(92): Xaa can be any naturally occurring amino acid
  misc_feature (100)..(100): Xaa can be any naturally occurring amino acid
  misc_feature (108)..(109): Xaa can be any naturally occurring amino acid
  misc_feature (112)..(112): Xaa can be any naturally occurring amino acid
  misc_feature (119)..(119): Xaa can be any naturally occurring amino acid
  misc_feature (131)..(131): Xaa can be any naturally occurring amino acid
  Coding DNA Sequence Number=SeqID_4722
  Gene Ontology: Cellular component=ribonucleoprotein complex
  Homolog annotation: Hit_ID=Q9AYP4; Match level="QueryCoverage=60%, HitCoverage=45%, E-value=2e-11, Identity=45%"; Hit description=40S ribosomal protein S10
  Pfam annotation: Domain name=S10_plectin; Domain location=35-112; Score=-2.2; E_value=6.3e-07; Accession=PF03501.5; Description =PlectinS10 domain
LDAGSSPHHLLDRLVXXXXXXXXDXCXXLXXXXXLXVXKXYNLXKXXXXXVPXLQVFKFXRSFXCXXXGXXTFXWXNYYXYXXLXGIEHLXXYLNLPSEXVPATAQEXXQEXRGRPFGXSGPPGDRPRCPXRFGLDRQG

SEQ ID NO: 10714 - protein, 55 aa, Zea mays
  misc_feature (16)..(16): Xaa can be any naturally occurring amino acid
  Coding DNA Sequence Number=SeqID_4723
CTDHLKKQKNSKYHVXSSRQYLDLSTYHQSRGWHKPSLTLHSWESELKLPTRFSG

SEQ ID NO: 10715 - protein, 124 aa, Zea mays
  misc_feature (91)..(91): Xaa can be any naturally occurring amino acid
  Coding DNA Sequence Number=SeqID_4725
  Gene Ontology: Mol. function=translation elongation factor activity; Cellular component=eukaryotic translation elongation factor 1 complex; Biological process=translational elongation
  Homolog annotation: Hit_ID=P29545; Match level="QueryCoverage=94%, HitCoverage=51%, E-value=1e-31, Identity=62%"; Hit description =Elongation factor 1-beta
  Pfam annotation: Domain name=EF1_GNE; Domain location=35-124; Score =112.8; E_value=1e-30; Accession=PF00736.9; Description=EF-1 guanine nucleotide exchange doma
FCTFLVQETQDDEEGLLKSVFQLSKLMATRNKSGKSSVLLNVKAWVDETDIAKLEEAVRSVQMEGLVWGAFNLVPVGYGIKKLQIMMAIVXALFSVGTFSEGGLGHEPVNEYVQSCDIVAFDKI

SEQ ID NO: 10716 - protein, 240 aa, Zea mays
  misc_feature (66)..(66): Xaa can be any naturally occurring amino acid
  misc_feature (73)..(73): Xaa can be any naturally occurring amino acid
  misc_feature (103)..(103): Xaa can be any naturally occurring amino acid
  misc_feature (147)..(147): Xaa can be any naturally occurring amino acid
  misc_feature (157)..(157): Xaa can be any naturally occurring amino acid
  misc_feature (233)..(233): Xaa can be any naturally occurring amino acid
  Coding DNA Sequence Number=SeqID_4726
  Gene Ontology: Biological process=response to stress
  Homolog annotation: Hit_ID=Q75HQ2; Match level="QueryCoverage=100%, HitCoverage=100%, E-value=1e-27, Identity=39%"; Hit description =Putative uncharacterized protein P0636F09.16
MGSSGGSCEHFLGQLSSSDGGSAPHQLLQREWDCGTGTGSRRGSRRWSRKKGRARGHGRAAGLYRXREWSSGXDKELLVELGPLSGAKQFKIWALTDVANRGXLLAMVAVLPAQAASAGRGRGPGDEDAAAAAKGSAGRRRACRGEXRVIVVVDQGXPALTTPRCRVINLHASQRALTQHNPPRLACGVRPRASGVQQELVEGSINRAECLTLAVRRRSKGVGGYLVSTRWQXKNFWLLA

SEQ ID NO: 10717 - protein, 44 aa, Zea mays
  misc_feature (27)..(27): Xaa can be any naturally occurring amino acid
  Coding DNA Sequence Number=SeqID_4727
  Gene Ontology: Mol. function=glyceraldehyde-3-phosphate dehydrogenase (phosphorylating) activity; Cellular component=cytoplasm; Biological process=glucose metabolic process
  Homolog annotation: Hit_ID=P08735; Match level="QueryCoverage=100%, HitCoverage=13%, E-value=7e-11, Identity=75%"; Hit description =Glyceraldehyde-3-phosphate dehydrogenase, cytosolic 1
SSMFNAKAGIPLNDPFIKLVSWSAPKXGYSTRVVDLIRHMFKTQ

SEQ ID NO: 10718 - protein, 98 aa, Zea mays
  misc_feature (15)..(15): Xaa can be any naturally occurring amino acid
  Coding DNA Sequence Number=SeqID_4728
  Gene Ontology: Mol. function=oxidoreductase activity; Cellular component=endoplasmic reticulum; Biological process=electron transport
  Homolog annotation: Hit_ID=A3AMW9; Match level="QueryCoverage=100%, HitCoverage=13%, E-value=3e-35, Identity=71%"; Hit description =Putative uncharacterized protein
VWDDPESFFPERFEXRGKAQGRLLIPFGMGRRKCPGETLALRTVGLVLAPLLQCFDWDPVDGAQVDMKESGGLTMPRAVPLEAMCKPRAAMCDVLREL

SEQ ID NO: 10719 - protein, 145 aa, Zea mays
  misc_feature (28)..(30): Xaa can be any naturally occurring amino acid
  misc_feature (37)..(37): Xaa can be any naturally occurring amino acid
  misc_feature (45)..(45): Xaa can be any naturally occurring amino acid
  misc_feature (47)..(49): Xaa can be any naturally occurring amino acid
  misc_feature (55)..(55): Xaa can be any naturally occurring amino acid
  misc_feature (57)..(59): Xaa can be any naturally occurring amino acid
  misc_feature (65)..(65): Xaa can be any naturally occurring amino acid
  misc_feature (76)..(76): Xaa can be any naturally occurring amino acid
  misc_feature (84)..(84): Xaa can be any naturally occurring amino acid
  misc_feature (106)..(106): Xaa can be any naturally occurring amino acid
  misc_feature (111)..(111): Xaa can be any naturally occurring amino acid
  misc_feature (113)..(113): Xaa can be any naturally occurring amino acid
  misc_feature (118)..(118): Xaa can be any naturally occurring amino acid
  misc_feature (131)..(131): Xaa can be any naturally occurring amino acid
  misc_feature (134)..(136): Xaa can be any naturally occurring amino acid
  misc_feature (140)..(140): Xaa can be any naturally occurring amino acid
  misc_feature (142)..(142): Xaa can be any naturally occurring amino acid
  Coding DNA Sequence Number=SeqID_4729
  Gene Ontology: Mol. function=structural constituent of ribosome; Cellular component=ribonucleoprotein complex; Biological process =translation
  Homolog annotation: Hit_ID=Q9XHS0; Match level="QueryCoverage=82%, HitCoverage=83%, E-value=1e-36, Identity=68%"; Hit description=40S ribosomal protein S12
  Pfam annotation: Domain name=Ribosomal_L7Ae; Domain location=40-136; Score=27.5; E_value=5e-05; Accession=PF01248.16; Description =Ribosomal protein L7AeL30eS12eGadd45 family
MAARSSLALPRNPFTEGKVEGPIAGEAXXXVLGEPMXLMTALQVXMXXXSAHDGXLXXXLREDVXAIEKNAAQLCXLAEDCEQXDYVQLVKALCAEHNGHLVTGPXAKTLXEXAGLCXIDSEGKARKVVGXPAXXXKDYXEXSEG

SEQ ID NO: 10720 - protein, 150 aa, Zea mays
  Coding DNA Sequence Number=SeqID_477
  Subcellular localization annotation: CTP_CleavageSite=44; ConfidenceScore=5.66e-01
SPKHYRNGLRAHFPFTSYVEASAPEVSSPSSSSATASSASSSIAASTVGATEAAAREVAPSILEGPLLPRICSREASNCSCLLLLVVVPSNMLGVPLEPLDLRGLDLLPDESILNIFNELLLSYLYLLNLRSHSSLLVGVDLPSICHPRA

SEQ ID NO: 10721 - protein, 166 aa, Zea mays
  misc_feature (1)..(16): Xaa can be any naturally occurring amino acid
  Coding DNA Sequence Number=SeqID_478
XXXXXXXXXXXXXXXXALAETVIAWKWEKGPGRCRECAIDEETRSWARRRAAGRKEDRRREPRIRAWERCRNLPTRVLHQPCFGERHKGVHRCTLVVPWSDWSLARQQWLVAPLRHHGFMPLPRTRQFTSQIIARGHVFVKSKLVPGISSARRRTGGSGGATRRGV

SEQ ID NO: 10722 - protein, 362 aa, Zea mays
  Coding DNA Sequence Number=SeqID_480
  Homolog annotation: Hit_ID=Q6EP38; Match level="QueryCoverage=100%, HitCoverage=59%, E-value=5e-61, Identity=41%"; Hit description =Putative uncharacterized protein B1267B06.35
MTDCQVVAMKKAYARIMLNMAQESAARVLTAERRAVALAASLEAAKEDGVAALLRLKAIMEVRIKEKELESLVHVKMIKELEEQLNGSQNAMASLKVELQRANTELELTRKTLADERMNSLPTSNNVYYSNKNVSPCSKIHPQGGNILLKNKKNADNSDDTCLVLITEENEAVDKLEDKDRRSPDLPSFMKRNKKPKFCHNGCTQRIHALKQQTQSTDAFLKQNQKQATAFNSHSKARKKNAAKNSCHTRSVTEQILQTKFLGKFKRKRGRRNRPSYKHDNSSEHGEAEYKLSDRSESDGNGCLLLLQALEQDLSPPKLSTEHDGEALTDLKEDFEMSGGDAELSRCTAFSELVNVLAVNSV

SEQ ID NO: 10723 - protein, 124 aa, Zea mays
  misc_feature (23)..(23): Xaa can be any naturally occurring amino acid
  Coding DNA Sequence Number=SeqID_481
VKPMHTATEGPAHIYVNRPSAYXATAHRKPISTDRSTNGSPHNIKWQIKTGASETGTATHAGHTAGRHAPPFKPRHHPHHQPPPKRTTLFARFACFSWDASCMADSDPTSGLALHLLRAAGSPP

SEQ ID NO: 10724 - protein, 71 aa, Zea mays
  misc_feature (43)..(43): Xaa can be any naturally occurring amino acid
  misc_feature (60)..(60): Xaa can be any naturally occurring amino acid
  Coding DNA Sequence Number=SeqID_483
  Homolog annotation: Hit_ID=Q8N1J7; Match level="QueryCoverage=98%, HitCoverage=52%, E-value=4e-17, Identity=68%"; Hit description=cDNA FLJ40635 fis, clone THYMU2015825
SGVRDQPGQHGKTPHLGKKIQKLAGGGAWCGGAYLWFQLPGGXRQEDCLSPGVRGCSGLXLCHCTPAWATE

SEQ ID NO: 10725 - protein, 93 aa, Zea mays
  Coding DNA Sequence Number=SeqID_484
HNSNVGEMCLCIGSTFDTSLAIEPGFCWAGKCRLRVGRTGWLVGSTSTLINLGVPSRLVPSIPIDSSVHPSRRDRNEPASHPSPVSTTNAVVT

SEQ ID NO: 10726 - protein, 161 aa, Zea mays
  misc_feature (1)..(38): Xaa can be any naturally occurring amino acid
  Coding DNA Sequence Number=SeqID_486
XXXXXXXXXXXXXXXXXXXXXXXXXXXXXXXXXXXXXXPKTTSLLWLCPCRLSLTKTARPAAHDAPDQHLAARPRLPVAARRAARSTSARCCRVDYDPFRASRNRRSSFGDQEIKLFKFYKAEDPEHMFGEGCPWCNLCSGKEEGVEVDLQEFQDFDEFED

SEQ ID NO: 10727 - protein, 118 aa, Zea mays
  Coding DNA Sequence Number=SeqID_488
  Homolog annotation: Hit_ID=A2Z1G1; Match level="QueryCoverage=80%, HitCoverage=9%, E-value=5e-21, Identity=56%"; Hit description =Putative uncharacterized protein
MLSYIIFMFVYFNSQLRRHIEKDCCVRMMKDKSDAFFLSQLRSYRYLQEAIIFIDCSGASMCEVQKVEAAYRHAAEVHPNHPSIELIRTNTDGMASSSSDHPNTEVRPSCLEFSFFSN

SEQ ID NO: 10728 - protein, 102 aa, Zea mays
  Coding DNA Sequence Number=SeqID_489
  Subcellular localization annotation: CTP_CleavageSite=71; ConfidenceScore=5.61e-01
PSLFLSLSVSHVLSSLPLPLSRLLSATSLVPHLCLLFLRCPFMPPPTHLSAQGRRSSLPGPAPRLRLVLVRASRRPHAKERRLTEGIIGVQQNAFYMQHPHV

SEQ ID NO: 10729 - protein, 211 aa, Zea mays
  Coding DNA Sequence Number=SeqID_491
VIRHFIDPEPHRQFYLPSHVILILRFSTQPDSLPARFSKKLIRKKLNQTGRVELRGTARQRHVSHVSDQRPLPGTGRLGGRANDVRRRASWVQRCERTADWTRSKVQTHVRTRYTVPSGGRSFTSLAGLPRPRRFAPRCRGRASHHWPARSFPGIGTLSTSALLASCCSSPSCSVAVHRNRTGRVEKISAKPSADYIRRQPPVVASCSSER

SEQ ID NO: 10730 - protein, 219 aa, Zea mays
  misc_feature (176)..(176): Xaa can be any naturally occurring amino acid
  misc_feature (180)..(180): Xaa can be any naturally occurring amino acid
  misc_feature (188)..(188): Xaa can be any naturally occurring amino acid
  Coding DNA Sequence Number=SeqID_493
  Gene Ontology: Mol. function=phosphoribosylaminoimidazolecarboxamide formyltransferase activity; Cellular component=integral to membrane; Biological process=purine nucleotide biosynthetic process
  Homolog annotation: Hit_ID=Q6ZKK5; Match level="QueryCoverage=97%, HitCoverage=34%, E-value=7e-90, Identity=79%"; Hit description =Putative aminoimidazolecarboximide ribonucleotide transformylase
  Pfam annotation: Domain name=AICARFT_IMPCHas; Domain location=1-151; Score=-4.6; E_value=2.3e-13; Accession=PF01808.9; Description =AICARFTIMPCHase bienzyme
TGVLRVQDLAREIREFRRPTDGETRMFYEIVVAPGYTAEGLEVLKGKSKTLRILEAKRRRSGKGTLLSLRQVGGGWLAQEPDDVTPEDVAFTNVSERAPDARELSDAKFACLCVKHVKSNAIVIAKNSCMLGMGSGQPNRLESLRIAFRKAGEEAKGAALASDAFFPFAWNDAVEXEACXRGVAVIAXPGGSIRDQDAVECCNKYGVALVFTGVRHFRH

SEQ ID NO: 10731 - protein, 235 aa, Zea mays
  misc_feature (185)..(185): Xaa can be any naturally occurring amino acid
  misc_feature (207)..(207): Xaa can be any naturally occurring amino acid
  Coding DNA Sequence Number=SeqID_6746
  Homolog annotation: Hit_ID=Q9C669; Match level="QueryCoverage=53%, HitCoverage=27%, E-value=5e-07, Identity=31%"; Hit description =Putative uncharacterized protein F28B23.9
YCGGVAVTCRRGADKRLREREKKNNQFSRPSPATASGRPLPSPWITTTPAGKRKRSEPTQPWRRRSIGSGSSWRTSSPPPPPPPRSLSLRSPPPPPWTAPSTKVLLLRGPLPVSILLPPRRQARSHQIVNTPAPYDPPPRAQYNKPLPTTVYPHPPAQPQLPSNNPFRSSPLPPDTPVSPRPPAXIIHTPTPRRQPSPSPQAPLYQXKTTVTPPHLESPHPPILPHLSFFSPPPK

SEQ ID NO: 10732 - protein, 334 aa, Zea mays
  misc_feature (188)..(334): Xaa can be any naturally occurring amino acid
  Coding DNA Sequence Number=SeqID_6747
EVEREGKKEQSILQTLPGNRVRPSASVSLDNHDARRQAKAKRANPAMEKAIDRQRVLLAHLLPSPSAASSQPQLAESPPPPLDSAFYQSSTPSGTTACVYSSSSTPTGPLSPDCEHPGTVRPPAPSTIQQAAPHNRLSPPPSPTTTSLKQPFQVFPLTTRYPRVPETARIIIHTPTPRRQPSPSPQAXXXXXXXXXXXXXXXXXXXXXXXXXXXXXXXXXXXXXXXXXXXXXXXXXXXXXXXXXXXXXXXXXXXXXXXXXXXXXXXXXXXXXXXXXXXXXXXXXXXXXXXXXXXXXXXXXXXXXXXXXXXXXXXXXXXXXXXXXXXXXXXXXXX

SEQ ID NO: 10733 - protein, 124 aa, Zea mays
  misc_feature (1)..(27): Xaa can be any naturally occurring amino acid
  Coding DNA Sequence Number=SeqID_6749
XXXXXXXXXXXXXXXXXXXXXXXXXXXLTRVEEGRRIISVFHYLMGRTRTKTKRRPCPNNDELPVPFPSQGAGARAGPPYPTRLCLFPFTFLCASCRLHDESVIGCASRCCRWGCAPVPRPRPR

SEQ ID NO: 10734 - protein, 190 aa, Zea mays
  misc_feature (147)..(190): Xaa can be any naturally occurring amino acid
  Coding DNA Sequence Number=SeqID_6751
RTRRWRPACPTTTTSSWAVTPPGWHYVPPLIATRPSPHLPGGTHAPHLPICPPPPPPPSRGPYHTAPPQPQYNFIINDLFGAGPCSYMLSPMPSPTCLLPLLPLFYWPSLSFACLSPDSLHPRRSGPPSTTHHSYRPSRGYLRRIDXXXXXXXXXXXXXXXXXXXXXXXXXXXXXXXXXXXXXXXXXXXX

SEQ ID NO: 10735 - protein, 152 aa, Zea mays
  misc_feature (31)..(31): Xaa can be any naturally occurring amino acid
  misc_feature (51)..(51): Xaa can be any naturally occurring amino acid
  misc_feature (57)..(57): Xaa can be any naturally occurring amino acid
  misc_feature (62)..(62): Xaa can be any naturally occurring amino acid
  misc_feature (71)..(72): Xaa can be any naturally occurring amino acid
  misc_feature (74)..(75): Xaa can be any naturally occurring amino acid
  misc_feature (89)..(89): Xaa can be any naturally occurring amino acid
  misc_feature (92)..(93): Xaa can be any naturally occurring amino acid
  misc_feature (98)..(99): Xaa can be any naturally occurring amino acid
  misc_feature (108)..(108): Xaa can be any naturally occurring amino acid
  misc_feature (112)..(112): Xaa can be any naturally occurring amino acid
  misc_feature (117)..(119): Xaa can be any naturally occurring amino acid
  misc_feature (123)..(123): Xaa can be any naturally occurring amino acid
  misc_feature (126)..(126): Xaa can be any naturally occurring amino acid
  misc_feature (131)..(131): Xaa can be any naturally occurring amino acid
  misc_feature (133)..(136): Xaa can be any naturally occurring amino acid
  misc_feature (139)..(139): Xaa can be any naturally occurring amino acid
  misc_feature (145)..(145): Xaa can be any naturally occurring amino acid
  misc_feature (149)..(149): Xaa can be any naturally occurring amino acid
  misc_feature (151)..(152): Xaa can be any naturally occurring amino acid
  Coding DNA Sequence Number=SeqID_6752
PWLHREPCPTRSRDFHLSPAAFPHRSDQTCXLGFFSLNSLRKFLHEHEESXGSPPRXVGVLXRPSLSLPLXXFXXPLLFTASSGIGLGXALXXEPPSXXIRVGDTERXVQIXTWRRXXXSRAXESXSNRGXNXXXXNAXRGREGXGKGXVXX

SEQ ID NO: 10736 - protein, 160 aa, Zea mays
  misc_feature (143)..(143): Xaa can be any naturally occurring amino acid
  Coding DNA Sequence Number=SeqID_6754
  Gene Ontology: Mol. function=structural constituent of ribosome; Cellular component=ribonucleoprotein complex; Biological process =translation
  Homolog annotation: Hit_ID=P16181; Match level="QueryCoverage=100%, HitCoverage=100%, E-value=4e-72, Identity=83%"; Hit description=40S ribosomal protein S11-1
  Pfam annotation: Domain name=Ribosomal_S17; Domain location=74-143; Score=148.0; E_value=2.5e-41; Accession=PF00366.10; Description =Ribosomal protein S17
MAEQTEKAFLKQPKVFLSSKKSGKGKRPGKGGNRFWKNIGLGFKTPRDAIDGHYIDKKCPFTGTVSVRGRILAGTCHSAKMQRTIIVRRNYLHFVKKYQRYEKRHSNIPAHVSPCFRVKEGDHVIIGQCRPLSKTVRFNVLKXVIPAGASAFAKKAFTGM

SEQ ID NO: 10737 - protein, 143 aa, Zea mays
  Coding DNA Sequence Number=SeqID_6755
  Gene Ontology: Mol. function=structural constituent of ribosome; Cellular component=ribonucleoprotein complex; Biological process =translation
  Homolog annotation: Hit_ID=P16181; Match level="QueryCoverage=100%, HitCoverage=89%, E-value=4e-64, Identity=83%"; Hit description=40S ribosomal protein S11-1
  Pfam annotation: Domain name=Ribosomal_S17; Domain location=74-143; Score=150.6; E_value=4.4e-42; Accession=PF00366.10; Description =Ribosomal protein S17
MAEQTEKAFLKQPKVFLSSKISGKGKRPGKGGNRFVKNIGLGFKTPREASQGTYIDSKCPFTGTVSIRGRILAGTCHSAKMQRTIIVRRNYLHFVKKYQRYEKRHSNIPAHVSPCFRVKEGDHVIIGQCRPLSKTVRFNVLKV

SEQ ID NO: 10738 - protein, 130 aa, Zea mays
  misc_feature (22)..(23): Xaa can be any naturally occurring amino acid
  misc_feature (33)..(33): Xaa can be any naturally occurring amino acid
  misc_feature (35)..(36): Xaa can be any naturally occurring amino acid
  misc_feature (38)..(38): Xaa can be any naturally occurring amino acid
  misc_feature (41)..(41): Xaa can be any naturally occurring amino acid
  misc_feature (44)..(44): Xaa can be any naturally occurring amino acid
  misc_feature (53)..(53): Xaa can be any naturally occurring amino acid
  misc_feature (56)..(56): Xaa can be any naturally occurring amino acid
  misc_feature (71)..(71): Xaa can be any naturally occurring amino acid
  misc_feature (79)..(79): Xaa can be any naturally occurring amino acid
  misc_feature (81)..(81): Xaa can be any naturally occurring amino acid
  misc_feature (84)..(84): Xaa can be any naturally occurring amino acid
  misc_feature (92)..(92): Xaa can be any naturally occurring amino acid
  misc_feature (95)..(95): Xaa can be any naturally occurring amino acid
  misc_feature (111)..(112): Xaa can be any naturally occurring amino acid
  misc_feature (114)..(115): Xaa can be any naturally occurring amino acid
  misc_feature (118)..(118): Xaa can be any naturally occurring amino acid
  misc_feature (123)..(123): Xaa can be any naturally occurring amino acid
  misc_feature (125)..(126): Xaa can be any naturally occurring amino acid
  misc_feature (129)..(129): Xaa can be any naturally occurring amino acid
  Coding DNA Sequence Number=SeqID_6756
  Subcellular localization annotation: CTP_CleavageSite=24; ConfidenceScore=5.15e-01
NPAAPCRTPSRTLSLRPPPLRXXTASKHRGLEXSXXRXRQXKTXEVTSSIQKXWAXSPVNLTVSSLNLPPXPPLQGLMXWXGLXRCKTPRGXKSXPMEASFDRRWKNPTSXXGXXKSXSPKTXPXXKMXF

SEQ ID NO: 10739 - protein, 213 aa, Zea mays
  misc_feature (73)..(75): Xaa can be any naturally occurring amino acid
  misc_feature (213)..(213): Xaa can be any naturally occurring amino acid
  Coding DNA Sequence Number=SeqID_6758
  Gene Ontology: Mol. function=signal transducer activity; Cellular component=membrane; Biological process=regulation of transcription, DNA-dependent
  Homolog annotation: Hit_ID=Q3K759; Match level="QueryCoverage=99%, HitCoverage=40%, E-value=2e-71, Identity=70%"; Hit description =Chemotaxis sensory transducer, Pas/Pac sensor
  Pfam annotation: Domain name=MCPsignal; Domain location=86-213; Score= -8.4; E_value=1.9e-06; Accession=PF00015.11; Description=Methyl -accepting chemotaxis protein (MCP) signaling domain
MGVHGLLRPLAQLNQRARLIADNPLSQAIYTGRGDEFGRIEFAMQMLEAQVGAVVGRIGDASQRLSGHAAALXXXLDSSHTSSLGQQSQTDQVAAAINQMAASVAQVAEHALQASKAADQAGSETREGHQRVDESRDAVLRLSQELARATDVIHQLESHSGDISGVLEVIRAIAEQTNLLALNAAIEAARAGEQGRGFAVVADEVRGLAQRTX

SEQ ID NO: 10740 - protein, 133 aa, Zea mays
  Coding DNA Sequence Number=SeqID_6759
  Gene Ontology: Cellular component=integral to membrane; Biological process=photosynthesis
  Homolog annotation: Hit_ID=Q39194; Match level="QueryCoverage=79%, HitCoverage=79%, E-value=3e-39, Identity=75%"; Hit description =Photosystem II reaction center W protein, chloroplast precursor
  Pfam annotation: Domain name=PsbW; Domain location=1-133; Score =308.4; E_value=1.4e-89; Accession=PF03912.4; Description=Photosystem II reaction centre W protein, PsbW
  Subcellular localization annotation: CTP_CleavageSite=44; ConfidenceScore=5.50e-01
MASFTASASTVSVARPALLLKPTLAISAPVLGLPPMGKRKGGVRCSMEPKQGNVSAVGAGVSAAATAALTAVMSNPAMALVDDRMSTEGTGLPFGLSNNLLGWILLGVFGLIWTFYFTYTSSLDEDEESGLSL

SEQ ID NO: 10741 - protein, 148 aa, Zea mays
  Coding DNA Sequence Number=SeqID_6760
  Gene Ontology: Mol. function=DNA binding; Cellular component =chromosome; Biological process=nucleosome assembly
  Homolog annotation: Hit_ID=Q9FJE8; Match level="QueryCoverage=87%, HitCoverage=87%, E-value=2e-51, Identity=82%"; Hit description =Probable histone H2A.7
  Pfam annotation: Domain name=CBFD_NFYB_HMF; Domain location=32-96; Score=13.9; E_value=0.0084; Accession=PF00808.13; Description =Histone-like transcription factor (CBFNF-Y) and archaeal histone
  Pfam annotation: Domain name=Histone; Domain location=26-99; Score =103.3; E_value=7.7e-28; Accession=PF00125.14; Description=Core histone H2AH2BH3H4
  Pfam module annotation: Pfam domain module=CBFD_NFYB_HMF::Histone; Domain location=32-96::26-99
  Subcellular localization annotation: CTP_CleavageSite=59; ConfidenceScore=5.15e-01
METTGKVKKAFGGRKAGGPKTKSVSKSIKAGLQFPVGRITRFLKKGRYAQRLGGGAPVYMAAVLEYLAAEVLELAGNAARDNKKSRIIPRHLLLAIRNDEELGKLLSGVTIAHGGVLPNINSVLLPKKSAKSSEDAAPKSPGKSPKKA

SEQ ID NO: 10742 - protein, 148 aa, Zea mays
  Coding DNA Sequence Number=SeqID_6761
  Gene Ontology: Mol. function=DNA binding; Cellular component =chromosome; Biological process=nucleosome assembly
  Homolog annotation: Hit_ID=Q9FJE8; Match level="QueryCoverage=91%, HitCoverage=90%, E-value=2e-51, Identity=79%"; Hit description =Probable histone H2A.7
  Pfam annotation: Domain name=CBFD_NFYB_HMF; Domain location=32-96; Score=13.2; E_value=0.0097; Accession=PF00808.13; Description =Histone-like transcription factor (CBFNF-Y) and archaeal histone
  Pfam annotation: Domain name=Histone; Domain location=26-99; Score =103.3; E_value=7.5e-28; Accession=PF00125.14; Description=Core histone H2AH2BH3H4
  Pfam module annotation: Pfam domain module=CBFD_NFYB_HMF::Histone; Domain location=32-96::26-99
  Subcellular localization annotation: CTP_CleavageSite=59; ConfidenceScore=5.22e-01
METTGKVKKAFGGRKAGGPKTKSVSKSIKAGLQFPVGRITRFLRKGRYAQRLGGGAPVYMAAVLEYLAAEVLELAGNAARDNKKSRIIPRHLLLAIRNDEELGKLLSGVTIAHGGVLPNINSVLLPKKSAKSTEEVASKSPAKSPKKA

SEQ ID NO: 10743 - protein, 192 aa, Zea mays
  misc_feature (38)..(38): Xaa can be any naturally occurring amino acid
  misc_feature (42)..(42): Xaa can be any naturally occurring amino acid
  misc_feature (66)..(66): Xaa can be any naturally occurring amino acid
  misc_feature (74)..(74): Xaa can be any naturally occurring amino acid
  misc_feature (76)..(76): Xaa can be any naturally occurring amino acid
  misc_feature (81)..(81): Xaa can be any naturally occurring amino acid
  misc_feature (86)..(86): Xaa can be any naturally occurring amino acid
  misc_feature (91)..(91): Xaa can be any naturally occurring amino acid
  misc_feature (93)..(93): Xaa can be any naturally occurring amino acid
  misc_feature (99)..(129): Xaa can be any naturally occurring amino acid
  misc_feature (133)..(175): Xaa can be any naturally occurring amino acid
  misc_feature (177)..(183): Xaa can be any naturally occurring amino acid
  misc_feature (185)..(192): Xaa can be any naturally occurring amino acid
  Coding DNA Sequence Number=SeqID_6762
LTSTKISVCFTRKNTPRTDEVSWHIYVQVRTGASFWFXHFFXNTTVIIRSITTTIRRREELDSLVXNHHHHHHXQXLFRQXALWSXRSGVXTXSLGCWXXXXXXXXXXXXXXXXXXXXXXXXXXXXXXXKKKXXXXXXXXXXXXXXXXXXXXXXXXXXXXXXXXXXXXXXXXXXXPXXXXXXXNXXXXXXXX

SEQ ID NO: 10744 - protein, 82 aa, Zea mays
  misc_feature (59)..(82): Xaa can be any naturally occurring amino acid
  Coding DNA Sequence Number=SeqID_6764
RAAARWPWLRGGRCQSPTPELCSWLSGHPLNIEVNYGYIFKRDPTNNSFVQKSYITILXXXXXXXXXXXXXXXXXXXXXXXX

SEQ ID NO: 10745 - protein, 165 aa, Zea mays
  misc_feature (103)..(103): Xaa can be any naturally occurring amino acid
  misc_feature (128)..(128): Xaa can be any naturally occurring amino acid
  misc_feature (137)..(137): Xaa can be any naturally occurring amino acid
  misc_feature (152)..(152): Xaa can be any naturally occurring amino acid
  Coding DNA Sequence Number=SeqID_6766
  Gene Ontology: Mol. function=diacylglycerol kinase activity; Biological process=activation of protein kinase C
  Homolog annotation: Hit_ID=Q7XCS9; Match level="QueryCoverage=95%, HitCoverage=21%, E-value=6e-41, Identity=60%"; Hit description =Sphingosine kinase, putative, expressed
  Pfam annotation: Domain name=DAGK_cat; Domain location=20-144; Score =65.7; E_value=1.5e-16; Accession=PF00781.14; Description =Diacylglycerol kinase catalytic domai
FPQDPCVLSLSPLGDDWVAGAQVFLGPFAGDKHHQLAGFKMEVVKTTHAGHAKSLVSTIDFSTCPDGIVCVGGDGIVNEVLNGLLCRDDQNMSASVPIGIIPXAGSDNSLIWTVLGVKDPISAALSIXVRGGLTPIXDGFFLLNGIQSGTIXHYGTPITKFLGLG

SEQ ID NO: 10746 - protein, 136 aa, Zea mays
  Coding DNA Sequence Number=SeqID_6767
  Homolog annotation: Hit_ID=A2X9A8; Match level="QueryCoverage=38%, HitCoverage=47%, E-value=6e-10, Identity=66%"; Hit description =Putative uncharacterized protein
MGSEDYVDFFRDANMSSDTDMSKVFEDRTFVSSILNSQLSSGEERKAVVMVVAADMPPALQRRAFCCAHDELAAMPHFPRRLEPKRLALALKKLIWKVLRVADPTIGSSSIKRPLVTEATTSMVIRCTCHFLSPFS

SEQ ID NO: 10747 - protein, 135 aa, Zea mays
  misc_feature (1)..(19): Xaa can be any naturally occurring amino acid
  Coding DNA Sequence Number=SeqID_6768
XXXXXXXXXXXXXXXXXXXAAHRCLYLSLPSSLSPHLSPPFPRLAPLCPDQAAAAEPWPNLPPKPEPFKPLPFAPRSTPASSPSPRNGSTSARPKSLRNSKTTASSSSTRRRAPRSRAGACYAFFLRERYSFSNC

SEQ ID NO: 10748 - protein, 108 aa, Zea mays
  Coding DNA Sequence Number=SeqID_6769
  Subcellular localization annotation: CTP_CleavageSite=57; ConfidenceScore=5.45e-01
YNGVSGLPTPPSSSDAVVHYTATVVLGRDRDPSLSSSGTVYGLRTPPSCPCLFSIISLPHLSSEFSLWSRSWLLCCFSFKSSCIQIWCLFLGQMLISCRNHASRSRVF

SEQ ID NO: 10749 - protein, 136 aa, Zea mays
  misc_feature (1)..(13): Xaa can be any naturally occurring amino acid
  Coding DNA Sequence Number=SeqID_6771
  Subcellular localization annotation: CTP_CleavageSite=78; ConfidenceScore=5.60e-01
XXXXXXXXXXXXXPSLDGATMPPPPSTLPVSRPCPASSPAQYAARSGLRSSTMRRWLLACSHAPFGSAALGDLAPPPRAPTASPPTHRLPRLAGRLCLLLQRRSAPPGMGDLRRSGGPPRRRGRRATQLGSTFPRT

SEQ ID NO: 10750 - protein, 88 aa, Zea mays
  Coding DNA Sequence Number=SeqID_6773
  Gene Ontology: Mol. function=nucleic acid binding; Cellular component= nucleus; Biological process=mRNA processing
  Homolog annotation: Hit_ID=Q2R0Q1; Match level="QueryCoverage=76%, HitCoverage=11%, E-value=6e-27, Identity=86%"; Hit description=U2 snRNP auxilliary factor, large subunit, splicing factor family protein, expressed
LIILLLARLVYISTLLTKIWTGNLVKVAIPRPDPSGAPVAGVGKVFLEYADVEGSTKAKTGMHGRKFGGNQVVAVFYPEDKFAAEQYD

SEQ ID NO: 10751 - protein, 127 aa, Zea mays
  misc_feature (1)..(22): Xaa can be any naturally occurring amino acid
  misc_feature (26)..(29): Xaa can be any naturally occurring amino acid
  misc_feature (31)..(32): Xaa can be any naturally occurring amino acid
  misc_feature (34)..(34): Xaa can be any naturally occurring amino acid
  misc_feature (36)..(36): Xaa can be any naturally occurring amino acid
  misc_feature (39)..(39): Xaa can be any naturally occurring amino acid
  misc_feature (41)..(41): Xaa can be any naturally occurring amino acid
  misc_feature (67)..(69): Xaa can be any naturally occurring amino acid
  misc_feature (75)..(76): Xaa can be any naturally occurring amino acid
  misc_feature (79)..(79): Xaa can be any naturally occurring amino acid
  Coding DNA Sequence Number=SeqID_6774
XXXXXXXXXXXXXXXXXXXXXXNWNXXXXGXXFXGXHHXSXPSSPIRSIIAFLLVSCSSPSQRINFXXXIQVNPXXEKXGELRVPPIDPRSPGCTSYSQPCAFSESSSGDVILGPVRVFPLPGSAAG

SEQ ID NO: 10752 - protein, 133 aa, Zea mays
  misc_feature (6)..(6): Xaa can be any naturally occurring amino acid
  misc_feature (8)..(12): Xaa can be any naturally occurring amino acid
  misc_feature (14)..(16): Xaa can be any naturally occurring amino acid
  misc_feature (22)..(23): Xaa can be any naturally occurring amino acid
  misc_feature (41)..(42): Xaa can be any naturally occurring amino acid
  misc_feature (53)..(54): Xaa can be any naturally occurring amino acid
  Coding DNA Sequence Number=SeqID_6776
  Gene Ontology: Biological process=cellular metabolic process
  Homolog annotation: Hit_ID=A2Y7I6; Match level="QueryCoverage=87%, HitCoverage=39%, E-value=2e-32, Identity=64%"; Hit description =Putative uncharacterized protein
  Pfam annotation: Domain name=DUF561; Domain location=1-123; Score= -49.1; E_value=5.7e-08; Accession=PF04481.3; Description=Protein of unknown function (DUF561)
ADGAVXHXXXXXIXXXLAELLXXEGADIIQTEGGKCSSPTXXGVLGLIEKATXXLAAAYSISRAVSIPVMCSSGLSSVTAPMAVTAGAAGVGVGSAINKLNDVVAMIAEVRSIAQAMELAPRIVSENLRTISY

SEQ ID NO: 10753 - protein, 72 aa, Zea mays
  Coding DNA Sequence Number=SeqID_6777
QFSHKRHVPWETLHPLYIRDHICNKVDNRYFTFSLLSISLPLSITTVQSLTDVGGGGVGSGTAGERGSVGVV

SEQ ID NO: 10754 - protein, 160 aa, Zea mays
  Coding DNA Sequence Number=SeqID_6778
  Gene Ontology: Mol. function=inorganic diphosphatase activity; Cellular component=cytoplasm; Biological process=phosphate metabolic process
  Homolog annotation: Hit_ID=A2X8Q3; Match level="QueryCoverage=100%, HitCoverage=74%, E-value=7e-84, Identity=93%"; Hit description =Soluble inorganic pyrophosphatase
  Pfam annotation: Domain name=Pyrophosphatase; Domain location=1-152; Score=168.1; E_value=2.3e-47; Accession=PF00719.9; Description =Inorganic pyrophosphatase
VEIPRGSKVKYELDKATGLIKVDRVLYSSVVYPHNYGFIPRTLCEDNDPMDVLVLMQEQVVPGCFLRARAIGLMPMIDQGGKDDKIIAVCADDPEYRHFKDISELPPHRLQEIRRFFEDYKKNENKEVAVNDFLPAEDAIKAIKYSMDLYGSYVMESLRR

SEQ ID NO: 10755 - protein, 111 aa, Zea mays
  misc_feature (22)..(22): Xaa can be any naturally occurring amino acid
  Coding DNA Sequence Number=SeqID_6779
PKPAQPAADSPPRHHRRWPGLXYGNGEKQASTIRLIYGNGEKQASTGIEDSNLILPRLSSNPGSATEHNRRQQRCIVNFVNRVTDKEEKLPHTLLWVPQKNRHDLHADQEK

SEQ ID NO: 10756 - protein, 193 aa, Zea mays
  misc_feature (193)..(193): Xaa can be any naturally occurring amino acid
  Coding DNA Sequence Number=SeqID_6781
  Gene Ontology: Mol. function=ATPase activity, coupled to transmembrane movement of substances; Cellular component=integral to membrane; Biological process=transport
  Homolog annotation: Hit_ID=Q1IAL4; Match level="QueryCoverage=98%, HitCoverage=31%, E-value=1e-64, Identity=64%"; Hit description =Putative ABC transporter, permease/ATP-binding protein
TRQAFVERMNRVNNAVVEFVNGIPVVKAFGAIGKAHASYRKAVDDFSKAFVEFTRPLVGTMANANAMIAPVTVLATVLTFGLVFISLGWISAVEVLPFAIVAPGICAPLMLLSYITHDLNNAVGAAERVQALLATPVLAQVEPGSERLPKDAEVRVENLGYAYDPQNPVLSNISLTLKPGTVTAIVGASGSGX

SEQ ID NO: 10757 - protein, 78 aa, Zea mays
  misc_feature (78)..(78): Xaa can be any naturally occurring amino acid
  Coding DNA Sequence Number=SeqID_6782
  Gene Ontology: Mol. function=aspartic-type endopeptidase activity; Cellular component=chromatin; Biological process=chromatin assembly or disassembly
  Homolog annotation: Hit_ID=Q8W1D1; Match level="QueryCoverage=96%, HitCoverage=5%, E-value=5e-30, Identity=84%"; Hit description=Gag-pol
MEGDQVYLKVSPLRGMRRFKVKGKLSPRFIGPFLILKRVGEVAYQLKLPDHLSDIHDVFHVSQLKKYLRVPEEQLPLX

SEQ ID NO: 10758 - protein, 70 aa, Zea mays
  Coding DNA Sequence Number=SeqID_6783
  Homolog annotation: Hit_ID=A7PEG6; Match level="QueryCoverage=85%, HitCoverage=6%, E-value=4e-07, Identity=45%"; Hit description =Chromosome chr11 scaffold_13, whole genome shotgun sequence
  Pfam annotation: Domain name=LRR_1; Domain location=18-40; Score=8.9; E_value=6.8; Accession=PF00560.23; Description=Leucine Rich Repeat
  Pfam annotation: Domain name=LRR_1; Domain location=42-64; Score=9.4; E_value=5.4; Accession=PF00560.23; Description=Leucine Rich Repeat
  Pfam module annotation: Pfam domain module=LRR_1::LRR_1; Domain location=18-40::42-64
  Subcellular localization annotation: CTP_CleavageSite=34; ConfidenceScore=5.13e-01
MENPASVLVLPAQFTKLTFRNLYLFRNNFSGEIPATIGPLPSLSIFRFSNNRFTGALPPELGKYLGRDHA

SEQ ID NO: 10759 - protein, 139 aa, Zea mays
  misc_feature (40)..(40): Xaa can be any naturally occurring amino acid
  misc_feature (74)..(74): Xaa can be any naturally occurring amino acid
  misc_feature (78)..(78): Xaa can be any naturally occurring amino acid
  misc_feature (96)..(96): Xaa can be any naturally occurring amino acid
  misc_feature (100)..(100): Xaa can be any naturally occurring amino acid
  misc_feature (103)..(103): Xaa can be any naturally occurring amino acid
  misc_feature (108)..(108): Xaa can be any naturally occurring amino acid
  misc_feature (111)..(111): Xaa can be any naturally occurring amino acid
  misc_feature (113)..(113): Xaa can be any naturally occurring amino acid
  misc_feature (115)..(120): Xaa can be any naturally occurring amino acid
  misc_feature (122)..(123): Xaa can be any naturally occurring amino acid
  misc_feature (125)..(128): Xaa can be any naturally occurring amino acid
  misc_feature (130)..(131): Xaa can be any naturally occurring amino acid
  misc_feature (133)..(135): Xaa can be any naturally occurring amino acid
  misc_feature (138)..(139): Xaa can be any naturally occurring amino acid
  Coding DNA Sequence Number=SeqID_6784
  Gene Ontology: Mol. function=protein serine/threonine kinase activity; Cellular component=cell cortex; Biological process=protein amino acid phosphorylation
  Homolog annotation: Hit_ID=Q8GV28; Match level="QueryCoverage=82%, HitCoverage=27%, E-value=1e-29, Identity=59%"; Hit description =Serine/threonine protein kinase
  Pfam annotation: Domain name=Pkinase_Tyr; Domain location=1-116; Score=-162.5; E_value=0.018; Accession=PF07714.7; Description =Protein tyrosine kinase
MADELGWAVATNGTPRYSWDPAPATSTAREMIQHRPYDHXVDVYSFGIVLWELITGMLPFTTMTGRSGSFLLWXIKGXRPVIPQDCLSSLSHIMTXCWDXKPXKVRPXFTXIXCXXXXXXMXXLXXXXKXXFXXXISXX

SEQ ID NO: 10760 - protein, 87 aa, Zea mays
  Coding DNA Sequence Number=SeqID_6785
LARSITMTPRGIPPNSMLLRATSSWTEADRRRHSSAQPMHACRCRHIYGAHACGMPSEWIVVCDLHSSHSSPHADAALSCAHEKDAS

SEQ ID NO: 10761 - protein, 126 aa, Zea mays
  Coding DNA Sequence Number=SeqID_6787
VLARLNRCADCDYIPVAAYITCPHRTLYTCTRGRGMTLANFLLGACERARGSGHLQRRRTTASSSWWRGTMGGAYCRRRSPLEQQLLPAVLVLLVIVAASSSFWGVAAKETGRNVITHIKGFRGPL

SEQ ID NO: 10762 - protein, 137 aa, Zea mays
  Coding DNA Sequence Number=SeqID_6789
ILMDSLVRSVRQHIRWLARRVERACVRAYHRHAPLMTASRWMLRRPGFCKHELACKFRCCGQWPARGERAKASFTLVARPEDRARWHRHACGKASAKLAAARARASRAPRRKHPYRLPRWAHACLAYGIIVCLVNSS

SEQ ID NO: 10763 - protein, 90 aa, Zea mays
  Coding DNA Sequence Number=SeqID_6791
DIMSDGCSGPSDIMLSLAAAYEAIRHNRAIGTLSFYCSARRCRPMATPMFVVGGDGQLDARIGRHQRPPDMGIGWVRLVVVVMMDAPGDG

SEQ ID NO: 10764 - protein, 62 aa, Zea mays
  Coding DNA Sequence Number=SeqID_6793
DNYRFCAKNGTNRIIPTNAPKITKLAITESRAFFLSSSGSRDPKFGWILRIFNNCLFLIKVF

SEQ ID NO: 10765 - protein, 107 aa, Zea mays
  Coding DNA Sequence Number=SeqID_6794
LGDDDLDLSELIVASFMLLVLRYRVLETRTELPMSWSGSATVPLLQRAVLRVPFALELRIPRSSVRRASTKLPRHSAKPNTHCHHDSTVVALSVLFLSSRQSGFGSG

SEQ ID NO: 10766 - protein, 44 aa, Zea mays
  Coding DNA Sequence Number=SeqID_6796
EINSDTLYQKGERRGPAHRGRCRGSCAAVKCPFRRHGRGGDASE

SEQ ID NO: 10767 - protein, 143 aa, Zea mays
  Coding DNA Sequence Number=SeqID_6798
KFKMAKMSYIESKKKQETINILTIGNFTQTTSYSIHQLHSSTPNSLHVCHAVQRKTVPSCLVTCAVAITTVATYETKSHAFLLFWFLPSNGVPTTSPFFSAGVGCEPHRRLACTLSMAFEHPVHDESADAKLLRAACSARSRG

SEQ ID NO: 10768 - protein, 49 aa, Zea mays
  Coding DNA Sequence Number=SeqID_6800
CLWLSPHLKPPITIYINTHASITSPQTPAIMGIRIRLTRTLLHKLKSYF

SEQ ID NO: 10769 - protein, 108 aa, Zea mays
  misc_feature (14)..(15): Xaa can be any naturally occurring amino acid
  misc_feature (19)..(19): Xaa can be any naturally occurring amino acid
  misc_feature (23)..(23): Xaa can be any naturally occurring amino acid
  misc_feature (34)..(34): Xaa can be any naturally occurring amino acid
  misc_feature (45)..(45): Xaa can be any naturally occurring amino acid
  Coding DNA Sequence Number=SeqID_6802
TGGHGPGLAVLVVXXPAAXPRLXLSGDGIGMERXRWTGQGPGERXPGASSVTGQDRRSGGEVFFFFFFFFFFFFFFTTTISRQLPDYLVKITENLSDPSTTTYYICEI

SEQ ID NO: 10770 - protein, 211 aa, Zea mays
  misc_feature (128)..(128): Xaa can be any naturally occurring amino acid
  misc_feature (140)..(140): Xaa can be any naturally occurring amino acid
  misc_feature (145)..(145): Xaa can be any naturally occurring amino acid
  misc_feature (153)..(153): Xaa can be any naturally occurring amino acid
  misc_feature (164)..(164): Xaa can be any naturally occurring amino acid
  misc_feature (173)..(173): Xaa can be any naturally occurring amino acid
  misc_feature (179)..(179): Xaa can be any naturally occurring amino acid
  misc_feature (190)..(190): Xaa can be any naturally occurring amino acid
  Coding DNA Sequence Number=SeqID_6804
  Gene Ontology: Mol. function=RNA binding; Cellular component =intracellular; Biological process=hemolysis by symbiont of host red blood cells
  Homolog annotation: Hit_ID=Q9LSV5; Match level="QueryCoverage=94%, HitCoverage=65%, E-value=4e-91, Identity=89%"; Hit description =Hemolysin-like
  Pfam annotation: Domain name=FtsJ; Domain location=18-204; Score=3.1; E_value=3.2e-08; Accession=PF01728.9; Description=FtsJ-like methyltransferase
  Pfam annotation: Domain name=Methyltransf_11; Domain location=43-133; Score=14.6; E_value=0.0036; Accession=PF08241.2; Description =Methyltransferase domain
  Pfam module annotation: Pfam domain module=FtsJ::Methyltransf_11; Domain location=18-204::43-133
GIRHESSCPPPPAEVPKFVCRGGLKLEAALEKLDVDVSEKVVLDAGLSTGGFTDCLLRYGAAHVYGVDVGYGQVADKIRNDKKVTVIERTNLRYLPGLPQKVDVVTLDLSFISILKVMPAIMNVMKEXATLVTLVKPQFXEARRXQVGKGGIXRDPEVHQEGSXRKIITGVEXRYGFTXKGFIESPIKGXRRKHKVLACFNRRTIKPEAEE

SEQ ID NO: 10771 - protein, 144 aa, Zea mays
  misc_feature (120)..(120): Xaa can be any naturally occurring amino acid
  Coding DNA Sequence Number=SeqID_6805
  Gene Ontology: Mol. function=structural constituent of ribosome; Cellular component=ribonucleoprotein complex; Biological process =translation
  Homolog annotation: Hit_ID=Q9SGA6; Match level="QueryCoverage=97%, HitCoverage=97%, E-value=3e-72, Identity=93%"; Hit description=40S ribosomal protein S19-1
  Pfam annotation: Domain name=Ribosomal_S19e; Domain location=5-145; Score=308.0; E_value=1.8e-89; Accession=PF01090.9; Description =Ribosomal protein S19e
MATGKTVKDVSPHEFVKAYAAHLKRSGKIELPPWTDIVKTGKLKELAPYDPDWYYIRAASMARKVYLRGGLGVGAFRRIYGGSKRNGSRPPHFCKSSGGVARHILQQLQTMNIVDLDTKXGGRKITSSGERDLDQVAGRIAAAI

SEQ ID NO: 10772 - protein, 54 aa, Zea mays
  misc_feature (32)..(32): Xaa can be any naturally occurring amino acid
  Coding DNA Sequence Number=SeqID_6806
  Gene Ontology: Mol. function=structural constituent of ribosome; Cellular component=ribonucleoprotein complex; Biological process =translation
  Homolog annotation: Hit_ID=Q680P8; Match level="QueryCoverage=70%, HitCoverage=67%, E-value=1e-14, Identity=89%"; Hit description=40S ribosomal protein S29
  Pfam annotation: Domain name=Ribosomal_S14; Domain location=3-47; Score=18.0; E_value=0.0038; Accession=PF00253.11; Description =Ribosomal protein S14pS29e
MGHSNVWNSHPKKYGPGSPLCRVCGNSPGLIXKFGLNCWPTGFSVATPRGNRVH

SEQ ID NO: 10773 - protein, 82 aa, Zea mays
  Coding DNA Sequence Number=SeqID_6807
CRAQCCLVIDHDEQVIEDPGVQQVEIAEQELVEGEEQVVQEEATMRSMSLSRWRLLVSLMAPRNNYLIRFIVIIYFCKTSAM

SEQ ID NO: 10774 - protein, 189 aa, Zea mays
  misc_feature (1)..(1): Xaa can be any naturally occurring amino acid
  Coding DNA Sequence Number=SeqID_6809
  Subcellular localization annotation: CTP_CleavageSite=44; ConfidenceScore=5.30e-01
XALRVRARSIGRYRSFTYCIPSTSLSMSIYGSTPPPPMSTPGSRARAIGLTITLLSVSGCIHFSSTCGFGLLLSFTGILAGANLVAFGVSKADDNPAPTFPTAFDSARALAAFMRRSTATAGLVMASCAVTAVSSGEADPVLFFAMFALLLLGVSLVIAGARGFVAISDTINGAGAHSSQDGKKLKEEK

SEQ ID NO: 10775 - protein, 199 aa, Zea mays
  misc_feature (1)..(1): Xaa can be any naturally occurring amino acid
  Coding DNA Sequence Number=SeqID_6810
  Gene Ontology: Mol. function=transferase activity, transferring glycosyl groups; Cellular component=nucleus; Biological process =nucleoside metabolic process
  Homolog annotation: Hit_ID=A7PNT9; Match level="QueryCoverage=99%, HitCoverage=87%, E-value=4e-75, Identity=67%"; Hit description =Chromosome chr8 scaffold_23, whole genome shotgun sequence
  Pfam annotation: Domain name=Pribosyltran; Domain location=37-171; Score=54.5; E_value=3.7e-13; Accession=PF00156.17; Description =Phosphoribosyl transferase domain
XVSVLRDRFTPSHAFRSAMGELGRLLIYEATRDWLPTVTREIQTPVGTAVVESVSEMEPIMIVPILRAGLALADLATSILPSTKTFHLGMSRDETTLLPSVYLNKLPDRFPKGCNILLVDPMLATGGTVTAAVDLVKERGAEISQIRIISAVAAPPAIKKLNQRFPGICVYTGTMDQIVNEKGFIVPGLGDAGDRSYGT

SEQ ID NO: 10776 - protein, 153 aa, Zea mays
  Coding DNA Sequence Number=SeqID_6811
  Subcellular localization annotation: CTP_CleavageSite=46; ConfidenceScore=5.25e-01
SALLSPISPESPLPSPVSLSSLRDSESRSHPVPCSLCSGLEGGELRGSAEGARRWRQIRRGRDLHCWPCFSWRRPSARPRRLRVGGWPASAMVTLRQHQSGGFGKIWLLLAEGCIVNPLGWTINGARFELPFQQGHTRGGMILIGPHRGEPMQ

SEQ ID NO: 10777 - protein, 179 aa, Zea mays
  misc_feature (146)..(179): Xaa can be any naturally occurring amino acid
  Coding DNA Sequence Number=SeqID_6813
QQLSPSPFLESRDPWPSALPHLLRLLLPLPAGAFPRCQLRDRPLEGRSSRPPPRATTGPGILCPPDGGGSASGGTFRGGPLTRPARGWPPPTFPRPPGGPRRVPRAPHWRPGVYTSGPPPRVCSGPSLPPRRPHTGPRVLPRPGGXXXXXXXXXXXXXXXXXXXXXXXXXXXXXXXXXX

SEQ ID NO: 10778 - protein, 190 aa, Zea mays
  misc_feature (170)..(190): Xaa can be any naturally occurring amino acid
  Coding DNA Sequence Number=SeqID_6815
  Subcellular localization annotation: CTP_CleavageSite=68; ConfidenceScore=5.57e-01
NSSFYTTIPAESAAATLSLSVLGGPRPLAVRSASLLRLLLPLPAGGARRRARVAGASVPHAPPISNIRSMRGPPPVLVLMCQLYLSKTLHHVSHHETSCAVYTSSPLNAGHACIPPPPSAPTLLSLCSMIFTTATAPYSPLLRPPLFSPPHPLPPSFSPHPPIPTYLTSXXXXXXXXXXXXXXXXXXXXX

SEQ ID NO: 10779 - protein, 103 aa, Zea mays
  misc_feature (76)..(76): Xaa can be any naturally occurring amino acid
  misc_feature (83)..(83): Xaa can be any naturally occurring amino acid
  misc_feature (95)..(96): Xaa can be any naturally occurring amino acid
  Coding DNA Sequence Number=SeqID_6817
  Gene Ontology: Mol. function=ribonuclease inhibitor activity; Biological process=regulation of RNA metabolic process
  Homolog annotation: Hit_ID=Q8W0C5; Match level="QueryCoverage=46%, HitCoverage=28%, E-value=5e-14, Identity=85%"; Hit description=S -adenosylmethionine:2-demethylmenaquinone methyltransferase-like
MCSDHSSPGTSRSASSAAQLHEDLANRYLIYSFEQRLEKNRVRGVRSKIIKKEDMAALPLATAEVCDANPHLIMNXELRALQXIFQIYGRCQVFXXPIVTLKG

SEQ ID NO: 10780 - protein, 120 aa, Zea mays
  Coding DNA Sequence Number=SeqID_6818
  Subcellular localization annotation: CTP_CleavageSite=43; ConfidenceScore=5.02e-01
KRESSHCGCNSGVSSQTRPRWPEFSPHHCGTIMSALPMVTHPPARMRSPAIRHVGPVLVLPAKSDHRLSLVFNRRREEGVDRIQRTKKGARKSKYKEKCGLLPSGYRSAAGQVLRLGQEK

SEQ ID NO: 10781 - protein, 193 aa, Zea mays
  misc_feature (1)..(1): Xaa can be any naturally occurring amino acid
  misc_feature (3)..(4): Xaa can be any naturally occurring amino acid
  misc_feature (36)..(36): Xaa can be any naturally occurring amino acid
  misc_feature (155)..(155): Xaa can be any naturally occurring amino acid
  misc_feature (159)..(159): Xaa can be any naturally occurring amino acid
  Coding DNA Sequence Number=SeqID_6820
XKXXTSHARVRKLGIRLELLGSRLGLGFRHSRPDSXRSSLAPGFPCSGPASNQDASASGAPLPPATSWRTSLTWAPPSASQPRSLLRAPASGFLATVSNAQPPAQPPTPTFTASSRASSAPTRTTARSCLFLSGVSSTTVPTTPLPGPVLSASTXSRPXPPSRLPSRPCRFRALHANKPGGRPKPSVRAASAT

SEQ ID NO: 10782 - protein, 59 aa, Zea mays
  misc_feature (32)..(32): Xaa can be any naturally occurring amino acid
  misc_feature (34)..(34): Xaa can be any naturally occurring amino acid
  Coding DNA Sequence Number=SeqID_6822
  Subcellular localization annotation: CTP_CleavageSite=35; ConfidenceScore=5.06e-01
STRHTAFRGGTGPFGRRETPAQSPSAWTYVLXRXSAAARRPVGEQLHRLVMEVLVGRTV

SEQ ID NO: 10783 - protein, 135 aa, Zea mays
  misc_feature (39)..(39): Xaa can be any naturally occurring amino acid
  misc_feature (66)..(66): Xaa can be any naturally occurring amino acid
  misc_feature (73)..(73): Xaa can be any naturally occurring amino acid
  misc_feature (84)..(84): Xaa can be any naturally occurring amino acid
  misc_feature (88)..(88): Xaa can be any naturally occurring amino acid
  misc_feature (91)..(92): Xaa can be any naturally occurring amino acid
  misc_feature (105)..(105): Xaa can be any naturally occurring amino acid
  misc_feature (124)..(124): Xaa can be any naturally occurring amino acid
  misc_feature (135)..(135): Xaa can be any naturally occurring amino acid
  Coding DNA Sequence Number=SeqID_6824
  Subcellular localization annotation: CTP_CleavageSite=81; ConfidenceScore=5.28e-01
RSFPSPMQCIFTSPMRATEYLAHALTAPCNLSKSVWSTXKSYSTSPPTFGSTQAPYLSLLEAGVQXPCCRPWXPIPVNVILCSXGASXSWXXVQWQRTNFFLVWXYTTLILLCLLLQLGRHRRXNAWPVAGRLGX

SEQ ID NO: 10784 - protein, 94 aa, Zea mays
  misc_feature (26)..(28): Xaa can be any naturally occurring amino acid
  misc_feature (32)..(94): Xaa can be any naturally occurring amino acid
  Coding DNA Sequence Number=SeqID_6826
GLLHLAMAPPYVPRVPNVISRLNSRXXXICLXXXXXXXXXXXXXXXXXXXXXXXXXXXXXXXXXXXXXXXXXXXXXXXXXXXXXXXXXXXXXXX

SEQ ID NO: 10785 - protein, 61 aa, Zea mays
  Coding DNA Sequence Number=SeqID_6827
  Gene Ontology: Mol. function=spermidine synthase activity; Biological process=spermidine biosynthetic process
  Homolog annotation: Hit_ID=A3BIV6; Match level="QueryCoverage=78%, HitCoverage=18%, E-value=7e-16, Identity=81%"; Hit description =Putative uncharacterized protein
TDFQHPVFNTEEDEHSTKSKGPLKFYNSEIHTTSFCLSSFAKRVIESKAVYRGTSHWNGEC

SEQ ID NO: 10786 - protein, 61 aa, Zea mays; identical to SEQ ID NO: 10785
  Coding DNA Sequence Number=SeqID_6828
  Gene Ontology: Mol. function=spermidine synthase activity; Biological process=spermidine biosynthetic process
  Homolog annotation: Hit_ID=A3BIV6; Match level="QueryCoverage=78%, HitCoverage=18%, E-value=7e-16, Identity=81%"; Hit description =Putative uncharacterized protein

SEQ ID NO: 10787 - protein, 83 aa, Zea mays
  Coding DNA Sequence Number=SeqID_6829
  Subcellular localization annotation: CTP_CleavageSite=31; ConfidenceScore=5.60e-01
TTMAASLQGPYTGGSGLGGRVVHARSGDRRSAAAVKRLLSRLTRSWRRRTARPRRTAVRFRYDLHSYYQNFDDGTASCAHHRL

SEQ ID NO: 10788 - protein, 167 aa, Zea mays
  Coding DNA Sequence Number=SeqID_6831
  Gene Ontology: Mol. function=metallopeptidase activity; Cellular component=vacuole; Biological process=proteolysis
  Homolog annotation: Hit_ID=A3A1W9; Match level="QueryCoverage=56%, HitCoverage=30%, E-value=3e-29, Identity=69%"; Hit description =Putative uncharacterized protein
  Subcellular localization annotation: CTP_CleavageSite=54; ConfidenceScore=5.45e-01
MALLRLHLPRPLLSSRRSPALPSALSASATSCLWRGRLPASRLLCSSHPALAPDASSAAPPSIVAGLLDYLNESWTQFHATAEAKRQLLDAGFKLLSESDDWDLQPGGRYFFTRNMSCLVAFAIGENTVNTDGFKPNLETHLVPLLATKHEDTPTNSDEKSSNSHLI

SEQ ID NO: 10789 - protein, 125 aa, Zea mays
  misc_feature (57)..(57): Xaa can be any naturally occurring amino acid
  misc_feature (77)..(77): Xaa can be any naturally occurring amino acid
  Coding DNA Sequence Number=SeqID_6832
  Gene Ontology: Mol. function=sequence-specific DNA binding; Cellular component=intracellular; Biological process=regulation of transcription, DNA-dependent
MPVRWIDPSPVLRVERFGSFDEFRPNDVLGGMTSTPLGSSAIAVSRSILALPDCLLXLQRSFARRMEGELGADRGDXLVVPLVSRNLNAPINCGIRGDQQLTSHLRSRTIDGFDLEYQLAPKGHC

SEQ ID NO: 10790 - protein, 200 aa, Zea mays
  misc_feature (175)..(175): Xaa can be any naturally occurring amino acid
  misc_feature (190)..(192): Xaa can be any naturally occurring amino acid
  Coding DNA Sequence Number=SeqID_6833
  Gene Ontology: Mol. function=coproporphyrinogen oxidase activity; Cellular component=cytoplasm; Biological process=porphyrin biosynthetic process
  Homolog annotation: Hit_ID=Q28MA1; Match level="QueryCoverage=98%, HitCoverage=41%, E-value=1e-50, Identity=51%"; Hit description =Oxygen-independent coproporphyrinogen III oxidase
  Pfam annotation: Domain name=HemN_C; Domain location=127-198; Score =8.8; E_value=9.8e-05; Accession=PF06969.6; Description=HemN C -terminal region
IQSLDMVESSIDTLRREGVSSINLDLVYGLPRQTVHGLTRTIEQIVDLAPDRIALFGYAHVPWMMPRQNLIKDEDLPDARQRYRQQLVAADKLEEAGYVHIGLDHFTLPTDDLAIMADNGLLRRNFQGYTSDQAATVIGLGASSIGSFDQGFVQNTPNTGKWRDAIGKGQFATCXGVVLTDEDRFRADIXXXLVGPGPDF

SEQ ID NO: 10791 - protein, 206 aa, Zea mays
  misc_feature (185)..(185): Xaa can be any naturally occurring amino acid
  Coding DNA Sequence Number=SeqID_6834
  Gene Ontology: Mol. function=structural constituent of ribosome; Cellular component=ribonucleoprotein complex; Biological process =translation
  Homolog annotation: Hit_ID=Q9ZUT9; Match level="QueryCoverage=100%, HitCoverage=99%, E-value=3e-98, Identity=89%"; Hit description=40S ribosomal protein S5-1
  Pfam annotation: Domain name=Ribosomal_S7; Domain location=52-195; Score=164.5; E_value=2.8e-46; Accession=PF00177.11; Description =Ribosomal protein S7pS5e
MAAAVEIDAEIQQQLTNEVKLFNRWSFDDVSVTDISLVDYIGVQPAKHATFVPHTAGRYSVKRFRKAQCPIVERLTNSLMMHGRNNGKKLMAVRIIKHAMEIIHLLTDANPIQVIIDAIVNSGPREDATRIGSAGVVRRQAVDISPLRRVNQAIFLLTTGAREAAFRNIKTIAECLADELIIPAXGSPNSYASKRSGIFGEECQAN

SEQ ID NO: 10792 - protein, 182 aa, Zea mays
  misc_feature (119)..(119): Xaa can be any naturally occurring amino acid
  misc_feature (125)..(125): Xaa can be any naturally occurring amino acid
  misc_feature (145)..(145): Xaa can be any naturally occurring amino acid
  misc_feature (158)..(160): Xaa can be any naturally occurring amino acid
  misc_feature (165)..(165): Xaa can be any naturally occurring amino acid
  misc_feature (173)..(173): Xaa can be any naturally occurring amino acid
  Coding DNA Sequence Number=SeqID_6835
  Gene Ontology: Mol. function=chlorophyll binding; Cellular component =integral to membrane; Biological process=photosynthesis, light harvesting
  Homolog annotation: Hit_ID=P36494; Match level="QueryCoverage=76%, HitCoverage=52%, E-value=2e-55, Identity=77%"; Hit description =Chlorophyll a-b binding protein CP24, chloroplast precursor
  Pfam annotation: Domain name=Chloroa_b-bind; Domain location=69-179; Score=54.9; E_value=2.8e-13; Accession=PF00504.12; Description =Chlorophyll A-B binding protein
  Subcellular localization annotation: CTP_CleavageSite=47; ConfidenceScore=5.41e-01
MAMAAVTGAVLSGLGSSFLSGGRRSITALGTGVGTGAARVGRKTLIVAAAAAQPKKSWIPAVKGGGNFLDPEWLDGSLPGDFGFDPLGLGKDPAFLKWYREAELIHGRWAMAAVLGIFXVGQAWXSGVPWFEARADPRAIAPFSXFGSLLRTQLLLMXXXVESKXWVDFFHPXSQSGEWATP

SEQ ID NO: 10793 - protein, 220 aa, Zea mays
  misc_feature (1)..(124): Xaa can be any naturally occurring amino acid
  misc_feature (220)..(220): Xaa can be any naturally occurring amino acid
  Coding DNA Sequence Number=SeqID_6836
XXXXXXXXXXXXXXXXXXXXXXXXXXXXXXXXXXXXXXXXXXXXXXXXXXXXXXXXXXXXXXXXXXXXXXXXXXXXXXXXXXXXXXXXXXXXXXXXXXXXXXXXXXXXXXXXXXXXXXXXXXXXRERLRLLLALVGSASVAAELAGIEWRLARAWIRVGLRLAIASERVARERPRRASRHGGRRHAQRVAQIEEPVVKDRRRRRGALTEIHLEGGPGTQX

SEQ ID NO: 10794 - protein, 153 aa, Zea mays
  misc_feature (139)..(139): Xaa can be any naturally occurring amino acid
  Coding DNA Sequence Number=SeqID_6838
  Subcellular localization annotation: CTP_CleavageSite=47; ConfidenceScore=5.67e-01
NSFTPRQAGDGFTNAPGPVHTPSRLPFSGGPLPQPGGLPRSQSGPINAPSRNYSTAQWNSPSNSQRQPGSNSSFQLPPLRTSTPPQPSGLGLRPAMSRQGSFTAEVMQIPAERKLSTLMKVCRNLPSRSGRGQVIAVEXPIDGPALGQIKSHR

SEQ ID NO: 10795 - protein, 47 aa, Zea mays
  misc_feature (20)..(20): Xaa can be any naturally occurring amino acid
  Coding DNA Sequence Number=SeqID_6840
PPQSYDKIIHVFSSLLLFTXPHEGSQLCNLLLMPAENKSIFSMDVAI

SEQ ID NO: 10796 - protein, 91 aa, Zea mays
  Coding DNA Sequence Number=SeqID_6842
  Subcellular localization annotation: CTP_CleavageSite=60; ConfidenceScore=5.00e-01
ATHNQGIQILKRPLPGLTFILAGCLKAAVINWSSFLGIVPQNFITHRFQSFSSHFLGRVLETGFSNHKTIREFRTRFIFPSLVPFSFWGWP

SEQ ID NO: 10797 - protein, 137 aa, Zea mays
  misc_feature (24)..(25): Xaa can be any naturally occurring amino acid
  misc_feature (28)..(28): Xaa can be any naturally occurring amino acid
  misc_feature (36)..(36): Xaa can be any naturally occurring amino acid
  misc_feature (48)..(48): Xaa can be any naturally occurring amino acid
  misc_feature (74)..(74): Xaa can be any naturally occurring amino acid
  misc_feature (76)..(76): Xaa can be any naturally occurring amino acid
  misc_feature (78)..(79): Xaa can be any naturally occurring amino acid
  misc_feature (81)..(81): Xaa can be any naturally occurring amino acid
  misc_feature (84)..(85): Xaa can be any naturally occurring amino acid
  misc_feature (95)..(95): Xaa can be any naturally occurring amino acid
  misc_feature (98)..(98): Xaa can be any naturally occurring amino acid
  misc_feature (100)..(101): Xaa can be any naturally occurring amino acid
  misc_feature (104)..(105): Xaa can be any naturally occurring amino acid
  misc_feature (108)..(110): Xaa can be any naturally occurring amino acid
  misc_feature (112)..(112): Xaa can be any naturally occurring amino acid
  misc_feature (114)..(115): Xaa can be any naturally occurring amino acid
  misc_feature (118)..(118): Xaa can be any naturally occurring amino acid
  misc_feature (121)..(123): Xaa can be any naturally occurring amino acid
  misc_feature (125)..(125): Xaa can be any naturally occurring amino acid
  misc_feature (132)..(133): Xaa can be any naturally occurring amino acid
  misc_feature (135)..(135): Xaa can be any naturally occurring amino acid
  misc_feature (137)..(137): Xaa can be any naturally occurring amino acid
  Coding DNA Sequence Number=SeqID_6843
VQAVHKSCSPVHNIQEGSPSSCAXXIVXALKEVTHXPLMAAHIKGMYXVAIVSEDHDNHLECSMRILWLMIILXRXIXXSXGIXXSVKSSFMLFXLSXRXXHAXXPFXXXIXWXXQQXSRXXXPXVGMNHHXXQXRX

SEQ ID NO: 10798 - protein, 169 aa, Zea mays
  misc_feature (3)..(4): Xaa can be any naturally occurring amino acid
  misc_feature (7)..(8): Xaa can be any naturally occurring amino acid
  misc_feature (11)..(11): Xaa can be any naturally occurring amino acid
  misc_feature (16)..(16): Xaa can be any naturally occurring amino acid
  misc_feature (21)..(21): Xaa can be any naturally occurring amino acid
  misc_feature (35)..(35): Xaa can be any naturally occurring amino acid
  misc_feature (37)..(37): Xaa can be any naturally occurring amino acid
  misc_feature (48)..(48): Xaa can be any naturally occurring amino acid
  misc_feature (56)..(57): Xaa can be any naturally occurring amino acid
  misc_feature (61)..(62): Xaa can be any naturally occurring amino acid
  misc_feature (66)..(67): Xaa can be any naturally occurring amino acid
  misc_feature (70)..(70): Xaa can be any naturally occurring amino acid
  misc_feature (78)..(80): Xaa can be any naturally occurring amino acid
  misc_feature (86)..(86): Xaa can be any naturally occurring amino acid
  misc_feature (89)..(90): Xaa can be any naturally occurring amino acid
  misc_feature (95)..(96): Xaa can be any naturally occurring amino acid
  misc_feature (108)..(108): Xaa can be any naturally occurring amino acid
  misc_feature (111)..(111): Xaa can be any naturally occurring amino acid
  misc_feature (113)..(115): Xaa can be any naturally occurring amino acid
  misc_feature (117)..(117): Xaa can be any naturally occurring amino acid
  misc_feature (120)..(120): Xaa can be any naturally occurring amino acid
  misc_feature (131)..(132): Xaa can be any naturally occurring amino acid
  misc_feature (135)..(135): Xaa can be any naturally occurring amino acid
  misc_feature (138)..(138): Xaa can be any naturally occurring amino acid
  misc_feature (142)..(142): Xaa can be any naturally occurring amino acid
  misc_feature (150)..(150): Xaa can be any naturally occurring amino acid
  misc_feature (153)..(153): Xaa can be any naturally occurring amino acid
  Coding DNA Sequence Number=SeqID_6845
  Gene Ontology: Mol. function=argininosuccinate synthase activity; Cellular component=chloroplast; Biological process=amino acid biosynthetic process
  Homolog annotation: Hit_ID=A2ZJA1; Match level="QueryCoverage=99%, HitCoverage=33%, E-value=8e-21, Identity=44%"; Hit description =Argininosuccinate synthase
KAXXACXXVVXDLKEXFVREXIYPLACAQGEVYEXKXLLWGLLWARPXIAKAMVDXXRKLXXDAVXXGCXGKGKRSGXXXELTFYXLKXXELKGXXPWRGGGIFQDGXMLXEXXXKXKGXCSRFQKNQYTXXNRXLGXLNHXGEILEGPXNEXKGKMEMVAIGPKKGPP

SEQ ID NO: 10799 - protein, 135 aa, Zea mays
  misc_feature (2)..(2): Xaa can be any naturally occurring amino acid
  misc_feature (17)..(18): Xaa can be any naturally occurring amino acid
  misc_feature (24)..(24): Xaa can be any naturally occurring amino acid
  misc_feature (29)..(29): Xaa can be any naturally occurring amino acid
  misc_feature (32)..(33): Xaa can be any naturally occurring amino acid
  misc_feature (37)..(37): Xaa can be any naturally occurring amino acid
  misc_feature (39)..(41): Xaa can be any naturally occurring amino acid
  misc_feature (43)..(44): Xaa can be any naturally occurring amino acid
  misc_feature (46)..(46): Xaa can be any naturally occurring amino acid
  misc_feature (49)..(55): Xaa can be any naturally occurring amino acid
  misc_feature (57)..(61): Xaa can be any naturally occurring amino acid
  misc_feature (63)..(65): Xaa can be any naturally occurring amino acid
  misc_feature (69)..(72): Xaa can be any naturally occurring amino acid
  misc_feature (74)..(75): Xaa can be any naturally occurring amino acid
  misc_feature (79)..(83): Xaa can be any naturally occurring amino acid
  misc_feature (87)..(87): Xaa can be any naturally occurring amino acid
  misc_feature (90)..(90): Xaa can be any naturally occurring amino acid
  misc_feature (92)..(92): Xaa can be any naturally occurring amino acid
  misc_feature (96)..(96): Xaa can be any naturally occurring amino acid
  misc_feature (98)..(98): Xaa can be any naturally occurring amino acid
  misc_feature (100)..(102): Xaa can be any naturally occurring amino acid
  misc_feature (106)..(107): Xaa can be any naturally occurring amino acid
  misc_feature (112)..(113): Xaa can be any naturally occurring amino acid
  misc_feature (115)..(119): Xaa can be any naturally occurring amino acid
  misc_feature (121)..(135): Xaa can be any naturally occurring amino acid
  Coding DNA Sequence Number=SeqID_6846
YXRRTSAVLSIFRRRYXXRSGKQXGAGPXGPXXLRPXSXXXPXXRXLRXXXXXXXGXXXXXRXXXSSWXXXXTXXWGIXXXXXTSTXPTXRXPASXLXTXXXPRSXXGPVGXXCXXXXXGXXXXXXXXXXXXXXX

SEQ ID NO: 10800 - protein, 121 aa, Zea mays
  misc_feature (11)..(11): Xaa can be any naturally occurring amino acid
  misc_feature (13)..(13): Xaa can be any naturally occurring amino acid
  misc_feature (25)..(25): Xaa can be any naturally occurring amino acid
  misc_feature (28)..(28): Xaa can be any naturally occurring amino acid
  misc_feature (43)..(43): Xaa can be any naturally occurring amino acid
  misc_feature (50)..(50): Xaa can be any naturally occurring amino acid
  misc_feature (52)..(52): Xaa can be any naturally occurring amino acid
  misc_feature (57)..(57): Xaa can be any naturally occurring amino acid
  misc_feature (59)..(59): Xaa can be any naturally occurring amino acid
  misc_feature (61)..(61): Xaa can be any naturally occurring amino acid
  misc_feature (68)..(68): Xaa can be any naturally occurring amino acid
  misc_feature (74)..(74): Xaa can be any naturally occurring amino acid
  misc_feature (82)..(82): Xaa can be any naturally occurring amino acid
  misc_feature (118)..(118): Xaa can be any naturally occurring amino acid
  Coding DNA Sequence Number=SeqID_6848
  Subcellular localization annotation: CTP_CleavageSite=33; ConfidenceScore=5.03e-01
KKEVFFFPKKXGXIKPPPPLGRAPXGKXKPSPRGKFRWEREEXAFPPERXAXPFPCXGXFXKPVFLPXPVLELXLGRKEPFXPPKLRLPPGLDFHSWPRPKGNYPFFPQGLFPRNVKXQAV

SEQ ID NO: 10801 - protein, 145 aa, Zea mays
  misc_feature (1)..(10): Xaa can be any naturally occurring amino acid
  misc_feature (12)..(18): Xaa can be any naturally occurring amino acid
  misc_feature (20)..(53): Xaa can be any naturally occurring amino acid
  misc_feature (55)..(60): Xaa can be any naturally occurring amino acid
  misc_feature (62)..(63): Xaa can be any naturally occurring amino acid
  misc_feature (65)..(65): Xaa can be any naturally occurring amino acid
  Coding DNA Sequence Number=SeqID_6850
XXXXXXXXXXGXXXXXXXGXXXXXXXXXXXXXXXXXXXXXXXXXXXXXXXXXXVXXXXXXCXXLXLRRRLFSFPPSFSSAGALGSSAAAAGSGGVRRRRRFRWRAMRSAAGGAARSTRRRRSRAARASGKSIAGEGSSSPAGTRP

SEQ ID NO: 10802 - protein, 67 aa, Zea mays
  misc_feature (31)..(31): Xaa can be any naturally occurring amino acid
  misc_feature (38)..(38): Xaa can be any naturally occurring amino acid
  misc_feature (57)..(57): Xaa can be any naturally occurring amino acid
  Coding DNA Sequence Number=SeqID_6852
  Homolog annotation: Hit_ID=Q10R48; Match level="QueryCoverage=100%, HitCoverage=20%, E-value=5e-21, Identity=64%"; Hit description=Kelch repeat-containing F-box family protein, putative, expressed
LLRLSRSDYGSVASLSRDFRSMVRNGEIYCXDPYRERXIQVPKMPPDECFKCSHKEXSLAVGTELLV

SEQ ID NO: 10803 - protein, 172 aa, Zea mays
  misc_feature (1)..(2): Xaa can be any naturally occurring amino acid
  misc_feature (6)..(6): Xaa can be any naturally occurring amino acid
  misc_feature (10)..(14): Xaa can be any naturally occurring amino acid
  misc_feature (17)..(21): Xaa can be any naturally occurring amino acid
  misc_feature (23)..(23): Xaa can be any naturally occurring amino acid
  misc_feature (25)..(25): Xaa can be any naturally occurring amino acid
  misc_feature (28)..(30): Xaa can be any naturally occurring amino acid
  misc_feature (32)..(32): Xaa can be any naturally occurring amino acid
  misc_feature (34)..(34): Xaa can be any naturally occurring amino acid
  misc_feature (44)..(45): Xaa can be any naturally occurring amino acid
  misc_feature (50)..(50): Xaa can be any naturally occurring amino acid
  misc_feature (53)..(53): Xaa can be any naturally occurring amino acid
  misc_feature (56)..(56): Xaa can be any naturally occurring amino acid
  misc_feature (66)..(67): Xaa can be any naturally occurring amino acid
  misc_feature (73)..(73): Xaa can be any naturally occurring amino acid
  misc_feature (76)..(77): Xaa can be any naturally occurring amino acid
  misc_feature (80)..(80): Xaa can be any naturally occurring amino acid
  misc_feature (82)..(82): Xaa can be any naturally occurring amino acid
  misc_feature (85)..(85): Xaa can be any naturally occurring amino acid
  misc_feature (89)..(89): Xaa can be any naturally occurring amino acid
  misc_feature (92)..(92): Xaa can be any naturally occurring amino acid
  misc_feature (100)..(100): Xaa can be any naturally occurring amino acid
  misc_feature (119)..(119): Xaa can be any naturally occurring amino acid
  misc_feature (123)..(123): Xaa can be any naturally occurring amino acid
  misc_feature (127)..(132): Xaa can be any naturally occurring amino acid
  misc_feature (135)..(135): Xaa can be any naturally occurring amino acid
  misc_feature (154)..(154): Xaa can be any naturally occurring amino acid
  misc_feature (159)..(160): Xaa can be any naturally occurring amino acid
  misc_feature (162)..(162): Xaa can be any naturally occurring amino acid
  misc_feature (165)..(168): Xaa can be any naturally occurring amino acid
  Coding DNA Sequence Number=SeqID_6853
XXLSAXPIHXXXXXSLXXXXXFXSXQEXXXRXGXHPDPPSPVRXXSAHVXRGXGRXERSCCRSRPXXECYRAXNLXXDVXAXDHXDGPXAAXQLPLAAAXDAFWSGRTPPPPFDHVDRXVHRXFRPXXXXXXVSXTVKFMIRVTMMFIIRVELXLSYRXXLXTCXXXXKKVE

SEQ ID NO: 10804 - protein, 97 aa, Zea mays
  Coding DNA Sequence Number=SeqID_6855
  Gene Ontology: Mol. function=lipid binding; Cellular component =cellular_component; Biological process=lipid transport
  Homolog annotation: Hit_ID=Q42158; Match level="QueryCoverage=100%, HitCoverage=100%, E-value=4e-21, Identity=50%"; Hit description =Lipid transfer protein
  Pfam annotation: Domain name=Tryp_alpha_amyl; Domain location=32-97; Score=48.9; E_value=1.7e-11; Accession=PF00234.12; Description =Protease inhibitorseed storageLTP f
  Subcellular localization annotation: CTP_CleavageSite=54; ConfidenceScore=5.20e-01
MVKVMWGSSLALAVALLLVTVANIPVAEGVTCSPTELTSCSPAFMSASPPSATCCAKLREQKPCLCGYLRNPTLSQYVNSPNAKKVASSCNVATPKC

SEQ ID NO: 10805 - protein, 102 aa, Zea mays
  misc_feature (82)..(82): Xaa can be any naturally occurring amino acid
  Coding DNA Sequence Number=SeqID_6856
  Gene Ontology: Mol. function=structural constituent of ribosome; Cellular component=intracellular; Biological process=protein modification process
  Homolog annotation: Hit_ID=O64955; Match level="QueryCoverage=87%, HitCoverage=91%, E-value=3e-32, Identity=81%"; Hit description =Polyubiquitin
  Pfam annotation: Domain name=ubiquitin; Domain location=24-93; Score =119.4; E_value=1.1e-32; Accession=PF00240.13; Description=Ubiquitin family
KSINKFLNSYLSRELRFKMQIFVKTLTGKTITLEVESSDTIDNVKAKIQDKEGIPPDQQRLIFAGKQLEDGRTLADYNIQKXESTLHLVLTAPAVDLPVLPL

SEQ ID NO: 10806 - protein, 129 aa, Zea mays
  misc_feature (37)..(37): Xaa can be any naturally occurring amino acid
  Coding DNA Sequence Number=SeqID_6857
KKENHILLPNVLRELDPDDTPDRPQPLPQNQAPCFQXNGRSSVWALTAKLRREEERIEVRGEGRASRREADGEGEERVGRKEREGDGRSEDLVAGRTLAEEEMRVVEEATDAIETCLSLSLFSLGNTYL

SEQ ID NO: 10807 - protein, 156 aa, Zea mays
  Coding DNA Sequence Number=SeqID_6858
  Homolog annotation: Hit_ID=Q9C787; Match level="QueryCoverage=87%, HitCoverage=87%, E-value=4e-36, Identity=66%"; Hit description =Putative uncharacterized protein F10D13_16
  Pfam annotation: Domain name=Lg106; Domain location=45-141; Score =196.2; E_value=7.8e-56; Accession=PF07844.2; Description=Lg106-like protein
MEDGKGKELVGDTPPSVEQNDNKKVSGETEIHKEPSRESEENAIKKKYGGLLPKKIPLISKDHERAFFDSADWALGKQKGQKPKGPLEALRPKLQPTPHQQPRARRMALSSGDNTEDAEADTNEPIDDQQASASAVDNAKDDGGIDDADAKDNIKS

SEQ ID NO: 10808 - protein, 154 aa, Zea mays
  Coding DNA Sequence Number=SeqID_6859
  Gene Ontology: Mol. function=structural constituent of ribosome; Cellular component=ribonucleoprotein complex; Biological process =translation
  Homolog annotation: Hit_ID=Q8LD46; Match level="QueryCoverage=83%, HitCoverage=83%, E-value=2e-48, Identity=78%"; Hit description=60S ribosomal protein L23a-1
  Pfam annotation: Domain name=Ribosomal_L23; Domain location=72-151; Score=102.6; E_value=1.2e-27; Accession=PF00276.10; Description =Ribosomal protein L23
  Pfam annotation: Domain name=Ribosomal_L23eN; Domain location=12-66; Score=70.7; E_value=4.9e-18; Accession=PF03939.4; Description =Ribosomal protein L23, N-terminal domain
  Pfam module annotation: Pfam domain module=Ribosomal_L23::Ribosomal _L23eN; Domain location=72-151::12-66
MSPAKVDTTKKADPKAKALKAAKAVKSGQAFKKKDKKIRTKVTFHRPKTLTKARDPKYPRISATPRNKLDHYGILKYPLTTESAMKKIEDNNTLVFIVDIRADKKKIKDAVKKMYDIQTKKVNTLIRPDGTKKAYVRLTPDYDALDVANKIGII

SEQ ID NO: 10809 - protein, 136 aa, Zea mays
  Coding DNA Sequence Number=SeqID_6860
  Gene Ontology: Mol. function=DNA binding; Cellular component =chromosome; Biological process=nucleosome assembly
  Homolog annotation: Hit_ID=Q00YS0; Match level="QueryCoverage=100%, HitCoverage=81%, E-value=2e-58, Identity=86%"; Hit description =Histones H3 and H4
  Pfam annotation: Domain name=CBFD_NFYB_HMF; Domain location=64-129; Score=5.1; E_value=0.054; Accession=PF00808.13; Description=Histone -like transcription factor (CBFNF-Y) and archaeal histone
  Pfam annotation: Domain name=Histone; Domain location=58-132; Score =138.9; E_value=1.4e-38; Accession=PF00125.14; Description=Core histone H2AH2BH3H4
  Pfam module annotation: Pfam domain module=CBFD_NFYB_HMF::Histone; Domain location=64-129::58-132
  Subcellular localization annotation: CTP_CleavageSite=53; ConfidenceScore=5.45e-01
MARTKQTARKSTGGKAPRKQLATKAARKSAPATGGVKKPHRFRPGTVALREIRKYQKSTELLIRKLPFQRLVREIAQDFKTDLRFQSSAVAALQEAAEAYLVGLFEDTNLCAIHAKRVTIMPKDIQLARRIRGERA

SEQ ID NO: 10810 - protein, 173 aa, Zea mays
  misc_feature (1)..(2): Xaa can be any naturally occurring amino acid
  misc_feature (4)..(12): Xaa can be any naturally occurring amino acid
  misc_feature (15)..(21): Xaa can be any naturally occurring amino acid
  misc_feature (24)..(24): Xaa can be any naturally occurring amino acid
  misc_feature (27)..(27): Xaa can be any naturally occurring amino acid
  misc_feature (29)..(29): Xaa can be any naturally occurring amino acid
  misc_feature (32)..(32): Xaa can be any naturally occurring amino acid
  misc_feature (34)..(34): Xaa can be any naturally occurring amino acid
  misc_feature (46)..(47): Xaa can be any naturally occurring amino acid
  misc_feature (55)..(56): Xaa can be any naturally occurring amino acid
  misc_feature (60)..(64): Xaa can be any naturally occurring amino acid
  misc_feature (68)..(69): Xaa can be any naturally occurring amino acid
  misc_feature (73)..(74): Xaa can be any naturally occurring amino acid
  misc_feature (86)..(86): Xaa can be any naturally occurring amino acid
  misc_feature (90)..(90): Xaa can be any naturally occurring amino acid
  misc_feature (96)..(99): Xaa can be any naturally occurring amino acid
  misc_feature (103)..(104): Xaa can be any naturally occurring amino acid
  misc_feature (108)..(111): Xaa can be any naturally occurring amino acid
  misc_feature (117)..(117): Xaa can be any naturally occurring amino acid
  misc_feature (120)..(120): Xaa can be any naturally occurring amino acid
  misc_feature (123)..(123): Xaa can be any naturally occurring amino acid
  misc_feature (125)..(125): Xaa can be any naturally occurring amino acid
  misc_feature (131)..(132): Xaa can be any naturally occurring amino acid
  misc_feature (146)..(157): Xaa can be any naturally occurring amino acid
  misc_feature (160)..(161): Xaa can be any naturally occurring amino acid
  misc_feature (163)..(172): Xaa can be any naturally occurring amino acid
  Coding DNA Sequence Number=SeqID_6861
XXGXXXXXXXXXLVXXXXXXXAPXNFXRXDPXVXPRVRADPDFRQXXPADGSSAXXPYLXXXXXRMLXXLKKXXSPSAPLPLPVPXSPFXRADTCXXXXRAAXXLIGXXXXDALLTXLSXRRXYXPTICWXXRRYDIVVPTLALPXXXXXXXXXXXXDIXXFXXXXXXXXXXD

SEQ ID NO: 10811 - protein, 124 aa, Zea mays
  misc_feature (105)..(105): Xaa can be any naturally occurring amino acid
  Coding DNA Sequence Number=SeqID_6863
  Homolog annotation: Hit_ID=Q9SV82; Match level="QueryCoverage=100%, HitCoverage=30%, E-value=4e-25, Identity=52%"; Hit description=F-box protein At4g10400
  Pfam annotation: Domain name=F-box; Domain location=2-49; Score=34.5; E_value=3.7e-07; Accession=PF00646.23; Description=F-box domain
MDNLSRLPDELLVRILSLVPTKVVVSTSILSKRWKFLWMSLPKLEFVDRDESLLVLKNFVNKNLPLHRAPVIQSFLLSLYESREKNIKPEDIRQWVEIAVSRHLXELDVSYSSDNKENMVPNSL

SEQ ID NO: 10812 - protein, 88 aa, Zea mays
  Coding DNA Sequence Number=SeqID_6864
PTPPTVPCTNRRRHTRSTTARTKPPDLSRIDEKSEAEGTDPGLWQDRREKGKADEAKQKEKTRASDDDLEGPPPPEQGGGGWLKLKLG

SEQ ID NO: 10813 - protein, 203 aa, Zea mays
  misc_feature (182)..(182): Xaa can be any naturally occurring amino acid
  Coding DNA Sequence Number=SeqID_6866
  Gene Ontology: Mol. function=protein kinase activity; Biological process=protein amino acid phosphorylation
  Homolog annotation: Hit_ID=Q9SIR8; Match level="QueryCoverage=97%, HitCoverage=100%, E-value=1e-25, Identity=40%"; Hit description =Putative uncharacterized protein At2g25250
  Subcellular localization annotation: CTP_CleavageSite=67; ConfidenceScore=5.37e-01
MGVAVLNPQDCLKQPFSHMKYPRNHTACPNRHQKKPVPNRTRRSPPRNQTTRSPPKAPPPPPQRAAVSSYVPKGTVEKSPTKNVVVGQVRILKRGEEIPKKTLELVVEKTNLVVEKTDLVVEKPDLVSTQRIGPDPCLIPSQIRLSDRKSKKTTVVPFYAGPVTMTSPPPSDVPLPAFFTTXKDATNHIIKLLRLDVAWMALH

SEQ ID NO: 10814 - protein, 198 aa, Zea mays
  misc_feature (158)..(158): Xaa can be any naturally occurring amino acid
  misc_feature (163)..(163): Xaa can be any naturally occurring amino acid
  misc_feature (174)..(174): Xaa can be any naturally occurring amino acid
  misc_feature (187)..(187): Xaa can be any naturally occurring amino acid
  Coding DNA Sequence Number=SeqID_6867
  Gene Ontology: Mol. function=translation elongation factor activity; Cellular component=cytoplasm; Biological process=translational elongation
  Homolog annotation: Hit_ID=P13905; Match level="QueryCoverage=98%, HitCoverage=42%, E-value=3e-96, Identity=90%"; Hit description =Elongation factor 1-alpha
  Pfam annotation: Domain name=GTP_EFTU; Domain location=5-195; Score =247.2; E_value=3.6e-71; Accession=PF00009.17; Description=Elongation factor Tu GTP binding domain
  Pfam annotation: Domain name=MMR_HSR1; Domain location=8-156; Score= -7.7; E_value=0.0054; Accession=PF01926.13; Description=GTPase of unknown function
  Pfam module annotation: Pfam domain module=GTP_EFTU::MMR_HSR1; Domain location=5-195::8-156
MGKEKFHINIVVIGHVDSGKSTTTGHLIYKLGGIDKRVIERFEKEAAEMNKRSFKYAWVLDKLKAERERGITIDIALWKFETTKYYCTVIDAPGHRDFIKNMITGTSQADCAVLIIDPTTGGFEAGISKDGQTREHALLAFTLGVKQMICCCNQMDAXYPQVXSRARYDEIIQXVSSYFEERLGTTXDKIPFVPLLLR

SEQ ID NO: 10815 - protein, 185 aa, Zea mays
  Coding DNA Sequence Number=SeqID_6868
  Gene Ontology: Mol. function=transporter activity; Cellular component= mitochondrial inner membrane; Biological process=transport
  Homolog annotation: Hit_ID=P40941; Match level="QueryCoverage=98%, HitCoverage=50%, E-value=3e-72, Identity=72%"; Hit description=ADP ,ATP carrier protein 2, mitochondrial precursor
  Pfam annotation: Domain name=Mito_carr; Domain location=72-169; Score= 133.0; E_value=8.8e-37; Accession=PF00153.17; Description =Mitochondrial carrier protein
  Subcellular localization annotation: CTP_CleavageSite=83; ConfidenceScore=5.20e-01
MVEQTQNKLMRTGVVSHDIHGYTSSFQRRATYGNYTNAAFQYPLAATSRIVATTTTTSPVFVQAPSEKGFSSFAIDFLMGGVSAAVSKTAAAPIERVKLLIQNQDEMLKAGRLSEPYKGIGDCFGRTIKDEGFGSLWRGNTANVIRYFPTQALNFAFKDYFKRLFNFKKDRDGHWEVVAGYLGPL

SEQ ID NO: 10816 - protein, 194 aa, Zea mays
  misc_feature (165)..(165): Xaa can be any naturally occurring amino acid
  Coding DNA Sequence Number=SeqID_6869
  Gene Ontology: Mol. function=serine-type endopeptidase activity; Cellular component=intracellular; Biological process=protein modification process
  Homolog annotation: Hit_ID=P93501; Match level="QueryCoverage=100%, HitCoverage=88%, E-value=1e-100, Identity=94%"; Hit description =Ubiquitin-like protein
  Pfam annotation: Domain name=ubiquitin; Domain location=6-74; Score =138.0; E_value=2.6e-38; Accession=PF00240.13; Description=Ubiquitin family
  Pfam annotation: Domain name=ubiquitin; Domain location=82-150; Score= 135.6; E_value=1.4e-37; Accession=PF00240.13; Description=Ubiquitin family
  Pfam module annotation: Pfam domain module=ubiquitin::ubiquitin; Domain location=6-74::82-150
MQIFVKTLTGKTITLEVESSDTIDNVKAKIQDKEGIPPDQQRLIFAGKQLEDGRTLADYNIQKESTLHLVLRLRGGMQIFVKTLTGKTITLEVESSDTIDNVKTKIQDKEGIPPDQQRLIFAGKQLEDGRTLADYNIQKESTLHLVLRLRGGMQIFVKTLTGKTXTLEVESSDTIDNVKAKIQDQGRIPPDQQR

SEQ ID NO: 10817 - protein, 237 aa, Zea mays
  misc_feature (214)..(214): Xaa can be any naturally occurring amino acid
  misc_feature (237)..(237): Xaa can be any naturally occurring amino acid
  Coding DNA Sequence Number=SeqID_6870
  Gene Ontology: Mol. function=(S)-2-hydroxy-acid oxidase activity; Cellular component=peroxisome; Biological process=oxidative photosynthetic carbon pathway
  Homolog annotation: Hit_ID=Q9LRS0; Match level="QueryCoverage=99%, HitCoverage=64%, E-value=1e-114, Identity=88%"; Hit description =Probable peroxisomal (S)-2-hydroxy-acid oxidase 1
  Pfam annotation: Domain name=FMN_dh; Domain location=13-237; Score =245.3; E_value=1.3e-70; Accession=PF01070.8; Description=FMN -dependent dehydrogenase
MEITNVTEYEAIAKEKLPKMVYDYYASGAEDQWTLQENRNAFARILFRPRILIDVSKIDMTTTVLGFKISMPIMVAPTAMQKMAHPEGEYATARAASAAGTIMTLSSWATSSVEEVASTGPGIRFFQLYVYKNRNVVEQLVRRAERAGFKAIALTVDTPRLGRRESDIKNRFTLPPTLTLKNFEGLDLGKMDEANDSGLASYVAGQIDRTLSWXDVQGLQTITKMPMLGSGGLTGEX

SEQ ID NO: 10818 - protein, 157 aa, Zea mays
  misc_feature (140)..(140): Xaa can be any naturally occurring amino acid
  Coding DNA Sequence Number=SeqID_6871
  Gene Ontology: Mol. function=DNA binding; Cellular component =chromosome; Biological process=nucleosome assembly
  Homolog annotation: Hit_ID=Q9SI96; Match level="QueryCoverage=59%, HitCoverage=60%, E-value=7e-41, Identity=95%"; Hit description =Histone H2B.3
  Pfam annotation: Domain name=CBFD_NFYB_HMF; Domain location=66-123; Score=3.0; E_value=0.084; Accession=PF00808.13; Description=Histone -like transcription factor (CBFNF-Y) and archaeal histone
  Pfam annotation: Domain name=Histone; Domain location=56-126; Score =109.9; E_value=7.8e-30; Accession=PF00125.14; Description=Core histone H2AH2BH3H4
  Pfam module annotation: Pfam domain module=CBFD_NFYB_HMF::Histone; Domain location=66-123::56-126
MAPKAGKKPAEKKPAAAAEKPAEEVAEKAPAEKKPKAGKKLPKEAGAIDKKKKRNKKSIETYKIYIFKVLKQVHPDIGISSKAMGIMNSFINDIFEKLAQEASKLARYNKKPTITSREIQTAVRLVLPGELAKHAVSEGXTKAGTKFTTSWNGGFPV

SEQ ID NO: 10819 - protein, 141 aa, Zea mays
  Coding DNA Sequence Number=SeqID_6872
  Gene Ontology: Mol. function=DNA binding; Cellular component =chromosome; Biological process=nucleosome assembly
  Homolog annotation: Hit_ID=A7PHV6; Match level="QueryCoverage=65%, HitCoverage=61%, E-value=3e-37, Identity=86%"; Hit description =Histone H2B
  Pfam annotation: Domain name=CBFD_NFYB_HMF; Domain location=69-126; Score=3.0; E_value=0.084; Accession=PF00808.13; Description=Histone -like transcription factor (CBFNF-Y) and archaeal histone
  Pfam annotation: Domain name=Histone; Domain location=59-129; Score =109.9; E_value=7.8e-30; Accession=PF00125.14; Description=Core histone H2AH2BH3H4
  Pfam module annotation: Pfam domain module=CBFD_NFYB_HMF::Histone; Domain location=69-126::59-129
MAPKAGKKPAEKKPAAAAAAEKPAEEVAEKAPLEKKPKAGKKLPKEAIGATDKKKKRSKKSIETYKIYIFKVLKQVHPDIGISSKAMGIMNSFINDIFEKLAQEASKLARYNKKPTITSREIQTAVRLVLPGELAKHAVSE

SEQ ID NO: 10820 - protein, 198 aa, Zea mays
  Coding DNA Sequence Number=SeqID_6873
  Gene Ontology: Mol. function=nucleic acid binding; Cellular component= intracellular
  Homolog annotation: Hit_ID=Q8LCU2; Match level="QueryCoverage=90%, HitCoverage=50%, E-value=2e-39, Identity=54%"; Hit description =Putative uncharacterized protein
  Subcellular localization annotation: CTP_CleavageSite=49; ConfidenceScore=5.90e-01
MASLLLPSSQLLLRSRNQHNVQPFLLPRSSPKTPFFVSSSPSLRQHSTSASASKNPSEAFTAATTTENKKQPEKKHLSEEEEAEEEVEEDMLWIQEKALNLVEFTGTVAQAIPGPRVGDTKLPWMLAVPLTYAVTTLVTTAVKTVNNFSSPKAQRKKLVNQNAMICKSIDELLQREGTVSSFELKALEEKTEFNMGGV

SEQ ID NO: 10821 - protein, 185 aa, Zea mays
  misc_feature (114)..(114): Xaa can be any naturally occurring amino acid
  Coding DNA Sequence Number=SeqID_6874
  Gene Ontology: Mol. function=protein binding; Biological process =vesicle-mediated transport
  Homolog annotation: Hit_ID=Q8LE13; Match level="QueryCoverage=78%, HitCoverage=80%, E-value=3e-45, Identity=70%"; Hit description =Putative uncharacterized protein
MAETAETINTTVSHPQPESEDSTTLSATADQTSDETSKAADLKKEESVAETKPGSISLRIWPPTQNTRDAVLNRLIETLSTESILSKRYGTLNSDEASAVAKSIEEEAYGVASXAVSDDDDGIKILEVYSQEISKRMLETVKDRSAATAGNGNNETGEGCNRRYERVRLESWPTLGLIPLQLGLL

SEQ ID NO: 10822 - protein, 177 aa, Zea mays
  misc_feature (95)..(95): Xaa can be any naturally occurring amino acid
  Coding DNA Sequence Number=SeqID_6875
  Gene Ontology: Mol. function=protein binding; Biological process =vesicle-mediated transport
  Homolog annotation: Hit_ID=Q8LE13; Match level="QueryCoverage=100%, HitCoverage=100%, E-value=1e-56, Identity=69%"; Hit description =Putative uncharacterized protein
MAETAETINTTVSPPHSESEGSTTLPATTPDQTSDETSKAADLKKEESVAETKPGGGNSLRIWPPTQKTRDAVLKRLIETLSTESILSKRYGTLXSDEASAVAKSIEEEAYGVASNAVSDDDDGIKILEVYSKEISKRMLETVKDRSAAAANKEAVEDVKTEATKDDEAPESEKSEA

SEQ ID NO: 10823 - protein, 187 aa, Zea mays
  misc_feature (180)..(180): Xaa can be any naturally occurring amino acid
  Coding DNA Sequence Number=SeqID_6876
  Gene Ontology: Mol. function=oxidoreductase activity, acting on the CH-OH group of donors, NAD or NADP as acceptor; Cellular component =mitochondrial matrix; Biological process=tricarboxylic acid cycle intermediate metabolic process
  Homolog annotation: Hit_ID=Q9ZP06; Match level="QueryCoverage=100%, HitCoverage=54%, E-value=4e-95, Identity=94%"; Hit description =Malate dehydrogenase 1, mitochondrial precursor
  Pfam annotation: Domain name=Ldh_1_N; Domain location=30-173; Score =255.8; E_value=9.4e-74; Accession=PF00056.13; Description =lactatemalate dehydrogenase, NAD bin
  Subcellular localization annotation: CTP_CleavageSite=23; ConfidenceScore=5.20e-01
MYRSMLVRSSASAKQSLLRRSFSSGSVPERKVAILGAAGGIGQPLALLMKLNPLVSSLSLYDIANTPGVAADVGHINTRSQVVGYMGDDELAKALEGADLVIIPAGVPRKPGMTRDDLFNINAGIVKNLCSAIAKYCPHALVNMISNPVNSTVPIAAEIFKKAGMYDEKKLFGVPTLDVXRAKTFYA

SEQ ID NO: 10824 - protein, 175 aa, Zea mays
  misc_feature (167)..(167): Xaa can be any naturally occurring amino acid
  Coding DNA Sequence Number=SeqID_6877
  Gene Ontology: Mol. function=oxidoreductase activity, acting on the CH-OH group of donors, NAD or NADP as acceptor; Cellular component =mitochondrial matrix; Biological process=tricarboxylic acid cycle intermediate metabolic process
  Homolog annotation: Hit_ID=Q9ZP06; Match level="QueryCoverage=100%, HitCoverage=51%, E-value=2e-82, Identity=89%"; Hit description =Malate dehydrogenase 1, mitochondrial precursor
  Pfam annotation: Domain name=Ldh_1_N; Domain location=29-173; Score =241.2; E_value=2.3e-69; Accession=PF00056.13; Description =lactatemalate dehydrogenase, NAD bin
  Subcellular localization annotation: CTP_CleavageSite=34; ConfidenceScore=5.31e-01
MFRSVLVRSSSSAKQSLLHRSFSSSVPERKVAILGAAGGIGQPLALLMKLNPLVSSLSLFDIANTPGVAADVGHINTRSEVVGYMGDDELAKALAGADLVIIPAGVPRKPGMTRDDLFNINAGIVKNLCSAIAKYCPHALVNMISNPVNSTVPIAAEIFKKAGMYDXEEVVWCTT

SEQ ID NO: 10825 - protein, 172 aa, Zea mays
  Coding DNA Sequence Number=SeqID_6878
  Gene Ontology: Mol. function=oxidoreductase activity, acting on the CH-OH group of donors, NAD or NADP as acceptor; Cellular component =mitochondrial matrix; Biological process=tricarboxylic acid cycle intermediate metabolic process
  Homolog annotation: Hit_ID=Q9ZP06; Match level="QueryCoverage=100%, HitCoverage=50%, E-value=1e-87, Identity=94%"; Hit description =Malate dehydrogenase 1, mitochondrial precursor
  Pfam annotation: Domain name=Ldh_1_N; Domain location=30-172; Score =242.4; E_value=9.9e-70; Accession=PF00056.13; Description =lactatemalate dehydrogenase, NAD bin
  Subcellular localization annotation: CTP_CleavageSite=23; ConfidenceScore=5.15e-01
MFRSMLVRSSSSAKQSLIRRNLSSGSVPERKVAILGAAGGIGQPLALLMKLNPLVSSLSLYDIANTPGVAADVGHINTRSEVVGYMGDDNLAKALEGADLVIIPAGVPRKPGMTRDDLFNINAGIVKNLCSAIAEYCPHALVNMISNPVNSTVPIAAEIFKKAGMYDEEKLF

SEQ ID NO: 10826 - protein, 210 aa, Zea mays
  Coding DNA Sequence Number=SeqID_6879
  Gene Ontology: Mol. function=phospholipid-hydroperoxide glutathione peroxidase activity; Cellular component=mitochondrion; Biological process=response to oxidative stress
  Homolog annotation: Hit_ID=O48646; Match level="QueryCoverage=97%, HitCoverage=89%, E-value=6e-92, Identity=82%"; Hit description =Probable phospholipid hydroperoxide glutathione peroxidase 6, mitochondrial precursor
  Pfam annotation: Domain name=AhpC-TSA; Domain location=67-207; Score=- 20.8; E_value=0.057; Accession=PF00578.11; Description=AhpCTSA family
  Pfam annotation: Domain name=GSHPx; Domain location=70-178; Score =248.0; E_value=2e-71; Accession=PF00255.10; Description=Glutathione peroxidase
  Pfam module annotation: Pfam domain module=AhpC-TSA::GSHPx; Domain location=67-207::70-178
  Subcellular localization annotation: CTP_CleavageSite=62; ConfidenceScore=5.66e-01
MLRSSFRLLYMTRTNLLVRASPSSLSRLPSKFTSAKPLVSSHHQIPLSTTGAKLSRSEHSMAASSEPKSIYDFTVKDAKGNDVDLSTYKGKVLLIVNVASQCGLTNSNYTELAQLYQKYKDHGFEILAFPCNQFGNQEPGSNEEIVQFACTRFKAEYPIFDKVDVNGDSAAPIYKFLKSSKGGLFGDGIKWNFAKFLVDKDGNVGGPLRP

SEQ ID NO: 10827 - protein, 184 aa, Zea mays
  misc_feature (182)..(182): Xaa can be any naturally occurring amino acid
  misc_feature (184)..(184): Xaa can be any naturally occurring amino acid
  Coding DNA Sequence Number=SeqID_6880
  Gene Ontology: Mol. function=protein domain specific binding; Cellular component=cytoplasm; Biological process=response to stress
  Homolog annotation: Hit_ID=P46077; Match level="QueryCoverage=97%, HitCoverage=67%, E-value=4e-85, Identity=88%"; Hit description=14-3 -3-like protein GF14 phi
  Pfam annotation: Domain name=14-3-3; Domain location=5-184; Score =260.6; E_value=3.4e-75; Accession=PF00244.10; Description=14-3-3 protein
MVSAREEFVYMAKLAEQAERYEEMVEFMEKVSASVDGDELTVEERNLLSVAYKNVIGARRASWRIISSIEQKEESRGNDDHVAAIRDYRGKIETELTGICEGILKLLDSRLVPAAASGDSKVFYLKMKGDYHRYLAEFKTGQERKDAAENTLSAYKSAQDIANAEPPPTHPIRLGLALNFSXVX

SEQ ID NO: 10828 - protein, 191 aa, Zea mays
  misc_feature (170)..(170): Xaa can be any naturally occurring amino acid
  Coding DNA Sequence Number=SeqID_6881
  Gene Ontology: Mol. function=protein domain specific binding; Cellular component=cytoplasm; Biological process=response to stress
  Homolog annotation: Hit_ID=P46077; Match level="QueryCoverage=98%, HitCoverage=70%, E-value=1e-93, Identity=93%"; Hit description=14-3 -3-like protein GF14 phi
  Pfam annotation: Domain name=14-3-3; Domain location=6-191; Score =297.5; E_value=2.7e-86; Accession=PF00244.10; Description=14-3-3 protein
MAVSAREEFVYMAKLAEQAERYEEMVEFMEKVSAAVDGDELTVEERNLLSVAYKNVIGARRASWRIISSIEQKEESRGNDDHVTAIRDYRSKIETELSGICDGILKLLDSRLVPAAASGDSKVFYLKMKGDYHRYLAEFKTGQERKDAAENTLSAYKAAQDIANAELAPXHPIRLGLALNFSVFYYEILNS

SEQ ID NO: 10829 - protein, 178 aa, Zea mays
  Coding DNA Sequence Number=SeqID_6882
  Gene Ontology: Mol. function=protein domain specific binding; Cellular component=cytoplasm; Biological process=response to stress
  Homolog annotation: Hit_ID=P46077; Match level="QueryCoverage=97%, HitCoverage=64%, E-value=1e-80, Identity=88%"; Hit description=14-3 -3-like protein GF14 phi
  Pfam annotation: Domain name=14-3-3; Domain location=6-178; Score =223.0; E_value=7e-64; Accession=PF00244.10; Description=14-3-3 protein
MAVSAREEYVYMAKLAEQAERYEEMVEFMEKVSAAVDGDELTVEERNLLSVAYKNVIGARRASWRIISSIEQKEESRGNDDHVKAIRDYRGKIETELSGICDGILKLLDDRLVPAAGSGDSKVFYLKMKGDYHRYLAEFKTGQERKDAAENTLSAYKAAQDIANAELAPIPPIPVGWG

SEQ ID NO: 10830 - protein, 207 aa, Zea mays
  misc_feature (207)..(207): Xaa can be any naturally occurring amino acid
  Coding DNA Sequence Number=SeqID_6883
  Subcellular localization annotation: CTP_CleavageSite=42; ConfidenceScore=5.83e-01
NFALISLLKLGFRTASLFPAVATVISGDRRAFSLFFLFFVVSVSSSSSPPLSLCGCLMRRRLSGSDPELCLFQGQISEVAALEDGAPLLLTSVSSWPVEALSGWFCMPSLCLGLSGGAWWLWVLGSAVGVLFRLCLQRWSPWRLSRVSSVISRDLGFLPLLLAGGLRQTCVSSSGRGAVPLPACPVETWRKTCPPRGGRPPVAGGLX

SEQ ID NO: 10831 - protein, 129 aa, Zea mays
  Coding DNA Sequence Number=SeqID_6885
  Homolog annotation: Hit_ID=Q3ECK4; Match level="QueryCoverage=95%, HitCoverage=36%, E-value=1e-44, Identity=69%"; Hit description =Uncharacterized protein At1g62305.2
  Pfam annotation: Domain name=DUF266; Domain location=40-129; Score= -170.3; E_value=0.0034; Accession=PF03267.4; Description=Arabidopsis protein of unknown function, DUF266
  Subcellular localization annotation: CTP_CleavageSite=20; ConfidenceScore=5.19e-01
MARRSPPQLHTSRRGVVSFRWNLITALSASLCVLALFSIYHRQSRPVPSLSAARSRIPLQKYSGDRPKIAFLFLARHDLPLDFLWDRFFKGGDERNFSIYVHSTPGFVFDEGTTRSHFFHNRQLKNTIQ

SEQ ID NO: 10832 - protein, 110 aa, Zea mays
  Coding DNA Sequence Number=SeqID_6886
  Gene Ontology: Mol. function=hydrogen ion transmembrane transporter activity; Biological process=proton transport
  Homolog annotation: Hit_ID=O82628; Match level="QueryCoverage=100%, HitCoverage=100%, E-value=3e-32, Identity=70%"; Hit description =Vacuolar proton pump subunit G 1
  Pfam annotation: Domain name=V-ATPase_G; Domain location=5-109; Score= 186.2; E_value=8.3e-53; Accession=PF03179.5; Description=Vacuolar (H+)-ATPase G subunit
MESSRGQGGIQQLLAAEQEAQHIVNAARTAKMARLKQAKEEAEKEIAEYKAKIEQDFQRKLEETSGDSGANVKRLEQETDAKIEQLKNEASRISEDVVAMLLKHVTTVKN

SEQ ID NO: 10833 - protein, 299 aa, Zea mays
  misc_feature (1)..(54): Xaa can be any naturally occurring amino acid
  misc_feature (98)..(98): Xaa can be any naturally occurring amino acid
  misc_feature (106)..(106): Xaa can be any naturally occurring amino acid
  misc_feature (110)..(110): Xaa can be any naturally occurring amino acid
  misc_feature (124)..(124): Xaa can be any naturally occurring amino acid
  misc_feature (211)..(211): Xaa can be any naturally occurring amino acid
  misc_feature (217)..(217): Xaa can be any naturally occurring amino acid
  misc_feature (223)..(223): Xaa can be any naturally occurring amino acid
  misc_feature (239)..(239): Xaa can be any naturally occurring amino acid
  misc_feature (253)..(299): Xaa can be any naturally occurring amino acid
  Coding DNA Sequence Number=SeqID_6887
XXXXXXXXXXXXXXXXXXXXXXXXXXXXXXXXXXXXXXXXXXXXXXXXXXXXXXKIFFFFFFLEKKKKKKTPPRKPQKTPPGCFQISPAKKGGVGNPXYPPPPGKXFSSXPRPRAGPSPYIHTXARRHLSQRHARHTRAWTHARQTSLIHILEQEPRIQRGSSRRGSRRRRRRGRPRRGVRRPPPRGAPAFVGRGSRGGGLGGCGGRHERXGHGGDXDELHPXPAHLRVCSKPGVYWAXPDLSSRVRSSREMXXXXXXXXXXXXXXXXXXXXXXXXXXXXXXXXXXXXXXXXXXXXXXX

SEQ ID NO: 10834 - protein, 130 aa, Zea mays
  Coding DNA Sequence Number=SeqID_6889
  Subcellular localization annotation: CTP_CleavageSite=55; ConfidenceScore=5.81e-01
LIFFLRVYTAPSLHSSPSPSRAPARPPISQCSTSLCSFPAFARFPARRHCRRAPSAPARFCLAGWPWRHSRPWQPTRAGHGGARDGTGRPSSMVELPACSRALLYSVRNLLLWMSSDAASTIWRRRRGIS

SEQ ID NO: 10835 - protein, 169 aa, Zea mays
  misc_feature (140)..(140): Xaa can be any naturally occurring amino acid
  Coding DNA Sequence Number=SeqID_6890
AVAQSSPVEAAADARTRRAHRRAAAMSRLERLVARPRPGHRRAWPLPWPRGHAATAGGATAGRNPIMHFGARVSRRWQESGQQKASKPSLTPTEQEQTCLGSRFRRIDFASLQPVLRSKPRSSELPRLCCVHTAAPESLXAPLFLPSSCLVHVHPCLACLPSKRRFWYD

SEQ ID NO: 10836 - protein, 158 aa, Zea mays
  Coding DNA Sequence Number=SeqID_6892
  Gene Ontology: Mol. function=structural molecule activity; Cellular component=protein complex; Biological process=microtubule-based movement
  Homolog annotation: Hit_ID=P29512; Match level="QueryCoverage=86%, HitCoverage=30%, E-value=4e-78, Identity=99%"; Hit description =Tubulin beta-2/beta-3 chain
  Pfam annotation: Domain name=Tubulin; Domain location=45-158; Score =33.5; E_value=6.1e-09; Accession=PF00091.15; Description=TubulinFtsZ family, GTPase domain
MREILHIQGGQCGNQIGAKFWEVVCAEHGIDPTGRYTGDSDLQLERINVYYNEASCGRFVPRAVLMDLEPGTMDSLRSGPYGQTFRPDNFVFGQSGAGNNWAKGHYTEGAELIDSGLDVVRKEAENCDCLQGFQVCHSLRGGTDLDGTLLSLKSEKHQ

SEQ ID NO: 10837 - protein, 174 aa, Zea mays
  Coding DNA Sequence Number=SeqID_6893
  Gene Ontology: Mol. function=structural constituent of ribosome; Cellular component=ribonucleoprotein complex; Biological process =ribosome biogenesis and assembly
  Homolog annotation: Hit_ID=P49692; Match level="QueryCoverage=88%, HitCoverage=59%, E-value=7e-63, Identity=78%"; Hit description=60S ribosomal protein L7a-1
  Pfam annotation: Domain name=Ribosomal_L7Ae; Domain location=111-175; Score=25.4; E_value=0.00011; Accession=PF01248.16; Description =Ribosomal protein L7AeL30eS12eGadd45 family
MAPKKGVKVVTKKKTEKVTNPLFERRPKQFGIGGALPPKKDLTRYIKWPKSIRLQRQKRILKQRLKVPPALNQFTKTLDKNLATQLFKVLMKYRPEDKAAKKDRLLKKAQAEAEGKPSESKKPIVVKYGLNHVTYLIEQNKAQLVVIAHDVDPIELVVWLPALCRKMEVPYCIC

SEQ ID NO: 10838 - protein, 185 aa, Zea mays
  Coding DNA Sequence Number=SeqID_6894
  Gene Ontology: Mol. function=structural constituent of ribosome; Cellular component=ribonucleoprotein complex; Biological process =translation
  Homolog annotation: Hit_ID=Q8LBI1; Match level="QueryCoverage=100%, HitCoverage=61%, E-value=5e-90, Identity=90%"; Hit description=60S ribosomal protein L5-1
  Pfam annotation: Domain name=Ribosomal_L18p; Domain location=26-172; Score=244.7; E_value=2e-70; Accession=PF00861.12; Description =Ribosomal L18pL5e family
MVFVKPSKSNAYFKRYQVKFRRRRDGKTDYRARIRLINQDKNKYNTPKYRFVVRFTNKDIVAQIVSASIAGDIVKASAYAHELPQYGLTVGLTNYAAAYCTGLLLARRVLKMLEMDEEYEGNLEATGEDFSVEPTESRRPFRALLDVGLIRTTTGNRVFGALKGALDGGLDIPHSDKRFAGFNKE

SEQ ID NO: 10839 - protein, 262 aa, Zea mays
  misc_feature (187)..(187): Xaa can be any naturally occurring amino acid
  Coding DNA Sequence Number=SeqID_6895
  Gene Ontology: Mol. function=transporter activity; Cellular component= integral to membrane; Biological process=transport
  Homolog annotation: Hit_ID=P61837; Match level="QueryCoverage=100%, HitCoverage=91%, E-value=1e-145, Identity=96%"; Hit description =Aquaporin PIP1-1
  Pfam annotation: Domain name=MIP; Domain location=44-262; Score =392.6; E_value=6.2e-115; Accession=PF00230.10; Description=Major intrinsic protein
MEGKEEDVRVGANKFPERQPIGTSAQSDKDYKEPPPAPLFEPGELASWSFWRAGIAEFIATFLFLYITVLTVMGVKRAPNMCASVGIQGIAWAFGGMIFALVYCTAGISGGHINPAVTFGLFLARKLSLTRAVYYIVMQCLGAICGAGVVKGFQPKQYQALGGGANTVAPGYTKGSGLGAEIIGTFXVLVYTVFSATDAKRNARDSHVPILAPLPIGFAVFLVHLATIPITGTGINPARSLGAAIIFNKDNAWDDHWVFWVG

SEQ ID NO: 10840 - protein, 185 aa, Zea mays
  misc_feature (185)..(185): Xaa can be any naturally occurring amino acid
  Coding DNA Sequence Number=SeqID_6896
  Gene Ontology: Mol. function=glyceraldehyde-3-phosphate dehydrogenase (phosphorylating) activity; Cellular component=cytoplasm; Biological process=glucose metabolic process
  Homolog annotation: Hit_ID=P25858; Match level="QueryCoverage=89%, HitCoverage=48%, E-value=3e-72, Identity=82%"; Hit description =Glyceraldehyde-3-phosphate dehydrogenase, cytosolic
  Pfam annotation: Domain name=DapB_N; Domain location=6-69; Score= -37.0; E_value=0.06; Accession=PF01113.11; Description=Dihydrodipicoli nate reductase, N-terminus
  Pfam annotation: Domain name=Gp_dh_N; Domain location=6-156; Score =312.4; E_value=8.4e-91; Accession=PF00044.14; Description =Glyceraldehyde 3-phosphate dehydrogen
  Pfam module annotation: Pfam domain module=DapB_N::Gp_dh_N; Domain location=6-69::6-156
MSNGKIKIGINGFGRIGRLVARVVLQRDDVELVAVNDPFITTEYMTYMFKYDSVHGQWKHHELKVKDEKTLLFGEKPVTVFGIRNPEDIPWGEAGADFVVESTGVFTDKDKAAAHLKGGAKKVVISAPSKDAPMFVVGVNEHEYKSDLDIVSNASCTTNCLCSPCQGINDRFGNCEGPLTTVHFX

SEQ ID NO: 10841 - protein, 162 aa, Zea mays
  Coding DNA Sequence Number=SeqID_6897
  Homolog annotation: Hit_ID=A8MS48; Match level="QueryCoverage=98%, HitCoverage=99%, E-value=1e-53, Identity=71%"; Hit description =Uncharacterized protein At5g16660.2
  Subcellular localization annotation: CTP_CleavageSite=54; ConfidenceScore=5.70e-01
MASSCVANLSLSGVSQSHYVKANGMSTAKLNSICKTSALSIQKRSNRSRKFSVSAEYGSRRGSGGGDFVAGFLLGGALFGAAAYIFAPQIRRSIMSEEDEYGFKKPDQPSYYDEGLEKTRETLNEKIGQLNSAIDNVSSRLRGRAKKTSSPVETDPEVEATT

SEQ ID NO: 10842 - protein, 204 aa, Zea mays
  misc_feature (187)..(187): Xaa can be any naturally occurring amino acid
  Coding DNA Sequence Number=SeqID_6898
  Gene Ontology: Mol. function=carboxyl- or carbamoyltransferase activity; Cellular component=ornithine carbamoyltransferase complex; Biological process=amino acid biosynthetic process
  Homolog annotation: Hit_ID=O50039; Match level="QueryCoverage=86%, HitCoverage=46%, E-value=9e-77, Identity=86%"; Hit description =Ornithine carbamoyltransferase, chloroplast precursor
  Pfam annotation: Domain name=OTCace_N; Domain location=75-201; Score =113.0; E_value=9.3e-31; Accession=PF02729.11; Description =Aspartateornithine carbamoyltransferase, carbamoyl-P binding domain
  Subcellular localization annotation: CTP_CleavageSite=56; ConfidenceScore=5.98e-01
MVAAAMASHVSSTRSPALSLSSSSSFFPGTTLRRFSAVSLAPPASFSPLSLRVSCQASSVTSPSTSDVKGKSDLKDFLAIDDFDTETIKKILDKASEVKALLKSGERNYLPFKGKSMSMIFAKPSMRTRVSFETGFFLLGGHALYLGPNDIQMGKREETRDVARVLSRYNDIIMARVFAHQDILDLXNYSSGPVGNGLTDHNTL

SEQ ID NO: 10843 - protein, 117 aa, Zea mays
  Coding DNA Sequence Number=SeqID_6899
  Gene Ontology: Mol. function=lipid binding; Cellular component =extracellular region; Biological process=lipid transport
  Homolog annotation: Hit_ID=Q42614; Match level="QueryCoverage=100%, HitCoverage=100%, E-value=1e-62, Identity=98%"; Hit description=Non -specific lipid-transfer protein 1 precursor
  Pfam annotation: Domain name=Tryp_alpha_amyl; Domain location=29-113; Score=112.1; E_value=1.7e-30; Accession=PF00234.12; Description =Protease inhibitorseed storageLTP f
MAGLVKLACLVLACMIVAGPIATNAALSCGTVSGNLAACIGYLTQNGPLPRGCCTGVTNLNNMARTTPDRQQACRCLVGAANSFPTLNAARAAGLPKACGVNIPYKISKSTNCNSVR

SEQ ID NO: 10844 - protein, 185 aa, Zea mays
  misc_feature (44)..(45): Xaa can be any naturally occurring amino acid
  misc_feature (57)..(57): Xaa can be any naturally occurring amino acid
  misc_feature (64)..(64): Xaa can be any naturally occurring amino acid
  misc_feature (82)..(82): Xaa can be any naturally occurring amino acid
  misc_feature (106)..(106): Xaa can be any naturally occurring amino acid
  Coding DNA Sequence Number=SeqID_6900
  Gene Ontology: Mol. function=lipid binding; Cellular component =extracellular region; Biological process=lipid transport
  Homolog annotation: Hit_ID=Q43304; Match level="QueryCoverage=61%, HitCoverage=94%, E-value=1e-42, Identity=78%"; Hit description=Non -specific lipid-transfer protein D precursor
  Pfam annotation: Domain name=Tryp_alpha_amyl; Domain location=29-111; Score=55.9; E_value=1.4e-13; Accession=PF00234.12; Description =Protease inhibitorseed storageLTP f
MAGLMKLACLVLACMIVAGPITSNAALSCGTVSGYVAPCIGYLXXGAPALPRACCSXVTSLNNXARTTPDRQQACRCLVGAXANAFPYSQRLPVQLDLPKACGVHXPYKIRKTPHLQPGGNGPPGRMNLYANLPRILGWGGAKTKKKKGPRGGWFLKGFSQSPALLGGGAPFKFWGPGTISTTPG

SEQ ID NO: 10845 - protein, 185 aa, Zea mays; identical to SEQ ID NO: 10844
  misc_feature (44)..(45): Xaa can be any naturally occurring amino acid
  misc_feature (57)..(57): Xaa can be any naturally occurring amino acid
  misc_feature (64)..(64): Xaa can be any naturally occurring amino acid
  misc_feature (82)..(82): Xaa can be any naturally occurring amino acid
  misc_feature (106)..(106): Xaa can be any naturally occurring amino acid
  Coding DNA Sequence Number=SeqID_6901
  Gene Ontology: Mol. function=lipid binding; Cellular component =extracellular region; Biological process=lipid transport
  Homolog annotation: Hit_ID=Q43304; Match level="QueryCoverage=61%, HitCoverage=94%, E-value=1e-42, Identity=78%"; Hit description=Non -specific lipid-transfer protein D precursor
  Pfam annotation: Domain name=Tryp_alpha_amyl; Domain location=29-111; Score=55.9; E_value=1.4e-13; Accession=PF00234.12; Description =Protease inhibitorseed storageLTP f

SEQ ID NO: 10846 - protein, 163 aa, Zea mays
  Coding DNA Sequence Number=SeqID_6902
  Homolog annotation: Hit_ID=Q67YE3; Match level="QueryCoverage=98%, HitCoverage=63%, E-value=1e-85, Identity=88%"; Hit description=MRNA, , clone: RAFL25-03-N20
  Pfam annotation: Domain name=PLAC8; Domain location=20-144; Score =60.6; E_value=5.2e-15; Accession=PF04749.7; Description=PLAC8 family
MAPKFDTEKMQERQNFRNVWHTDLTHTIQGDTPYCCFALWCAPCASYLLRKRALYNDMSRYICCAGYMPCSGRCGEAKWPQLCLATEVFCCFGTSVASTRFLLQDEFQIQTTQCDNCIIGFMVCLSQVACIFSIVACIVGIDELSEASQLLSCLSDLVYCTVC

SEQ ID NO: 10847 - protein, 164 aa, Zea mays
  misc_feature (151)..(151): Xaa can be any naturally occurring amino acid
  Coding DNA Sequence Number=SeqID_6903
  Gene Ontology: Mol. function=iron-sulfur cluster binding; Cellular component=mitochondrion; Biological process=iron-sulfur cluster assembly
  Homolog annotation: Hit_ID=O49627; Match level="QueryCoverage=100%, HitCoverage=100%, E-value=4e-82, Identity=92%"; Hit description=NifU- like protein
  Pfam annotation: Domain name=NifU_N; Domain location=28-155; Score =286.5; E_value=5.4e-83; Accession=PF01592.7; Description=NifU-like N terminal domain
MMLRQAAKKALGLTSRQSTPCSVGISRSYHENVIDHYDNPRNVGSFDKNDPTVGTGLVGAPACGDVMKLQIKVDEKTGQIVDARFKTFGCGSAIASSSVATEWVKGKAMEEVLTIKNTEIAKHLSLPPVKLHCSMLAEDAIKAAVKDYKEXRVKTNGAGEPSQA

SEQ ID NO: 10848 - protein, 137 aa, Zea mays
  misc_feature (6)..(7): Xaa can be any naturally occurring amino acid
  misc_feature (9)..(9): Xaa can be any naturally occurring amino acid
  Coding DNA Sequence Number=SeqID_6904
  Homolog annotation: Hit_ID=Q9LFP2; Match level="QueryCoverage=92%, HitCoverage=52%, E-value=4e-25, Identity=59%"; Hit description =Putative uncharacterized protein F2I11_30
  Pfam annotation: Domain name=PEARLI-4; Domain location=34-138; Score=- 140.2; E_value=0.071; Accession=PF05278.3; Description=Arabidopsis phospholipase-like protein (PEARLI 4)
SSCLDXXRXWSLCSEISLHSVPLWSRACSVYNGDDQDSFLLYPELLSSPLNKSLVIKTFDSSGVVSVGEYKVKASLSSHSSEYFSTSMVTLHQIPRSSLSPHGRTISRLLAEVGPELQSTPLHRLAESRAREILPIV

SEQ ID NO: 10849 - protein, 187 aa, Zea mays
  misc_feature (76)..(76): Xaa can be any naturally occurring amino acid
  misc_feature (82)..(82): Xaa can be any naturally occurring amino acid
  misc_feature (108)..(108): Xaa can be any naturally occurring amino acid
  misc_feature (137)..(137): Xaa can be any naturally occurring amino acid
  misc_feature (147)..(147): Xaa can be any naturally occurring amino acid
  Coding DNA Sequence Number=SeqID_6905
  Homolog annotation: Hit_ID=Q9LFP2; Match level="QueryCoverage=83%, HitCoverage=63%, E-value=2e-46, Identity=73%"; Hit description =Putative uncharacterized protein F2I11_30
  Pfam annotation: Domain name=PEARLI-4; Domain location=31-187; Score =59.9; E_value=8.8e-15; Accession=PF05278.3; Description=Arabidopsis phospholipase-like protein (PEARLI 4)
SSCLDRWSLCSEISLHSVPLWSRACSVYNGDDQDSFLLYPELLSSPLNKSLVIKTFDSSGVVSVGEYKVKASLSSXTLQSIXFDKYGDIASDSKIQSLSTRTYHLETXLAEVGPELQSTPLHRLAESRAREILPIVXDIETAKIPVXWSRFCSLREVVEATGFNKKPGPRPKKKKGARKSFVFFPKK

SEQ ID NO: 10850 - protein, 211 aa, Zea mays
  misc_feature (16)..(16): Xaa can be any naturally occurring amino acid
  misc_feature (162)..(162): Xaa can be any naturally occurring amino acid
  Coding DNA Sequence Number=SeqID_35
  Gene Ontology: Mol. function=aspartic-type endopeptidase activity; Cellular component=chromatin; Biological process=DNA integration
  Homolog annotation: Hit_ID=Q337X2; Match level="QueryCoverage=99%, HitCoverage=12%, E-value=6e-64, Identity=58%"; Hit description =Retrotransposon protein, putative, unclassified, expressed
EKYILDLLDRASLTDXRTVEAPMELNIHLCATDGEPLEDPNHYCHIVGSLVYVGVTRPDIFYSVHNLSQFVSASTQLHYSHLLWVLRYLRGTISRRLFFPRSNSLQFQAYYDTTWASDSSYRPSLSAYCVFLGGSWKTNKQAVVSRSSVEAELHDMALVTAXRWLLEDFGVSVCMSTPLLSDSTGAIGIARGPMKHELTKHISVDAHYTRA

SEQ ID NO: 10851 - protein, 96 aa, Zea mays
  Coding DNA Sequence Number=SeqID_36
ATHQERHCARNERSREKAWRPPQESQITGIVSLCGGGCGQRYTPHVLGFLPHQKSSRSMLFSSPELREHRGSALDVISTAGVFTAVRSRGSEESPW

SEQ ID NO: 10852 - protein, 151 aa, Zea mays
  Coding DNA Sequence Number=SeqID_38
SSHWPEEQQRIARDAEVRVTSSSRCRLGRRRRGLCQNDTQTSKSGACKPMAAWWTSSEPCTPRAIACPRPAARRGISVSGGGEEARGGTDVLNRRGTKRGGRFARMEADGGASGLYPSHAHPETAPTCDPQRGEGSVRAAVERKNEEAWAG

SEQ ID NO: 10853 - protein, 134 aa, Zea mays
  Coding DNA Sequence Number=SeqID_40
AAPSPPLCAPSRQRPPLAMAGLEPPPIVDDAATQAAAEHEARLQAAARRDAALAQALQAEQEAATAAQERDVATERIRAALERAAHARALAAQTATDGIFLLENVNTPCSSQKYLTFDYAICFFIKSVNISCSR

SEQ ID NO: 10854 - protein, 149 aa, Zea mays
  misc_feature (120)..(120): Xaa can be any naturally occurring amino acid
  misc_feature (133)..(133): Xaa can be any naturally occurring amino acid
  Coding DNA Sequence Number=SeqID_42
  Gene Ontology: Mol. function=structural constituent of ribosome; Cellular component=monolayer-surrounded lipid storage body; Biological process=type I hypersensitivity
  Homolog annotation: Hit_ID=Q39273; Match level="QueryCoverage=88%, HitCoverage=89%, E-value=1e-48, Identity=76%"; Hit description =Anther-specific protein
  Pfam annotation: Domain name=Oleosin; Domain location=16-133; Score =183.7; E_value=4.7e-52; Accession=PF01277.8; Description=Oleosin
  Subcellular localization annotation: CTP_CleavageSite=64; ConfidenceScore=5.25e-01
MGVLRKKHNKKSRRPSFKSVLTSILATQAAIFLLLLAGVSLAGTAVAFIASMPLFVVFSPILVPAGVATGLLATGLAAAGSSGAMAVSLILWVFKRVTGKEPPKIMSKVLKKVFPGGGAXLNWQQNQKPTQRXAPAAAPSAAPAAAPST

SEQ ID NO: 10855 - protein, 228 aa, Zea mays
  Coding DNA Sequence Number=SeqID_43
  Homolog annotation: Hit_ID=Q0WW53; Match level="QueryCoverage=99%, HitCoverage=99%, E-value=1e-109, Identity=86%"; Hit description =Putative uncharacterized protein At4g38370
  Pfam annotation: Domain name=PGAM; Domain location=12-181; Score =87.7; E_value=3.6e-23; Accession=PF00300.12; Description =Phosphoglycerate mutase family
MEDSSASFVGNRYWVLRHGKSIPNERGLIVSSMENGVLPEYQLAPDGVAQAQLAGQSFLKQLEESKISLDKVRICYSPFSRTTHTAKVVAQVLNIPFDSPQCKMMETLRERYFGPTFELKSHDKYPEIWDLDEKDPFMGPEGGESADDVVSRLATAMLSMEAEFQRCAILVVSHGDPLQMLQNIMHSAKQQSGGDGGLAERIQMSRVASVLSQHRKFALLTGELRPLV

SEQ ID NO: 10856 - protein, 201 aa, Zea mays
  Coding DNA Sequence Number=SeqID_44
  Gene Ontology: Mol. function=peptidyl-prolyl cis-trans isomerase activity; Cellular component=endoplasmic reticulum; Biological process=protein folding
  Homolog annotation: Hit_ID=Q8LDP4; Match level="QueryCoverage=89%, HitCoverage=89%, E-value=3e-99, Identity=97%"; Hit description =Peptidyl-prolyl cis-trans isomerase CYP19-4 precursor
  Pfam annotation: Domain name=Pro_isomerase; Domain location=33-199; Score=394.6; E_value=1.6e-115; Accession=PF00160.11; Description =Cyclophilin type peptidyl-prolyl cis-tr
MARSTSILFLTLLLSASLALIQAKEDLKEITHKVYFDVEIDGKEAGRVVIGLFGKTVPKTAENFRALCTGEKGVGKSGKPLHYKGSKFHRIIPSFMIQGGDFTHGNGMGGESIYGQKFADENFKLKHTGPGLLSMANSGEDTNGSQFFITTVTTSWLDGRHVVFGKVVQGMDVVYKIEAEGKQSGTPKSKVVIADSGELPL

SEQ ID NO: 10857 - protein, 154 aa, Zea mays
  Coding DNA Sequence Number=SeqID_45
  Gene Ontology: Mol. function=iron-sulfur cluster binding; Cellular component=mitochondrion; Biological process=electron transport
  Homolog annotation: Hit_ID=A9PD11; Match level="QueryCoverage=98%, HitCoverage=98%, E-value=1e-50, Identity=68%"; Hit description =Putative uncharacterized protein
  Subcellular localization annotation: CTP_CleavageSite=25; ConfidenceScore=5.07e-01
MATNLLKLSSQIRRLSPLTRSLTVRTSATSTGSKKVSDRIVKLSAIDADGDKKDIIGLSGQTLLRALTHTGLIDPLSHRLEDIDACSAECEVQIAEEWLEKLPPRTYDEEYVLKRNSRSRVLNKHSRLGCQVVLTQELQGMVVAVPEAKPWDIP

SEQ ID NO: 10858 - protein, 282 aa, Zea mays
  Coding DNA Sequence Number=SeqID_46
  Gene Ontology: Mol. function=sequence-specific DNA binding; Cellular component=nucleus; Biological process=regulation of transcription, DNA-dependent
  Homolog annotation: Hit_ID=Q6YTZ9; Match level="QueryCoverage=61%, HitCoverage=84%, E-value=1e-22, Identity=35%"; Hit description=MADS -box protein-like
  Pfam annotation: Domain name=SRF-TF; Domain location=18-68; Score =44.3; E_value=4.3e-10; Accession=PF00319.9; Description=SRF-type transcription factor (DNA-binding and dimerisation domain)
  Subcellular localization annotation: CTP_CleavageSite=87; ConfidenceScore=5.00e-01
AMAPKRKGGNGRKKTVLLSIVKEDARHVCFSKRKRGLFSKTSALSLLTGAQVAAVIFSPGGKVFSFGHPSVDAVVNRFMAGDAAVVQAAADDNGLQTLQLQHGDMRTELADQKKRKKRAEEALDKERAGGDQIASWLHPDVRDMGHDDMAAFAAALLQVQAAVSGRANQVLVEAFRVDISRMLQVPPPPPPPLQLFGASTIEFGSSSSSANAGMEMQQMQMVMEMPPPPDFPAVMGMQQLVMEMPPQPRFEAAMEMTPLQEFVAGMQKVQRQGLGPNADFPY

SEQ ID NO: 10859 - protein, 127 aa, Zea mays
  Coding DNA Sequence Number=SeqID_47
  Homolog annotation: Hit_ID=Q8LCY6; Match level="QueryCoverage=100%, HitCoverage=99%, E-value=4e-49, Identity=72%"; Hit description =Putative uncharacterized protein
MAKSVATATSSLVQTLRRYVKKPWEITGPCAHPEYLESVPKATEYRIRCPATIDQEAIVPTSDPETVYNIVYHGRDQRRNRPPIRRYLLKKEDVVSEKKMFEETDFPRVYLTTTVEEDENARGGGYE

SEQ ID NO: 10860 - protein, 141 aa, Zea mays
  Coding DNA Sequence Number=SeqID_48
  Homolog annotation: Hit_ID=Q681X8; Match level="QueryCoverage=100%, HitCoverage=100%, E-value=1e-48, Identity=67%"; Hit description=MRNA, complete cds, clone: RAFL21-92-A21
MSTVVDRSVSTLNPNAPAFDPVGFREVEDFSPKWWELVTTSKWFRDFWLSANSEEYEFGEFSDMEDEFEELVMTSSGENEMDGSSVRESDVGRYLKVLLSMAKSTKGKLYRSNVSCSAKYNQKKMNPNFYCRRNHHIYQPR

SEQ ID NO: 10861 - protein, 229 aa, Zea mays
  Coding DNA Sequence Number=SeqID_49
  Homolog annotation: Hit_ID=Q9FF88; Match level="QueryCoverage=100%, HitCoverage=100%, E-value=1e-105, Identity=83%"; Hit description =Arabidopsis thaliana genomic DNA, chromosome 5, P1 clone:MRO11
MPEEIREHGGHTDPKPSPPPPKRGLISRKRQLVFLSFMILLAAKGLVGIGEVAFVILSYIYLYEFISRFAFPRKQNEQRRRLSNPKNKLFQAYFLATAIIGLLFPICYIGDGLYRGDIHGVRAAAPHLFLLSGQAFTEPIGFSDRFATPIGILGPVFYNARRIFALLDWVKAEFADIQRPGGPIRLYGGRAIASVNTVMWFYNLFGLLLPVFLPRSCEIYFSADDNKVD

SEQ ID NO: 10862 - protein, 217 aa, Zea mays
  Coding DNA Sequence Number=SeqID_50
  Gene Ontology: Mol. function=translation initiation factor activity; Cellular component=eukaryotic translation initiation factor 3 complex; Biological process=regulation of translational initiation
  Homolog annotation: Hit_ID=Q9C8D8; Match level="QueryCoverage=100%, HitCoverage=100%, E-value=3e-70, Identity=63%"; Hit description =Putative uncharacterized protein F15E12.10
  Pfam annotation: Domain name=eIF3_subunit; Domain location=1-217; Score=287.6; E_value=2.5e-83; Accession=PF08597.1; Description =Translation initiation factor eIF3 subun
MDDWEDEQIAPLPAKVVLKSNWDDEDVDENEIKDSWEDDDDEQPAPPPPVKPAPPKKAVEKKGKAAEAPKEEPLDPLSEKLRMQRLVEEADYRATAELFGTKGEEKSLDMFIPKSESDFLEYAEMISHRLTPYEKSYHYIALLKAVMRLSVTNMKAADVKDVASSVTAIANEKLKAEKEAAAGRKKTGGKKKQLIVDKADDDLVAGPYDAMDDFDFM

SEQ ID NO: 10863 - protein, 180 aa, Zea mays
  Coding DNA Sequence Number=SeqID_51
  Homolog annotation: Hit_ID=Q9FMV4; Match level="QueryCoverage=100%, HitCoverage=96%, E-value=1e-56, Identity=66%"; Hit description =Genomic DNA, chromosome 5, P1 clone:MLE2
TTAAMTTTQELAMEGEKHLEETIEAAFQIISAMNDELCNPSLWSTSATASSTTGSNGSALVSADAAGIDGAPHHSESGGGGGGGGSGNSALDEASLRYKNSVTSLRAVIAAIPNSQKAKVSEAENGLGTPEEEDEIEKLEEKALSLRKEIAEKNVHVKELIDKFRQLIADISTWQSPCSV

SEQ ID NO: 10864 - protein, 91 aa, Zea mays
  Coding DNA Sequence Number=SeqID_494
GPAPVPASPELAPLSPPSLGLGEWEFRAADAGAPGHRKAGKEGVAARRRQEASTRLTMSQSPGGREGMFSTTLIVAVASVSSIFLLLFSRS

SEQ ID NO: 10865 - protein, 109 aa, Zea mays
  Coding DNA Sequence Number=SeqID_496
TFCWMRCSFAFEFQKRHGMFLIDGDVPMWFILASSGQRNAKPPMPVEAARCTAQRALRAATRAGAAVRLRHHPICLHRLLSLDLAELALGFHGGNVEARSSRGKRNDDT

SEQ ID NO: 10866 - protein, 238 aa, Zea mays
  misc_feature (182)..(182): Xaa can be any naturally occurring amino acid
  Coding DNA Sequence Number=SeqID_498
  Homolog annotation: Hit_ID=Q8S473; Match level="QueryCoverage=94%, HitCoverage=28%, E-value=1e-24, Identity=30%"; Hit description =Putative RIRE2 orf3
MSTKGNSYFILGDAEEQEIWAEFRALGHDLMTRSMSKSIFLHRERGVWEALQRHRTMLLRSNEHLAWRSTEVADLTSWCEGLKEEGTTDYEEVHRRRAKVLGLKAEADCHKGVLRHAQEGLQAVMMERDSLTKSLEDEQSECWALNTRIGYLEKDLEATPRTVEQQGTELREVSEAVADLFXGPRRGGRASGWTPRPRMQALSDFVRGELREAVHLGVKRALAMVASHYEIDLEWMCC

SEQ ID NO: 10867 - protein, 143 aa, Zea mays
  Coding DNA Sequence Number=SeqID_499
  Homolog annotation: Hit_ID=A3ART2; Match level="QueryCoverage=88%, HitCoverage=42%, E-value=2e-29, Identity=56%"; Hit description =Putative uncharacterized protein
  Pfam annotation: Domain name=UPF0172; Domain location=4-140; Score =108.3; E_value=2.4e-29; Accession=PF03665.4; Description =Uncharacterised protein family (UPF0172)
MGAECRYEVAQAAYIKLALHALKHPATAVNGLLVGRLVEPSSSPAVVSVIDAVPLSHHPHHLPLLPTLELALTLVEDHFATQGEGLAVVGYYHANPRCDDTELPPVAKRVGDHIFRYFPRSAVLLVSYVSFVILISSLRGCRS

SEQ ID NO: 10868 - protein, 145 aa, Zea mays
  misc_feature (93)..(93): Xaa can be any naturally occurring amino acid
  misc_feature (105)..(105): Xaa can be any naturally occurring amino acid
  Coding DNA Sequence Number=SeqID_500
  Homolog annotation: Hit_ID=Q650T3; Match level="QueryCoverage=62%, HitCoverage=24%, E-value=6e-11, Identity=46%"; Hit description =Transcription factor-like
MPTHVFLLLNQQGRQLQESEPSIIAATGTGTVPAIAITGTDGILRLPAEPASEDASDEQQELAPKRRRKLQPTRAAAGPAVPATAAYYPVVTXPLLQANGGGTIXVSSDLAPASAPAAPTGADASMEKAKRYKPAVVPAGPRSAP

SEQ ID NO: 10869 - protein, 145 aa, Zea mays; identical to SEQ ID NO: 10868
  misc_feature (93)..(93): Xaa can be any naturally occurring amino acid
  misc_feature (105)..(105): Xaa can be any naturally occurring amino acid
  Coding DNA Sequence Number=SeqID_501
  Homolog annotation: Hit_ID=Q650T3; Match level="QueryCoverage=62%, HitCoverage=24%, E-value=6e-11, Identity=46%"; Hit description =Transcription factor-like

SEQ ID NO: 10870 - protein, 118 aa, Zea mays
  Coding DNA Sequence Number=SeqID_502
  Gene Ontology: Mol. function=metal ion binding
  Homolog annotation: Hit_ID=A2YWD6; Match level="QueryCoverage=65%, HitCoverage=21%, E-value=3e-14, Identity=50%"; Hit description =Putative uncharacterized protein
ADVAVGCAGGPAVAPLQPPPRRPRFVAADAIREEANELVRIGSVKRALRSKSGRAPAQFSRSHLTGHSLAASATTGTGGGASTERFTLRLPEHMHLQSWLRFGTSMISNLDSAILFSA

SEQ ID NO: 10871 - protein, 126 aa, Zea mays
  Coding DNA Sequence Number=SeqID_503
HVADIPPALKTGLSPSWYTLSISSRDGLSTLACVWGGHGVEEGAGTKQVVVVCWGRRRAEDLIVVLVPWRGGRGSDGGRGGCRALLATTARQRTDQVELHMRHRVENLRHRFHASDSSGAWPTTRN

SEQ ID NO: 10872 - protein, 90 aa, Zea mays
  Coding DNA Sequence Number=SeqID_505
LCLGDLNLLYNQCGDRERVLSHDLPHNTVHSTEGHDVQLGPHSSTNDNPSSLASRQLTRGATATLASYGARATRGVGTGLSNPLPVAGPR

SEQ ID NO: 10873 - protein, 118 aa, Zea mays
  Coding DNA Sequence Number=SeqID_507
LPLPCCTDCRGLVLGRGQLPVLVRLATCMSSTTIGPRLWASSTATPGAGALDVVGPGRADSLRRCDLCGHLRRWPELPCVEDSRSRRSVAHHRWICTSRTASDDTVADWLRRLPRACE

SEQ ID NO: 10874 - protein, 108 aa, Zea mays
  misc_feature (21)..(21): Xaa can be any naturally occurring amino acid
  Coding DNA Sequence Number=SeqID_509
  Gene Ontology: Mol. function=nucleotide binding; Cellular component =integral to membrane; Biological process=transport
  Homolog annotation: Hit_ID=Q2QQ91; Match level="QueryCoverage=91%, HitCoverage=22%, E-value=3e-34, Identity=74%"; Hit description =Ureide permease 2, putative, expressed
LVPTSLLSMFVNKDKGVAIAXMLSSLLFLGTWPVVLTLLERRGRLPQHMYLDYSFTNLLGTVLVALIFAQLGGTKHSMPNFFTQFSQQDNWPSVLFAMAGSVVHSDVC

SEQ ID NO: 10875 - protein, 211 aa, Zea mays
  Coding DNA Sequence Number=SeqID_510
  Subcellular localization annotation: CTP_CleavageSite=49; ConfidenceScore=5.27e-01
MELVLLCRRHASAFAAPSPLSRQAPGPPRGQAPSTAPRPPRGRAAAGLPCAADGDSRAVEPPPATTGSVAAVEPRLRRTDVVRRGSLRPASRARTAPGGQQSSRWLLRRGVLAGARPAALEPWSASFARGRQGSGSPVATRGRVPPPKPESGLACGQARPCWGQTAPAPGRTAAGVGPRLRPLAGGSRRSSVRALGPPVRARVGAGPCLRR

SEQ ID NO: 10876 - protein, 145 aa, Zea mays
  Coding DNA Sequence Number=SeqID_6906
  Gene Ontology: Mol. function=protein dimerization activity; Cellular component=nucleus; Biological process=regulation of transcription, DNA-dependent
  Homolog annotation: Hit_ID=Q38826; Match level="QueryCoverage=97%, HitCoverage=57%, E-value=4e-41, Identity=54%"; Hit description=Auxin- responsive protein IAA8
  Pfam annotation: Domain name=AUX_IAA; Domain location=52-145; Score= -27.0; E_value=1.7e-07; Accession=PF02309.7; Description=AUXIAA family
MTYQLQSVDKEGLGTATCLKERNYLGLSDCSSSVDSSTVPNLVLDTDKKSSLNFKATELRLGLPESSQSPQRETDFGLLSPRTPDEKLLFPLLPCKDHASGNKRGYLAKSGSNNAPASKAQVVGWPPIRSYGKNTMASSTSKTRR

SEQ ID NO: 10877 - protein, 145 aa, Zea mays; identical to SEQ ID NO: 10876
  Coding DNA Sequence Number=SeqID_6907
  Gene Ontology: Mol. function=protein dimerization activity; Cellular component=nucleus; Biological process=regulation of transcription, DNA-dependent
  Homolog annotation: Hit_ID=Q38826; Match level="QueryCoverage=97%, HitCoverage=57%, E-value=4e-41, Identity=54%"; Hit description=Auxin- responsive protein IAA8
  Pfam annotation: Domain name=AUX_IAA; Domain location=52-145; Score= -27.0; E_value=1.7e-07; Accession=PF02309.7; Description=AUXIAA family

SEQ ID NO: 10878 - protein, 179 aa, Zea mays
  misc_feature (149)..(149): Xaa can be any naturally occurring amino acid
  Coding DNA Sequence Number=SeqID_6908
  Gene Ontology: Mol. function=peptidyl-prolyl cis-trans isomerase activity; Cellular component=cytoplasm; Biological process=protein folding
  Homolog annotation: Hit_ID=A8CYN7; Match level="QueryCoverage=73%, HitCoverage=75%, E-value=9e-42, Identity=68%"; Hit description =Peptidyl-prolyl cis-trans isomerase
  Pfam annotation: Domain name=Pro_isomerase; Domain location=51-178; Score=125.0; E_value=2.2e-34; Accession=PF00160.11; Description =Cyclophilin type peptidyl-prolyl cis-tr
MAGGFTININIPAGEGLNISINPNSAAAGNLCTNPSSQKPLECSPGKANPKVFFDMAVRGKAVGRIVMELFADTTPRTAENFRALCTGEKGMGKKGKPLHYKGSIIHHMCPDYIIGGGDFTYERKGYGGESIYAGGFFEDENFIKKHTXGPGILSMNNNGPDTNQSQFLISLTENWELD

SEQ ID NO: 10879 - protein, 189 aa, Zea mays
  misc_feature (151)..(151): Xaa can be any naturally occurring amino acid
  Coding DNA Sequence Number=SeqID_6909
  Gene Ontology: Mol. function=pectate lyase activity; Cellular component=extracellular region
  Homolog annotation: Hit_ID=Q9FXD8; Match level="QueryCoverage=82%, HitCoverage=37%, E-value=5e-78, Identity=89%"; Hit description =Probable pectate lyase 5 precursor
ETIKRMALLHLSLSLFSCLFLVLAPTYVASSHVSDPELVVQEVNQHINASRRNLGVLSCGTGNPIDDCWRCDPKWEKNRQRLADCAIGFGKRAIGGREGKIYVVTDPSDKDAVNPKPGTLRHAVIQEEPLWIIFARDMVIKLKEELIMNSXFKTIDGRGANVHIAGGACITVQYVTNILPPRRGPPRLA

SEQ ID NO: 10880 - protein, 212 aa, Zea mays
  Coding DNA Sequence Number=SeqID_6910
  Subcellular localization annotation: CTP_CleavageSite=87; ConfidenceScore=5.44e-01
DRLPRLVFLEAAASKLLPPTCASLPPFPSLCCARRPLARGAPSSPSTSPPMARPLALVPRALLPYCRACPISLHAPLARTPARPSPQCPAGAPWLAPALAQPLLLAPPGAQPSSPPAPCSSMAGVSPAWVSPRSPAVSLCRGLAQPQPRSTWPRPRRGCRPRLALRPTSPVEFLCPLPRPPSILSSRGADRAPAPARHGCHALPTAKLAGIG

SEQ ID NO: 10881 - protein, 196 aa, Zea mays
  misc_feature (132)..(132): Xaa can be any naturally occurring amino acid
  misc_feature (159)..(159): Xaa can be any naturally occurring amino acid
  Coding DNA Sequence Number=SeqID_6912
  Gene Ontology: Mol. function=calcium ion binding; Cellular component =oxygen evolving complex; Biological process=photosynthesis
  Homolog annotation: Hit_ID=Q9LXX5; Match level="QueryCoverage=98%, HitCoverage=75%, E-value=8e-88, Identity=86%"; Hit description =Putative uncharacterized protein T5P19_300
  Subcellular localization annotation: CTP_CleavageSite=22; ConfidenceScore=5.33e-01
MATASLVPTSNIFHVSPSVRTRASVIVASSHQQQPRRRDLLLKTAVAIPAILNLKEAPISEAREVEVGSFLPPSESDPSFVLFKAKPSDTPALRAGNVQPYQFVLPPNWKQLRIANILSGNYCQPKCAEPWXIEVKFENEKQGEVQVVASPLIRLTNKXPNATIEDLGEPERVIASLGPFVTGNSYDSDELVDTQS

SEQ ID NO: 10882 - protein, 160 aa, Zea mays
  Coding DNA Sequence Number=SeqID_6913
  Gene Ontology: Mol. function=methionine adenosyltransferase activity; Cellular component=phagocytic vesicle; Biological process=one-carbon compound metabolic process
  Homolog annotation: Hit_ID=P43282; Match level="QueryCoverage=99%, HitCoverage=40%, E-value=1e-81, Identity=92%"; Hit description=S -adenosylmethionine synthetase 3
  Pfam annotation: Domain name=S-AdoMet_synt_M; Domain location=116 -160; Score=-5.3; E_value=6.1e-06; Accession=PF02772.6; Description=S- adenosylmethionine synthetase, cent
  Pfam annotation: Domain name=S-AdoMet_synt_N; Domain location=2-101; Score=217.9; E_value=2.4e-62; Accession=PF00438.10; Description=S -adenosylmethionine synthetase, N-te
  Pfam module annotation: Pfam domain module=S-AdoMet_synt_M::S-AdoMet _synt_N; Domain location=116-160::2-101
METFLFTSESVNEGHPDKLCDQVSDAILDACLEQDPESKVACETCTKTNMVMVFGEITTSAKVDYEKIVRSTCREIGFISADVGLDADKCNVLVNIEQQSPDIAQGVHGHLTKKPEDIGAGDQGHMFGYATDETPELMPLTHGLATKLGARLTEVRKTRL

SEQ ID NO: 10883 - protein, 69 aa, Zea mays
  Coding DNA Sequence Number=SeqID_6914
DVEDVELHLLSSDLCHVRCACMAGQKQILNKNIYFVGGGGSSHRVIFFLSRVLLSLGGRVLLSAFTHSI

SEQ ID NO: 10884 - protein, 193 aa, Zea mays
  misc_feature (163)..(163): Xaa can be any naturally occurring amino acid
  misc_feature (193)..(193): Xaa can be any naturally occurring amino acid
  Coding DNA Sequence Number=SeqID_6916
  Homolog annotation: Hit_ID=Q9C5D0; Match level="QueryCoverage=99%, HitCoverage=84%, E-value=4e-69, Identity=72%"; Hit description =Putative uncharacterized protein At4g34120
  Pfam annotation: Domain name=CBS; Domain location=72-193; Score=28.7; E_value=2.1e-05; Accession=PF00571.18; Description=CBS domain
  Subcellular localization annotation: CTP_CleavageSite=44; ConfidenceScore=5.75e-01
MGSISLSNSLPIPRLPLHTSSLNPCLPSSFPLPPRRSTFSPRISASAVFAAPSGVNNSVPGKNGGYTVGDFMTGKQHLHVVKPSTSVDDALELLVEKKVTGLPVIDDDWSLVGVVSDYDLLALDSISGRSSQNDTNMFPNVDSSWKTFNELQKLISKTHGKVXVGDLMTPSPLVVRGSTNLEDAARLLLETKX

SEQ ID NO: 10885 - protein, 140 aa, Zea mays
  Coding DNA Sequence Number=SeqID_6917
  Homolog annotation: Hit_ID=Q9C5D0; Match level="QueryCoverage=100%, HitCoverage=62%, E-value=4e-36, Identity=59%"; Hit description =Putative uncharacterized protein At4g34120
  Pfam annotation: Domain name=CBS; Domain location=9-127; Score=20.2; E_value=0.00057; Accession=PF00571.18; Description=CBS domain
  Subcellular localization annotation: CTP_CleavageSite=46; ConfidenceScore=5.77e-01
MGSVSFSNSMPITRLPLLTYQSLLPTSSSLPPLSNRRRSNVSQTITASAVFSAPAGVNDSLPARNEGYTVGDFMTGRQHLHVVKPSTSVDDALELLVEKKVTGLPGIDDDWKLVGVVSDYDLLALDSFSGRSPNENKLGP

SEQ ID NO: 10886 - protein, 71 aa, Zea mays
  Coding DNA Sequence Number=SeqID_6918
KLHSHNASLDFEIRKGDTAKGGGEETQRGSPLTAVTAEAHHRRGERFHRKSPFSLEWRETSCWCYLFSGNL

SEQ ID NO: 10887 - protein, 194 aa, Zea mays
  misc_feature (110)..(110): Xaa can be any naturally occurring amino acid
  misc_feature (122)..(122): Xaa can be any naturally occurring amino acid
  misc_feature (144)..(144): Xaa can be any naturally occurring amino acid
  misc_feature (153)..(153): Xaa can be any naturally occurring amino acid
  misc_feature (165)..(165): Xaa can be any naturally occurring amino acid
  Coding DNA Sequence Number=SeqID_6920
  Gene Ontology: Mol. function=translation elongation factor activity; Cellular component=cytoplasm; Biological process=translational elongation
  Homolog annotation: Hit_ID=P13905; Match level="QueryCoverage=98%, HitCoverage=41%, E-value=9e-84, Identity=85%"; Hit description =Elongation factor 1-alpha
  Pfam annotation: Domain name=GTP_EFTU; Domain location=5-184; Score =173.9; E_value=4.1e-49; Accession=PF00009.17; Description=Elongation factor Tu GTP binding domain
  Pfam annotation: Domain name=MMR_HSR1; Domain location=8-160; Score= -12.4; E_value=0.015; Accession=PF01926.13; Description=GTPase of unknown function
  Pfam module annotation: Pfam domain module=GTP_EFTU::MMR_HSR1; Domain location=5-184::8-160
MGKEKFHINIVVIGHVDSGKSTTTGHLIYKLGGIDKRVIERFEKEAAEMNKRSFKYAWVLDKLKAERERGITIDIALWKVETTKYYCTVIDAPGHRDFIKNMITGTSQAXDCAVLIIDPTTXVGFEAGFSKDGQTREHALLAFXRLGGKQMIXCCWNKMDAPTPXYSRARYVEFFRGGASYLVEKGGKPGKKNP

SEQ ID NO: 10888 - protein, 119 aa, Zea mays
  Coding DNA Sequence Number=SeqID_6921
  Subcellular localization annotation: CTP_CleavageSite=34; ConfidenceScore=5.04e-01
GWVRGSGGCGTESGDLSLAAQFRWYLVRSGSLLVVQGVWGLRLCSLVAFRRNRFLLDSFASDKVDLGWGGNGSVDGFSSGSEFQGKWLVSAVDSDSDLGLWLRVVEKAGRGGLVSFYFP

SEQ ID NO: 10889 - protein, 119 aa, Zea mays; identical to SEQ ID NO: 10888
  Coding DNA Sequence Number=SeqID_6922
  Subcellular localization annotation: CTP_CleavageSite=34; ConfidenceScore=5.04e-01

SEQ ID NO: 10890 - protein, 141 aa, Zea mays
  misc_feature (141)..(141): Xaa can be any naturally occurring amino acid
  Coding DNA Sequence Number=SeqID_6924
  Gene Ontology: Mol. function=nucleic acid binding
  Homolog annotation: Hit_ID=A5AMT9; Match level="QueryCoverage=92%, HitCoverage=35%, E-value=2e-31, Identity=57%"; Hit description =Putative uncharacterized protein
  Pfam annotation: Domain name=R3H; Domain location=33-93; Score=8.6; E_ value=0.048; Accession=PF01424.13; Description=R3H domain
MAAAMSEKEAMVDPFLVEALQNPRHRLTILRMELDIQKFFQSPEQQQYEFPPYPTSYLRLAAHRVAHHYGLFTTALDGAALDGSGNRILVTKTGESSYPYVCLSEIPVKQPEANGRRPQGFKLAIKARPNGGSGGPGGGAX

SEQ ID NO: 10891 - protein, 214 aa, Zea mays
  misc_feature (214)..(214): Xaa can be any naturally occurring amino acid
  Coding DNA Sequence Number=SeqID_6925
  Gene Ontology: Mol. function=oxidoreductase activity; Cellular component=extracellular region; Biological process=electron transport
  Homolog annotation: Hit_ID=Q00624; Match level="QueryCoverage=99%, HitCoverage=38%, E-value=1e-121, Identity=99%"; Hit description=L -ascorbate oxidase homolog precursor
  Pfam annotation: Domain name=Cu-oxidase; Domain location=1-124; Score= 151.4; E_value=2.6e-42; Accession=PF00394.12; Description=Multicopper oxidase
FLDGGRTIGRPDGIVINGKSGKGDGSDAPLFTLKPGKTYRVRICNVGLKTSINFRIQNHKMKLVEMEGSHVLQNDYDSLDVHVGQCFGTIVTANQEPKDYYMVASSRFLKTVITTTGLLRYEGGKGPASSQLPAGPVGWAWSLNQFRSFRWNLTASAARPNPQGSYHYGKINITRTIKLVNTQGKVDGKLRFALNGVSHTDPETPLKLAEYFGX

SEQ ID NO: 10892 - protein, 150 aa, Zea mays
  Coding DNA Sequence Number=SeqID_6926
  Gene Ontology: Mol. function=DNA binding; Cellular component =chromosome; Biological process=nucleosome assembly
  Homolog annotation: Hit_ID=Q9FFC0; Match level="QueryCoverage=61%, HitCoverage=63%, E-value=5e-43, Identity=97%"; Hit description =Histone H2B.10
  Pfam annotation: Domain name=Histone; Domain location=57-127; Score =106.7; E_value=7.3e-29; Accession=PF00125.14; Description=Core histone H2AH2BH3H4
MAPKAEKKPAEKKPASEKPAEEKSKAEKAPAEKKPKAGKKLPKEAGAGGDKKKKMKKKSVETYKIYIFKVLKQVHPDIGISSKAMGIMNSFINDIFEKLAGESSKLARYNKKPTITSREIQTAVRLVLPGELAKHAVSEGTKAGTKFTSS

SEQ ID NO: 10893 - protein, 151 aa, Zea mays
  Coding DNA Sequence Number=SeqID_6927
  Gene Ontology: Mol. function=molecular_function; Cellular component =integral to membrane; Biological process=retrograde vesicle-mediated transport, Golgi to ER
  Homolog annotation: Hit_ID=O48671; Match level="QueryCoverage=76%, HitCoverage=58%, E-value=4e-40, Identity=69%"; Hit description =Protein RER1B
  Pfam annotation: Domain name=Rer1; Domain location=1-146; Score =231.2; E_value=2.4e-66; Accession=PF03248.4; Description=Rer1 family
MDGGGDVATPVQKRAHEAWRLYKYYLDKTTPHSTYRWIGTLVVFLIYCLRVFSIHGFYIISYGLGIYLLNLLIGFLSPLVDPELDASDGGASLPTRGSDEFKPFIRRLPEFKFWYSMTKAFGIAFPITFFPGFGGPGFRAKRFLNGAGPFG

SEQ ID NO: 10894 - protein, 168 aa, Zea mays
  misc_feature (160)..(160): Xaa can be any naturally occurring amino acid
  Coding DNA Sequence Number=SeqID_6928
  Gene Ontology: Mol. function=shikimate 5-dehydrogenase activity; Cellular component=chloroplast; Biological process=tetrapyrrole biosynthetic process
  Homolog annotation: Hit_ID=P42804; Match level="QueryCoverage=100%, HitCoverage=33%, E-value=2e-65, Identity=72%"; Hit description =Glutamyl-tRNA reductase 1, chloroplast precursor
  Pfam annotation: Domain name=GlutR_N; Domain location=84-168; Score =51.1; E_value=1.2e-12; Accession=PF05201.5; Description=Glutamyl -tRNAGlu reductase, N-terminal domain
  Subcellular localization annotation: CTP_CleavageSite=49; ConfidenceScore=5.12e-01
MAVSNALVGCPKLETLLNLSSTSTLQTPLGLIGVPRNNRTRRGLIHRARCELSPSDSATISALEQLKNSAPDRYTKERSSIVVIGLSIHTAPVEMREKLAIPEAEWPRAIGELCGLNHIEEAAVLSTCNRMEIYVLALSQHRGVKEVTEWMSKTSGIPVXEICQHRFL

SEQ ID NO: 10895 - protein, 164 aa, Zea mays
  Coding DNA Sequence Number=SeqID_6929
  Gene Ontology: Cellular component=membrane
  Homolog annotation: Hit_ID=Q8RWM7; Match level="QueryCoverage=83%, HitCoverage=60%, E-value=6e-22, Identity=50%"; Hit description =Putative uncharacterized protein At5g36120
  Subcellular localization annotation: CTP_CleavageSite=66; ConfidenceScore=5.09e-01
MTTVASGFVSFSLALNLERQIDQDSSNLLLTLPVFSNHLSNSIDFQAKSRRSCPNIRTQSACLPVVSASLTQIEVDTTTTTTSLCSSIVSSKPISEALLNISLADLDPGTAKLAIRILGTALSAFGFLFILRIVISYSKRADATADLSGAIEAGNNETLRSAAK

SEQ ID NO: 10896 - protein, 164 aa, Zea mays; identical to SEQ ID NO: 10895
  Coding DNA Sequence Number=SeqID_6930
  Gene Ontology: Cellular component=membrane
  Homolog annotation: Hit_ID=Q8RWM7; Match level="QueryCoverage=83%, HitCoverage=60%, E-value=6e-22, Identity=50%"; Hit description =Putative uncharacterized protein At5g36120
  Subcellular localization annotation: CTP_CleavageSite=66; ConfidenceScore=5.09e-01

SEQ ID NO: 10897 - protein, 186 aa, Zea mays
  misc_feature (152)..(152): Xaa can be any naturally occurring amino acid
  Coding DNA Sequence Number=SeqID_6931
  Gene Ontology: Mol. function=binding
  Homolog annotation: Hit_ID=Q9LYD7; Match level="QueryCoverage=91%, HitCoverage=56%, E-value=2e-50, Identity=62%"; Hit description =Putative uncharacterized protein F15N18_140
  Subcellular localization annotation: CTP_CleavageSite=88; ConfidenceScore=5.96e-01
MMKANQKAKPHAPPRPLFSCGFFRRCTQSVLSPTSPHRKPTTTPSSSSSSSTSTSQSFTQWRFPHHADQTPSTVTLPPTPPPPPPLPVATTLQETFQIAELHLASVSQSDKLLALQLLERVVVPDPPSNPTCPPGLMRGLVSCLRSNNIVTXAKYVTKILLALCLAEGNRQVAVEAGAARAVVETA

SEQ ID NO: 10898 - protein, 144 aa, Zea mays
  Coding DNA Sequence Number=SeqID_6932
  Gene Ontology: Mol. function=structural molecule activity; Cellular component=protein complex; Biological process=microtubule-based movement
  Homolog annotation: Hit_ID=Q3EA24; Match level="QueryCoverage=100%, HitCoverage=33%, E-value=4e-81, Identity=99%"; Hit description =Uncharacterized protein At4g14960.1
  Pfam annotation: Domain name=Tubulin; Domain location=49-144; Score= -2.0; E_value=1.1e-06; Accession=PF00091.15; Description=TubulinFtsZ family, GTPase domain
MRECISIHIGQAGIQVGNACWELYCLEHGIQPDGQMPSDKTVGGGDDAFNTFFSETGAGKHVPRAVFVDLEPTVIDEVRTGTYRQLFHPEQLISGKEDAANNFARGHYTIGKEIVDLCLDRIRKLADNCTGLQGFLVFNAVGGG

SEQ ID NO: 10899 - protein, 166 aa, Zea mays
  Coding DNA Sequence Number=SeqID_6933
  Gene Ontology: Mol. function=structural molecule activity; Cellular component=chloroplast; Biological process=response to abscisic acid stimulus
  Homolog annotation: Hit_ID=Q94KU6; Match level="QueryCoverage=89%, HitCoverage=46%, E-value=3e-54, Identity=76%"; Hit description =Plastid lipid-associated protein 2, chloroplast precursor
  Pfam annotation: Domain name=PAP_fibrillin; Domain location=93-167; Score=-20.1; E_value=0.00018; Accession=PF04755.3; Description=PAP _fibrillin
  Subcellular localization annotation: CTP_CleavageSite=70; ConfidenceScore=5.80e-01
MATVQFFNQFPCQTRVQSPSNSKPLSKPPSSLVPMSALTRRPSFSPGEIAVSRSDFRVRVIDAEDELDPETSEGGGSALLMAEEAIESVEETEALKRSLVDSLYGTDRGLSASSETRAEIGDLITQLESKNPTPAPTDALFLLNGKWIQIKFEERCDRHSSANGFD

SEQ ID NO: 10900 - protein, 184 aa, Zea mays
  misc_feature (152)..(152): Xaa can be any naturally occurring amino acid
  misc_feature (162)..(162): Xaa can be any naturally occurring amino acid
  Coding DNA Sequence Number=SeqID_6934
  Gene Ontology: Mol. function=structural molecule activity; Cellular component=chloroplast; Biological process=response to abscisic acid stimulus
  Homolog annotation: Hit_ID=Q94KU6; Match level="QueryCoverage=99%, HitCoverage=57%, E-value=4e-65, Identity=76%"; Hit description =Plastid lipid-associated protein 2, chloroplast precursor
  Pfam annotation: Domain name=PAP_fibrillin; Domain location=91-184; Score=43.3; E_value=8.5e-10; Accession=PF04755.3; Description=PAP _fibrillin
  Subcellular localization annotation: CTP_CleavageSite=35; ConfidenceScore=5.79e-01
MATVQFFNQFPCKTRVQSSANSKPLSKPPSLVPTSAFTRRPLFSPGEFAVSRADFRVRVIDAEDEFDSERSEGGSALLMAEEAIESVEETEVLKRSLVDSLYGTDRGLSASSETRAEIGDLITQLESKNPTPAPTDALFLLNGKWILAYTSXFVGLFPLLSXRGIVPLVKVDEISQTIDSENFR

SEQ ID NO: 10901 - protein, 130 aa, Zea mays
  misc_feature (130)..(130): Xaa can be any naturally occurring amino acid
  Coding DNA Sequence Number=SeqID_6935
  Gene Ontology: Mol. function=GDP-L-fucose synthase activity; Cellular component=cytoplasm; Biological process=cellular metabolic process
  Homolog annotation: Hit_ID=Q9LMU0; Match level="QueryCoverage=99%, HitCoverage=40%, E-value=7e-59, Identity=87%"; Hit description =Putative GDP-L-fucose synthase 2
  Pfam annotation: Domain name=Epimerase; Domain location=18-130; Score= -16.3; E_value=6e-06; Accession=PF01370.11; Description=NAD dependent epimerasedehydratase family
MADTTGSGSFMSEKSAKIFVAGHRGLVGSAIVRKLQESGFTNLLLRTHSDLDLTNQSDVESFFSTEKPAYVILAAAKVGGIHANNTYPADFIAVNLQIQTNVIHSAYTNGVEKLLFLGSSCIYPKVAPQX

SEQ ID NO: 10902 - protein, 175 aa, Zea mays
  misc_feature (91)..(91): Xaa can be any naturally occurring amino acid
  misc_feature (110)..(110): Xaa can be any naturally occurring amino acid
  misc_feature (173)..(173): Xaa can be any naturally occurring amino acid
  Coding DNA Sequence Number=SeqID_6936
  Gene Ontology: Mol. function=nucleic acid binding; Cellular component= cytoplasm; Biological process=selenocysteine incorporation
  Homolog annotation: Hit_ID=Q9FFU0; Match level="QueryCoverage=64%, HitCoverage=28%, E-value=3e-42, Identity=71%"; Hit description =Similarity to polyadenylate-binding protein 5
  Pfam annotation: Domain name=RRM_1; Domain location=66-137; Score =35.8; E_value=1.5e-07; Accession=PF00076.12; Description=RNA recognition motif. (a.k.a. RRM, RBD, or
MQQPPQNAAGAGQQIPSDQQAYHQQQLSWMMQQQQGQQWNQQSAPSQGQQPYGSQNPGSDNEIRSLWIGALQPWMDESYIMTVFAQAGEGXSAKVIRNKLTGMCEGYGFXEFANHAAAERVLQTYNGTQMPNSDQTFRLNWAQAGAGERRQAEGPEYTILGGDLAPESTDFMXRE

SEQ ID NO: 10903 - protein, 152 aa, Zea mays
  misc_feature (135)..(135): Xaa can be any naturally occurring amino acid
  Coding DNA Sequence Number=SeqID_6937
  Gene Ontology: Mol. function=structural constituent of ribosome; Cellular component=ribonucleoprotein complex; Biological process =translation
  Homolog annotation: Hit_ID=P34788; Match level="QueryCoverage=84%, HitCoverage=84%, E-value=4e-68, Identity=98%"; Hit description=40S ribosomal protein S18
  Pfam annotation: Domain name=Ribosomal_S13; Domain location=14-142; Score=288.5; E_value=1.3e-83; Accession=PF00416.12; Description =Ribosomal protein S13S18
MSLVANEEFQHILRVLNTNVDGKQKIMFALTSIKGIGRRLANIVCKKADVDMNKRAGELSAAEIDNLMTIVANPKQYKIPDWFLNRQKDYKDGKYSQVVSNALDMKLRDDLERLKKIRNHRGLRHYWGLRVRGQXTKTTGRRGKTVGVSKKR

SEQ ID NO: 10904 - protein, 181 aa, Zea mays
  misc_feature (130)..(130): Xaa can be any naturally occurring amino acid
  misc_feature (152)..(152): Xaa can be any naturally occurring amino acid
  Coding DNA Sequence Number=SeqID_6938
  Gene Ontology: Mol. function=fructose-bisphosphate aldolase activity; Cellular component=chloroplast; Biological process=metabolic process
  Homolog annotation: Hit_ID=Q9SJU4; Match level="QueryCoverage=92%, HitCoverage=42%, E-value=1e-75, Identity=89%"; Hit description =Probable fructose-bisphosphate aldolase 1, chloroplast precursor
  Pfam annotation: Domain name=Glycolytic; Domain location=54-181; Score=-38.3; E_value=3.1e-11; Accession=PF00274.9; Description =Fructose-bisphosphate aldolase class-I
  Subcellular localization annotation: CTP_CleavageSite=47; ConfidenceScore=5.47e-01
MASSSASLLKASPVKSDWVKGQSLLIRQPSSVAAIRSNAAPSALTVRAASYADELVKTAKTIASPGRGILAMDESNATCGKRLASIGLENTEANRQAYRTLLVSAPGLGQYISGAILFEETLYQSTVDGXKMVDVLVDQNIVPGIKVDKGFXCPLVGSNDESWCQGLHRLASRTAATTQQV

SEQ ID NO: 10905 - protein, 182 aa, Zea mays
  misc_feature (103)..(103): Xaa can be any naturally occurring amino acid
  misc_feature (137)..(137): Xaa can be any naturally occurring amino acid
  Coding DNA Sequence Number=SeqID_6939
  Gene Ontology: Mol. function=structural constituent of ribosome; Cellular component=ribonucleoprotein complex; Biological process =translation
  Homolog annotation: Hit_ID=Q93VI3; Match level="QueryCoverage=88%, HitCoverage=90%, E-value=1e-64, Identity=78%"; Hit description=60S ribosomal protein L17-1
  Pfam annotation: Domain name=Ribosomal_L22; Domain location=15-152; Score=155.4; E_value=1.6e-43; Accession=PF00237.9; Description =Ribosomal protein L22pL17e
SYSQEPDNQTKSCKARGSDLRVHFKNTRETAHAIRKLPLLKAQRYLEDVIAHKQAIPFTRFCRGVGRTAPAKNRHSNGQGRWPAKSAQFVLDLLKNAESNAEXVKGLDGDALFISHIQVTKLPSKGKRTYPGHGKIXPYMGHPWPFELIFLKKKKSAKKSPEPLWAPKPKKPPPKLSWVFNS

SEQ ID NO: 10906 - protein, 192 aa, Zea mays
  Coding DNA Sequence Number=SeqID_6940
TSKHHTHTQTHTFSSLLLIFSSFLHIQMATADVEQVTPAAAEHVEMTPPKTVEPEETAAAVVTESAPAQVTETEAPVEETEKPTEEADETKTETKEEEAPVEVTTKDLPVEETEKPAEETEEAKTETEEIKKEEEAPVEVTTKDLPVEETEEIKKEEEAPAVVEEESKTEEVVEPKKEEEAPVVVEEESKAE

SEQ ID NO: 10907 - protein, 317 aa, Zea mays
  misc_feature (225)..(225): Xaa can be any naturally occurring amino acid
  misc_feature (235)..(235): Xaa can be any naturally occurring amino acid
  misc_feature (287)..(287): Xaa can be any naturally occurring amino acid
  misc_feature (296)..(296): Xaa can be any naturally occurring amino acid
  misc_feature (306)..(306): Xaa can be any naturally occurring amino acid
  misc_feature (317)..(317): Xaa can be any naturally occurring amino acid
  Coding DNA Sequence Number=SeqID_6942
  Gene Ontology: Mol. function=hydrolase activity, acting on glycosyl bonds; Cellular component=extracellular region; Biological process =cell wall organization and biogenesis
  Homolog annotation: Hit_ID=P35337; Match level="QueryCoverage=99%, HitCoverage=79%, E-value=1e-167, Identity=92%"; Hit description =Polygalacturonase precursor
  Pfam annotation: Domain name=Glyco_hydro_28; Domain location=47-317; Score=332.0; E_value=1e-96; Accession=PF00295.8; Description =Glycosyl hydrolases family 28
MGSYLGIYTILVLCLLGYSANAEVFTVGGPPGSDITAALLKAFTSACQAPAPSQVLIPKGDFKLGEIAMTGPCKSPVEFTLQGNVKADGGSTQGKDRWVVFEKINGFKLNGGGTFDGEGNAAWKANNCHKTFECKKLPISVRFDFVDNAEIKDVTSLDAKNFHFNVISGKNMTFDNIKIIAPAESPNTDGIHLGRCEGVKILNTKIATGDDCISVGDGMKNLLIXEKVVCRPGHXSSVGSLGRDGWEPDVTDITVKNWTLEGTDNGLRIRTWPSAACTTTAAGIHFXDISLNKVSXNPFLFDQEDXPWNHGNKNKPX

SEQ ID NO: 10908 - protein, 178 aa, Zea mays
  misc_feature (158)..(158): Xaa can be any naturally occurring amino acid
  Coding DNA Sequence Number=SeqID_6943
  Gene Ontology: Mol. function=protein binding; Biological process =protein metabolic process
  Homolog annotation: Hit_ID=Q9SZ71; Match level="QueryCoverage=96%, HitCoverage=62%, E-value=5e-53, Identity=64%"; Hit description =Putative uncharacterized protein F16J13.130
  Pfam annotation: Domain name=Clp_N; Domain location=108-160; Score =32.2; E_value=1.8e-06; Accession=PF02861.11; Description=Clp amino terminal domain
  Subcellular localization annotation: CTP_CleavageSite=77; ConfidenceScore=5.71e-01
MASQSFTLANLRISQIDSFYSQKPSSPIHFFSTRNPVKSLNLTNPWMAGDSSLSLDSSASVLRTNSTTRRKIPIAVVASLPTANPESAVSDAKKPKWSWRGIISFAMGELEARKLKYPNTGTESLLMGILIEGTSFTSKFLRAHKITLYKVREETIKXLGKADLYSFSPEHPPFPPRA

SEQ ID NO: 10909 - protein, 165 aa, Zea mays
  Coding DNA Sequence Number=SeqID_6944
  Gene Ontology: Mol. function=oxidoreductase activity, acting on sulfur group of donors, disulfide as acceptor; Cellular component =cytosol; Biological process=protein metabolic process
  Homolog annotation: Hit_ID=Q6V5K8; Match level="QueryCoverage=100%, HitCoverage=80%, E-value=7e-93, Identity=99%"; Hit description =Peptide methionine sulfoxide reductase
  Pfam annotation: Domain name=PMSR; Domain location=38-165; Score =175.8; E_value=1.1e-49; Accession=PF01625.11; Description=Peptide methionine sulfoxide reductase
MGSSSTAQEEPQLVDTPAIVPSPLAQEPDNDVPAPGNQFAEFAAGCFWGVELAYQRIPGVTETEVGYTQGISHNPSYKDVCTNTTNHAEVVRVQYDPNECTYETLLDLFWSRHDPTTLNRQGKLVGAQYRSGIYFYTPEQEKLARESLENQQKKLEKKIVSEILP

SEQ ID NO: 10910 - protein, 154 aa, Zea mays
  misc_feature (153)..(154): Xaa can be any naturally occurring amino acid
  Coding DNA Sequence Number=SeqID_6945
  Gene Ontology: Mol. function=translation elongation factor activity; Cellular component=cytoplasm; Biological process=response to stress
  Homolog annotation: Hit_ID=Q9MA63; Match level="QueryCoverage=97%, HitCoverage=60%, E-value=9e-73, Identity=94%"; Hit description =REF/SRPP-like protein At3g05500
  Pfam annotation: Domain name=REF; Domain location=12-153; Score =230.5; E_value=3.7e-66; Accession=PF05755.3; Description=Rubber elongation factor protein (REF)
MAQTDLNQPKLDMTKEEKERLKYLEFVQAAAVEAVLRFALIYAKAKDKSGPLKPGVESVEGAVKTVVGPVYQKYHDVPVEVLKYMDQKVDMSVNELDRRVPPVVKQVSAHAISAAQIAPVVARAFASEVRRAGVVETASGMAKSVYTKYEPAXX

SEQ ID NO: 10911 - protein, 192 aa, Zea mays
  misc_feature (156)..(156): Xaa can be any naturally occurring amino acid
  Coding DNA Sequence Number=SeqID_6946
  Gene Ontology: Mol. function=hydrolase activity
  Homolog annotation: Hit_ID=Q8RXC1; Match level="QueryCoverage=98%, HitCoverage=61%, E-value=7e-84, Identity=81%"; Hit description =Putative uncharacterized protein At1g78210
MTGCFSFSEVIEGAYRYGFKRSGIRPVTIDLKDGTVVHFWVSKTRDESKPNLLLIHGLGASAIWQWYDVARRLSPHFNLFIPDLVFFGGSSTTRPERSDVFQAQTLMRALEAQSVKRFSLVGLSYGGFVGYRMPSMYGDAVEKGVICCAAVCVEEXDMRDRVFAVSDLDGAPKIPVAESGEELRELIGYIST

SEQ ID NO: 10912 - protein, 191 aa, Zea mays
  misc_feature (152)..(152): Xaa can be any naturally occurring amino acid
  misc_feature (171)..(171): Xaa can be any naturally occurring amino acid
  Coding DNA Sequence Number=SeqID_6947
  Gene Ontology: Mol. function=structural constituent of ribosome; Cellular component=ribonucleoprotein complex; Biological process =translation
  Homolog annotation: Hit_ID=P39697; Match level="QueryCoverage=100%, HitCoverage=92%, E-value=4e-80, Identity=80%"; Hit description=40S ribosomal protein S19, mitochondrial precursor
  Pfam annotation: Domain name=RRM_1; Domain location=28-99; Score =116.9; E_value=6.1e-32; Accession=PF00076.12; Description=RNA recognition motif. (a.k.a. RRM, RBD, or
  Pfam annotation: Domain name=Ribosomal_S19; Domain location=128-191; Score=58.7; E_value=2e-14; Accession=PF00203.11; Description =Ribosomal protein S19
  Pfam module annotation: Pfam domain module=RRM_1::Ribosomal_S19; Domain location=28-99::128-191
  Subcellular localization annotation: CTP_CleavageSite=56; ConfidenceScore=5.07e-01
MAVCTKLGVLQNRNVPVTSMLRYMSTKLFIGGLSPGTDDQSLKDAFSTFNGVTEARVMTNKVTGRSRGYGFVNFTSEDSAKSAISAMDGQELNGRNIRVDVAKEWPSLPFSSVEGTEDEKKGNKMVSRSVWKDPFVDAFLMKKKNAALNRKXWSRESTILPEYGDSSVRIXHGKTHVRCKITEGKSWHKFG

SEQ ID NO: 10913 - protein, 116 aa, Zea mays
  misc_feature (109)..(109): Xaa can be any naturally occurring amino acid
  Coding DNA Sequence Number=SeqID_6948
  Gene Ontology: Mol. function=nucleotide binding; Cellular component =intracellular; Biological process=small GTPase mediated signal transduction
  Homolog annotation: Hit_ID=Q9LIK1; Match level="QueryCoverage=98%, HitCoverage=62%, E-value=2e-57, Identity=95%"; Hit description =Similarity to ADP-ribosylation factor
  Pfam annotation: Domain name=Arf; Domain location=5-116; Score=96.0; E_value=1.2e-25; Accession=PF00025.11; Description=ADP-ribosylation factor family
  Pfam annotation: Domain name=MMR_HSR1; Domain location=18-105; Score =4.5; E_value=0.00041; Accession=PF01926.13; Description=GTPase of unknown function
  Pfam annotation: Domain name=Miro; Domain location=19-115; Score =17.4; E_value=0.00023; Accession=PF08477.3; Description=Miro-like protein
  Pfam module annotation: Pfam domain module=Arf::MMR_HSR1::Miro; Domain location=5-116::18-105::19-115
MGAFASRFWFMMFPAKEYKIVVVGLDNAGKTTTLYKLHLGEVVTTHPTVGSNVEELVYKNIRFEVWDLGGQDRLRTSWATYYRGTNAVIVVIDSTDRARISLMKDELFXLLGHEAS

SEQ ID NO: 10914 - protein, 208 aa, Zea mays
  misc_feature (206)..(206): Xaa can be any naturally occurring amino acid
  misc_feature (208)..(208): Xaa can be any naturally occurring amino acid
  Coding DNA Sequence Number=SeqID_6949
  Gene Ontology: Mol. function=endopeptidase Clp activity; Cellular component=cytoplasm; Biological process=proteolysis
  Homolog annotation: Hit_ID=Q9SAA2; Match level="QueryCoverage=99%, HitCoverage=76%, E-value=1e-86, Identity=81%"; Hit description=ATP -dependent Clp protease proteolytic subunit 6, chloroplast precursor
  Pfam annotation: Domain name=CLP_protease; Domain location=90-207; Score=98.8; E_value=1.7e-26; Accession=PF00574.13; Description=Clp protease
  Subcellular localization annotation: CTP_CleavageSite=39; ConfidenceScore=5.70e-01
MAGLAISPPLSLTFSSRTRNAKPTSYLSRNQRNLTRRIVSALPSPYGDSLKAGLSSNVSGNKDPRNIAPRSGVIVAKKGNPPVMPSVMTPGGPLDLSSVLFRNRIIFIGQPINAQVAQRVISQLVTLASIDDKSDILIYLNCPGGSTYSVLAIYDCMSWIKPKVGTVAFGVAASQGALLLAGGEKGMRYAMPNTRVMILPSHSGCXGX

SEQ ID NO: 10915 - protein, 188 aa, Zea mays
  misc_feature (130)..(130): Xaa can be any naturally occurring amino acid
  misc_feature (141)..(141): Xaa can be any naturally occurring amino acid
  Coding DNA Sequence Number=SeqID_6950
  Gene Ontology: Mol. function=peptidyl-prolyl cis-trans isomerase activity; Cellular component=Golgi apparatus; Biological process =protein folding
  Homolog annotation: Hit_ID=Q9C835; Match level="QueryCoverage=100%, HitCoverage=77%, E-value=8e-66, Identity=73%"; Hit description =Peptidyl-prolyl cis-trans isomerase
  Pfam annotation: Domain name=Pro_isomerase; Domain location=78-188; Score=-49.7; E_value=0.00071; Accession=PF00160.11; Description =Cyclophilin type peptidyl-prolyl cis-tr
  Subcellular localization annotation: CTP_CleavageSite=29; ConfidenceScore=5.24e-01
MARIKPQALLNQSKKKKGPSRISISTIVVCNLVVAVVVLSLVTTYRHWSQRSINVIETQSQRFEDTNAASEQKSYDLPGYADISTSKGLITVELFKDASPEAVDRFLDLCQKDHFKGMPFHRVIKNYLVXQAGHSQSSIPXVEEWTSKGKLRGRLNTSPKHEAFLWLGTPQKPQGEQQPTRDFPPLIT

SEQ ID NO: 10916 - protein, 188 aa, Zea mays
  misc_feature (115)..(115): Xaa can be any naturally occurring amino acid
  misc_feature (147)..(147): Xaa can be any naturally occurring amino acid
  misc_feature (156)..(156): Xaa can be any naturally occurring amino acid
  Coding DNA Sequence Number=SeqID_6951
  Gene Ontology: Cellular component=anchored to membrane
  Homolog annotation: Hit_ID=Q9SJ81; Match level="QueryCoverage=76%, HitCoverage=56%, E-value=1e-63, Identity=87%"; Hit description =Fasciclin-like arabinogalactan protein 7 precursor
  Pfam annotation: Domain name=Fasciclin; Domain location=57-188; Score= 67.3; E_value=5e-17; Accession=PF02469.12; Description=Fasciclin domain
  Subcellular localization annotation: CTP_CleavageSite=29; ConfidenceScore=5.40e-01
MAKMQFSIFIAVAFIVFSASTNAKTASPPAPMLPPTPAPAPAPHHVNLTELLSVAGPFHTFLDYLLSSGVIETFQSQANNTEEGVTIFVPKDDAFKAQKNPPLSNLTKDQLKQLXLSHALPHYYSLSEFQNLSPSGPGSTFAGGQYXLKVTDVSGXTVGSRRLWTRTKVPSSGFSTDPVAVYQVNRVL

SEQ ID NO: 10917 - protein, 190 aa, Zea mays
  misc_feature (190)..(190): Xaa can be any naturally occurring amino acid
  Coding DNA Sequence Number=SeqID_6952
  Gene Ontology: Mol. function=small conjugating protein ligase activity; Cellular component=protein complex; Biological process =regulation of protein metabolic process
  Homolog annotation: Hit_ID=Q9LHG8; Match level="QueryCoverage=86%, HitCoverage=41%, E-value=3e-87, Identity=92%"; Hit description=And human tumor susceptibility gene-like protein
  Pfam annotation: Domain name=UEV; Domain location=37-158; Score =225.4; E_value=1.3e-64; Accession=PF05743.3; Description=UEV domain
MVPSPLNPQQIQQFLSSVLSQRGPNSVPYDESTKWLIRQHLLNLISSYPSLEPKTATFIHNDGRSVNLLQADGTIPMPYHGVTYNIPVIIWLLESYPRHPPCVYVNPTADMIIKRPHAHVTPSGLVSLPYLQNWVYPSSNLVDLVSDLGAAFANDPPLYSRRRPGPSPTPAPYETRPPPPPTGDQRPFPX

SEQ ID NO: 10918 - protein, 153 aa, Zea mays
  misc_feature (63)..(63): Xaa can be any naturally occurring amino acid
  misc_feature (86)..(86): Xaa can be any naturally occurring amino acid
  misc_feature (114)..(114): Xaa can be any naturally occurring amino acid
  misc_feature (127)..(127): Xaa can be any naturally occurring amino acid
  misc_feature (149)..(149): Xaa can be any naturally occurring amino acid
  Coding DNA Sequence Number=SeqID_6953
  Gene Ontology: Mol. function=thiopurine S-methyltransferase activity; Cellular component=cytoplasm; Biological process=metabolic process
  Homolog annotation: Hit_ID=O80564; Match level="QueryCoverage=79%, HitCoverage=31%, E-value=5e-23, Identity=56%"; Hit description =Putative uncharacterized protein At2g43940
  Subcellular localization annotation: CTP_CleavageSite=88; ConfidenceScore=5.89e-01
MSSSLPMRLLVPLTLPLIPPPPSSSDSLALRSKNPNFSLRSSSSCTSCSSSLWQLFPRRSRSXSPCVPMCTKDQDRTDILRNEDGXVTCGLESDEDSGGLRIPTQAQAIVEGAXAVTVAVSELKPSXWDVDYIQELLAIQQQGPRTIGXFFGQ

SEQ ID NO: 10919 - protein, 153 aa, Zea mays; identical to SEQ ID NO: 10918
  misc_feature (63)..(63): Xaa can be any naturally occurring amino acid
  misc_feature (86)..(86): Xaa can be any naturally occurring amino acid
  misc_feature (114)..(114): Xaa can be any naturally occurring amino acid
  misc_feature (127)..(127): Xaa can be any naturally occurring amino acid
  misc_feature (149)..(149): Xaa can be any naturally occurring amino acid
  Coding DNA Sequence Number=SeqID_6954
  Gene Ontology: Mol. function=thiopurine S-methyltransferase activity; Cellular component=cytoplasm; Biological process=metabolic process
  Homolog annotation: Hit_ID=O80564; Match level="QueryCoverage=79%, HitCoverage=31%, E-value=5e-23, Identity=56%"; Hit description =Putative uncharacterized protein At2g43940
  Subcellular localization annotation: CTP_CleavageSite=88; ConfidenceScore=5.89e-01

SEQ ID NO: 10920 - protein, 201 aa, Zea mays
  misc_feature (174)..(174): Xaa can be any naturally occurring amino acid
  Coding DNA Sequence Number=SeqID_6955
  Gene Ontology: Mol. function=protein binding; Biological process =embryonic development ending in seed dormancy
  Homolog annotation: Hit_ID=Q9ZU90; Match level="QueryCoverage=89%, HitCoverage=62%, E-value=3e-71, Identity=77%"; Hit description =Expressed protein
MRTEEKEEGEEEEEEQQQWPSSRSAHEVLLIVLPYLHSLFELLSMTGVSRSLRDAIRDETALWTKIVVEPPLRSRLTDDILREITSKSAGKLNTLILRQCLRITDKGLRRVVDANPLIRKIIVPGCTELTPEGIIGCVESLATVETLHIHGVHRFTKDHLSALSTYLPHGGAIXDVEVCPKCDLVKMIPSCSRASCNGGRR

SEQ ID NO: 10921 - protein, 181 aa, Zea mays
  misc_feature (142)..(142): Xaa can be any naturally occurring amino acid
  Coding DNA Sequence Number=SeqID_6956
  Gene Ontology: Mol. function=nucleotide binding; Cellular component =intracellular; Biological process=small GTPase mediated signal transduction
  Homolog annotation: Hit_ID=P36397; Match level="QueryCoverage=95%, HitCoverage=95%, E-value=3e-92, Identity=96%"; Hit description=ADP -ribosylation factor 1
  Pfam annotation: Domain name=Arf; Domain location=1-177; Score=402.0; E_value=8.9e-118; Accession=PF00025.11; Description=ADP-ribosylation factor family
  Pfam annotation: Domain name=MMR_HSR1; Domain location=18-129; Score =9.0; E_value=0.00016; Accession=PF01926.13; Description=GTPase of unknown function
  Pfam annotation: Domain name=Miro; Domain location=19-129; Score =17.0; E_value=0.00026; Accession=PF08477.3; Description=Miro-like protein
  Pfam annotation: Domain name=Ras; Domain location=19-179; Score= -59.2; E_value=6.7e-05; Accession=PF00071.12; Description=Ras family
  Pfam annotation: Domain name=SRPRB; Domain location=15-173; Score= -40.0; E_value=0.00012; Accession=PF00071.12; Description=Signal recognition particle receptor bet
  Pfam module annotation: Pfam domain module=Arf::MMR_HSR1::Miro::Ras::S RPRB; Domain location=1-177::18-129::19-129::19-179::15-173
MGLSFGKLFSRLFAKKEMRILMVGLDAAGKTTILYKLKLGEIVTTIPTIGFNVETVQYKNISFTVWDVGGQDKIRPLWRHYFQNTQGLIFVVDSNDRDRVVEARDELHRMLNEDELRDAGLLVFANKQDLPNAMDAAEITDXLGLHSPRQRHWYIQSTCATSGEGLYEGLDWVPHTSRAGR

SEQ ID NO: 10922 - protein, 160 aa, Zea mays
  Coding DNA Sequence Number=SeqID_6957
  Gene Ontology: Mol. function=chalcone isomerase activity; Biological process=flavonoid biosynthetic process
  Homolog annotation: Hit_ID=Q9FLC7; Match level="QueryCoverage=97%, HitCoverage=76%, E-value=2e-51, Identity=67%"; Hit description =Similarity to chalcone-flavonone isomerase
  Pfam annotation: Domain name=Chalcone; Domain location=1-161; Score= -1.5; E_value=5.4e-05; Accession=PF02431.6; Description=Chalcone -flavanone isomerase
MGTEMVMVHEVPFPPQIITSKPLSLLGQGITDIEIHFLQVKFTAIGVYLDPSDVKTHLDKWKGKTGKDLAGDDDFFDALASGEIEKVIRVVVIKEIKGAQYGVQLENSVRDRLAAEDKYEEEEETELEKVVGFFQSRYFKTHSIITYRFSAKDGICQIGF

SEQ ID NO: 10923 - protein, 162 aa, Zea mays
  misc_feature (48)..(48): Xaa can be any naturally occurring amino acid
  misc_feature (131)..(131): Xaa can be any naturally occurring amino acid
  Coding DNA Sequence Number=SeqID_6958
  Gene Ontology: Mol. function=chitinase activity; Cellular component =extracellular region; Biological process=cell wall catabolic process
  Homolog annotation: Hit_ID=Q42042; Match level="QueryCoverage=73%, HitCoverage=91%, E-value=4e-57, Identity=88%"; Hit description =Endochitinase, basic
MVTIRSVSVFILVLLAISSLALVANGEDKTIKVKKVKGKEVCTQGWEXVWWSEYCCNQNISDYFQVYQFEQLFAKRNTPIAHAGGFWDYQSFITAAALFEPLRFGTTGGKLMGQKEMAAFLRHVASKTSCXGYGVATGGPLAWGLCYNREMSPMQSYGDETG

SEQ ID NO: 10924 - protein, 155 aa, Zea mays
  misc_feature (117)..(117): Xaa can be any naturally occurring amino acid
  misc_feature (146)..(146): Xaa can be any naturally occurring amino acid
  Coding DNA Sequence Number=SeqID_6959
  Homolog annotation: Hit_ID=A7NVP9; Match level="QueryCoverage=84%, HitCoverage=64%, E-value=9e-46, Identity=71%"; Hit description =Chromosome chr18 scaffold_1, whole genome shotgun sequence
  Pfam annotation: Domain name=zf-DNL; Domain location=122-155; Score =16.8; E_value=2.2e-05; Accession=PF05180.3; Description=DNL zinc finger
  Subcellular localization annotation: CTP_CleavageSite=38; ConfidenceScore=5.55e-01
MEATALSSAATIVSSSSSSLSIFSPKKRTYSSSPRIVRLSKKDDKDYDPKFESDSLSLVPLFQNRTLSNDEAMGLVLSAASVRGWTTGSGMEGPSLPAKADAETISTFPWSLFTKSXPRRRMRVAFTCNVCGQRTTRAINPHAYTXRTVFVQCCG

SEQ ID NO: 10925 - protein, 186 aa, Zea mays
  misc_feature (167)..(167): Xaa can be any naturally occurring amino acid
  Coding DNA Sequence Number=SeqID_6960
  Gene Ontology: Mol. function=serine-type endopeptidase activity; Cellular component=intracellular; Biological process=protein modification process
  Homolog annotation: Hit_ID=Q0WRN6; Match level="QueryCoverage=97%, HitCoverage=99%, E-value=1e-93, Identity=91%"; Hit description =Polyubiquitin 4 UBQ4
  Pfam annotation: Domain name=ubiquitin; Domain location=6-74; Score =138.0; E_value=2.6e-38; Accession=PF00240.13; Description=Ubiquitin family
  Pfam annotation: Domain name=ubiquitin; Domain location=82-150; Score= 138.0; E_value=2.6e-38; Accession=PF00240.13; Description=Ubiquitin family
  Pfam module annotation: Pfam domain module=ubiquitin::ubiquitin; Domain location=6-74::82-150
MQIFVKTLTGKTITLEVESSDTIDNVKAKIQDKEGIPPDQQRLIFAGKQLEDGRTLADYNIQKESTLHLVLRLRGGMQIFVKTLTGKTITLEVESSDTIDNVKAKIQDKEGIPPDQQRLIFAGKQLEDGRTLADYNIQKESTLHLVLRLRGGMQIFVKTLTGKTITXLEVESSDTIDNVKARSSVG

SEQ ID NO: 10926 - protein, 189 aa, Zea mays
  misc_feature (10)..(10): Xaa can be any naturally occurring amino acid
  misc_feature (108)..(108): Xaa can be any naturally occurring amino acid
  misc_feature (125)..(125): Xaa can be any naturally occurring amino acid
  misc_feature (138)..(138): Xaa can be any naturally occurring amino acid
  misc_feature (146)..(146): Xaa can be any naturally occurring amino acid
  misc_feature (154)..(154): Xaa can be any naturally occurring amino acid
  misc_feature (160)..(160): Xaa can be any naturally occurring amino acid
  misc_feature (186)..(186): Xaa can be any naturally occurring amino acid
  Coding DNA Sequence Number=SeqID_6961
  Gene Ontology: Mol. function=serine-type endopeptidase activity; Cellular component=intracellular; Biological process=protein modification process
  Homolog annotation: Hit_ID=Q0WRN6; Match level="QueryCoverage=98%, HitCoverage=99%, E-value=3e-67, Identity=78%"; Hit description =Polyubiquitin 4 UBQ4
  Pfam annotation: Domain name=ubiquitin; Domain location=6-75; Score =131.5; E_value=2.4e-36; Accession=PF00240.13; Description=Ubiquitin family
  Pfam annotation: Domain name=ubiquitin; Domain location=83-154; Score= 57.2; E_value=5.6e-14; Accession=PF00240.13; Description=Ubiquitin family
  Pfam module annotation: Pfam domain module=ubiquitin::ubiquitin; Domain location=6-75::83-154
MQIFVKTLTXGKTITLEVESSDTIDNVKAKIQDKEGIPPDQQRLIFAGKQLEDGRTLADYNIQKESTLHLVLRLRGGMQIFVKTLTRKTITLEVESSDTIDNVKAQIXQDKEGIPPDQQRLIFCXGSSWEDGGTLADXHIQEEATXLHLGLRAXRGGCKXFGRTFDGGELSLWEVESSDTIDNVKXRSK

SEQ ID NO: 10927 - protein, 204 aa, Zea mays
  misc_feature (154)..(154): Xaa can be any naturally occurring amino acid
  Coding DNA Sequence Number=SeqID_6962
  Gene Ontology: Mol. function=kinase activity; Cellular component =cytoplasm
  Homolog annotation: Hit_ID=Q9C6Q2; Match level="QueryCoverage=92%, HitCoverage=51%, E-value=2e-90, Identity=93%"; Hit description =Putative uncharacterized protein F17J6.5
  Pfam annotation: Domain name=Indigoidine_A; Domain location=36-203; Score=237.1; E_value=4e-68; Accession=PF04227.3; Description =Indigoidine synthase A like protein
  Subcellular localization annotation: CTP_CleavageSite=39; ConfidenceScore=5.13e-01
MASYSSSSLSRISTLQNHISPLEANNKLRSLVKISPQVSEAIASGRAVVALESTIISHGMPYPQNLQTAKEVESIVRENGAVPATIAILNGVPCIGLNEEELERLASLGKSVQKTAGRDIPHVVATRGDGATTVSATLFFASMVGIQVFVTGGXIGGVHRHANHTMDISSDLTALGRTPIAVISAGVKSILDIPKTLEYLKTPG

SEQ ID NO: 10928 - protein, 88 aa, Zea mays
  Coding DNA Sequence Number=SeqID_6963
  Homolog annotation: Hit_ID=Q9S812; Match level="QueryCoverage=81%, HitCoverage=51%, E-value=5e-17, Identity=61%"; Hit description =Putative uncharacterized protein F5A18.4
MVYNKQKKAHKSKINKFLVSISFIGSAGPIRFVVKEDETVSHVIEYALKCYAPEGRLPLLGSDSSYFLLYRPYWAAEGEIKNISPKPI

SEQ ID NO: 10929 - protein, 88 aa, Zea mays; identical to SEQ ID NO: 10928
  Coding DNA Sequence Number=SeqID_6964
  Homolog annotation: Hit_ID=Q9S812; Match level="QueryCoverage=81%, HitCoverage=51%, E-value=5e-17, Identity=61%"; Hit description =Putative uncharacterized protein F5A18.4

SEQ ID NO: 10930 - protein, 186 aa, Zea mays
  Coding DNA Sequence Number=SeqID_6965
  Gene Ontology: Mol. function=binding
  Homolog annotation: Hit_ID=A7PKZ7; Match level="QueryCoverage=94%, HitCoverage=48%, E-value=4e-25, Identity=37%"; Hit description =Chromosome chr7 scaffold_20, whole genome shotgun sequence
  Subcellular localization annotation: CTP_CleavageSite=7; ConfidenceScore=5.46e-01
MSPVGVSALSSPAKFHRRREKAQTFTPTHFPNPNGFPSPWIKSRPFAPKLSQSLNFASPSPHLPLIRSSTSPSSKDFLQILARKAAIFLVGSFVFLGFCSSKPALALPTATASSQSELEDEAMFEKVLESEPENMEAMKAVLYKKMRRGKPEDAVKYVEKLMKLEPREVEWKLLEALCYETMGQLS

SEQ ID NO: 10931 - protein, 161 aa, Zea mays
  misc_feature (145)..(145): Xaa can be any naturally occurring amino acid
  Coding DNA Sequence Number=SeqID_6966
  Gene Ontology: Mol. function=sequence-specific DNA binding; Cellular component=nucleus; Biological process=regulation of transcription, DNA-dependent
  Homolog annotation: Hit_ID=Q9SV30; Match level="QueryCoverage=97%, HitCoverage=48%, E-value=3e-52, Identity=66%"; Hit description=GATA transcription factor 10
MFGQSFPEDIDCGNFFDNMDDILDFPGCDMDVGFNIGDSDSFPNIWTNHQDTWPAASDPLFSSNTNSDSSPELYVPFEDIVKVERPASFVSESLVAKKEDSFSTNTDSSSSHSQFRSSSPVSVLESSSSSSQTTNATSLVLLGKXTGRPPTKRPSPPRVSG

SEQ ID NO: 10932 - protein, 172 aa, Zea mays
  misc_feature (165)..(172): Xaa can be any naturally occurring amino acid
  Coding DNA Sequence Number=SeqID_6967
  Gene Ontology: Mol. function=sequence-specific DNA binding; Cellular component=nucleus; Biological process=regulation of transcription, DNA-dependent
  Homolog annotation: Hit_ID=Q9SV30; Match level="QueryCoverage=57%, HitCoverage=30%, E-value=2e-26, Identity=61%"; Hit description=GATA transcription factor 10
QSYLLYCKRKMFGQSFAEDLDCGNFFDNMDDLLDFPGGDIDVGFGIGDSDSFPNIWTTHQDTWPAASDPLFASNTNSDSSPELYVPFEDIVKVERPKCFVEESLVEKKEDSFFTNTDSSSSHSQFRSSSPVSVLESSSSSSHTTNTTSLVLLEKARSSTHKTSSXXXXXXXX

SEQ ID NO: 10933 - protein, 172 aa, Zea mays; identical to SEQ ID NO: 10932
  misc_feature (165)..(172): Xaa can be any naturally occurring amino acid
  Coding DNA Sequence Number=SeqID_6968
  Gene Ontology: Mol. function=sequence-specific DNA binding; Cellular component=nucleus; Biological process=regulation of transcription, DNA-dependent
  Homolog annotation: Hit_ID=Q9SV30; Match level="QueryCoverage=57%, HitCoverage=30%, E-value=2e-26, Identity=61%"; Hit description=GATA transcription factor 10

SEQ ID NO: 10934 - protein, 169 aa, Zea mays
  misc_feature (131)..(131): Xaa can be any naturally occurring amino acid
  Coding DNA Sequence Number=SeqID_6969
  Gene Ontology: Mol. function=sulfate adenylyltransferase (ATP) activity; Biological process=sulfate assimilation
  Homolog annotation: Hit_ID=O23324; Match level="QueryCoverage=97%, HitCoverage=35%, E-value=1e-55, Identity=71%"; Hit description=ATP -sulfurylase
  Subcellular localization annotation: CTP_CleavageSite=49; ConfidenceScore=5.75e-01
MASMSTAFPKTTPFLSHPLTKSDSLIATTVSFPSSARSRSLRRATLRVRSALIEPDGGKLVELVVPETRRREKKHEAADLPRVKLTAIDLQWMHVLSEGWASPLRGFMREAEFLQTLHFNSLRLDDGSVVXNMSVPIVLAIDDEQKALIGESKRGPLGDSHGKPNPFLP

SEQ ID NO: 10935 - protein, 75 aa, Zea mays
  Coding DNA Sequence Number=SeqID_6970
  Subcellular localization annotation: CTP_CleavageSite=68; ConfidenceScore=5.19e-01
RPDPVDLNGSWVGAQLPWSVGDVVLGRLSSGSSNLRSDLDSISVRSGSDPPWRVCRKQSVAAFVSLVSCSASSCL

SEQ ID NO: 10936 - protein, 150 aa, Zea mays
  misc_feature (121)..(121): Xaa can be any naturally occurring amino acid
  Coding DNA Sequence Number=SeqID_6972
  Gene Ontology: Mol. function=translation elongation factor activity; Cellular component=eukaryotic translation elongation factor 1 complex; Biological process=translational elongation
  Homolog annotation: Hit_ID=O04487; Match level="QueryCoverage=96%, HitCoverage=34%, E-value=2e-55, Identity=73%"; Hit description =Probable elongation factor 1-gamma 1
  Pfam annotation: Domain name=GST_N; Domain location=1-76; Score=49.7; E_value=9.9e-12; Accession=PF02798.10; Description=Glutathione S -transferase, N-terminal domain
MALVMHSYKGNKNSDKAFIAAEFAGVKIDMPSGFEMGVTNKTPEFLKMNPLGKIPVLETPEGPIFESNAIARYVSRLNGDNSLNGSSLIEYAHIEQWIDFSSLEIYGTSFTGSSQGMGFMXPYRVPGEEAAISALKKGLGALNHHPRPQN

SEQ ID NO: 10937 - protein, 163 aa, Zea mays
  misc_feature (120)..(120): Xaa can be any naturally occurring amino acid
  misc_feature (148)..(148): Xaa can be any naturally occurring amino acid
  Coding DNA Sequence Number=SeqID_6973
  Gene Ontology: Mol. function=transcription factor activity; Cellular component=nucleus; Biological process=regulation of transcription, DNA-dependent
  Homolog annotation: Hit_ID=O80340; Match level="QueryCoverage=98%, HitCoverage=74%, E-value=4e-52, Identity=68%"; Hit description =Ethylene-responsive transcription factor 4
  Pfam annotation: Domain name=AP2; Domain location=23-74; Score=77.1; E_value=5.7e-20; Accession=PF00847.10; Description=AP2 domain
MAKMGLKPDPVTPNPTHNNAKEIRYRGVRKRPWGRYAAEIRDPGKKTRVWLGTFDTAEEAARAYDKAARDFRGAKAKTNFLELNEKVLSGGGGFARSPSQSSTLDYASPPAVTDGIVPPXQLELSLGGGGGACYQIPMARPLYFLDLXMGVGNGGRGQLPVSP

SEQ ID NO: 10938 - protein, 177 aa, Zea mays
  misc_feature (176)..(176): Xaa can be any naturally occurring amino acid
  Coding DNA Sequence Number=SeqID_6974
  Gene Ontology: Mol. function=Rho GDP-dissociation inhibitor activity; Cellular component=cytoplasm
  Homolog annotation: Hit_ID=Q9SFC6; Match level="QueryCoverage=94%, HitCoverage=70%, E-value=8e-59, Identity=69%"; Hit description=Rho GDP-dissociation inhibitor 1
  Pfam annotation: Domain name=Rho_GDI; Domain location=41-174; Score= -91.5; E_value=0.029; Accession=PF02115.7; Description=RHO protein GDP dissociation inhibitor
SEILSLVSGAVSGSRDMDNNNNKNNEENGNTSKTASDDEGVGSVGRQMSESSLCVTEEEEEDDSKLHLAPQYTIKEHLEKDKDDESLRKCKEQLLGSVDVTNIGETLDPEVRIISLVILSPGRPDIVLMVPENGNPKGMWFTLKEGSRYCLKFTFHGNDNIVSGLRHTNTVWKTAXK

SEQ ID NO: 10939 - protein, 181 aa, Zea mays
  misc_feature (120)..(120): Xaa can be any naturally occurring amino acid
  Coding DNA Sequence Number=SeqID_6975
  Gene Ontology: Mol. function=translation initiation factor activity; Cellular component=eukaryotic translation initiation factor 3 complex; Biological process=translation
  Homolog annotation: Hit_ID=O04202; Match level="QueryCoverage=99%, HitCoverage=61%, E-value=5e-76, Identity=80%"; Hit description =Eukaryotic translation initiation factor 3 subunit F
  Pfam annotation: Domain name=Mov34; Domain location=23-133; Score =125.2; E_value=1.9e-34; Accession=PF01398.11; Description =Mov34MPNPAD-1 family
  Subcellular localization annotation: CTP_CleavageSite=40; ConfidenceScore=5.23e-01
MAATNEHTGLQFIAPSSTASTTTQVLTARIHPLVIFNVCDCFVRRPDSAERVIGTLLGSILPDGTVDIRNSYAGPHNESSDQVAGDIDYHHNMGASHLKVNPKEGIVGWYSTGSGGNGGXALIHDFFAREATNPIHLTGDTGFTNGEGTIKAYVSSNLSLGDRHLLLKFKRFPRIPRMVEG

SEQ ID NO: 10940 - protein, 206 aa, Zea mays
  Coding DNA Sequence Number=SeqID_6976
  Gene Ontology: Mol. function=catalytic activity; Cellular component =mitochondrion; Biological process=metabolic process
  Homolog annotation: Hit_ID=Q9LEV3; Match level="QueryCoverage=100%, HitCoverage=100%, E-value=5e-96, Identity=87%"; Hit description =Uncharacterized protein At5g10860, mitochondrial precursor
  Pfam annotation: Domain name=CBS; Domain location=66-188; Score =102.9; E_value=9.6e-28; Accession=PF00571.18; Description=CBS domain
  Subcellular localization annotation: CTP_CleavageSite=38; ConfidenceScore=5.35e-01
MQAVIRSFVSGGNVVRSSLLQHLRVVNPAIQPSVLSTRSESTQPARMEEHGFESTTISDVMNAKGKSADGSWLWCTTDDSVYDAVKSMTQHNVGALVVVKPGEQQSLAGIITERDYLRKIIVQGRSSKSTKVGDIMTEENKLITVTPETKVLVAMQLMTDNRIRHIPVIKDKGMIGMVSIGDVVRRVVHEHREELQRLNAYIQGGY

SEQ ID NO: 10941 - protein, 167 aa, Zea mays
  misc_feature (138)..(138): Xaa can be any naturally occurring amino acid
  Coding DNA Sequence Number=SeqID_6977
  Gene Ontology: Mol. function=binding; Biological process =mitochondrion organization and biogenesis
  Homolog annotation: Hit_ID=Q9M1J1; Match level="QueryCoverage=83%, HitCoverage=82%, E-value=6e-45, Identity=62%"; Hit description =Putative uncharacterized protein F24I3.170
  Pfam annotation: Domain name=TPR_2; Domain location=90-123; Score =21.5; E_value=0.0031; Accession=PF07719.7; Description =Tetratricopeptide repeat
MDSKMGNFFDSIGSFFSGGDKIPWCDRDVILECEKEVKTATEGDSEDQKKESIMRLSWALVHSRQAEDIQRGIAMLEASLASSSPPLQDREKIYLLAVGYYRTGDYSRSRQLVERCLEVQPDWRQALALKKTIEDKLXKDGVIGIGITATAVGLIAGGIAAALARKK

SEQ ID NO: 10942 - protein, 201 aa, Zea mays
  misc_feature (54)..(54): Xaa can be any naturally occurring amino acid
  misc_feature (93)..(93): Xaa can be any naturally occurring amino acid
  misc_feature (180)..(180): Xaa can be any naturally occurring amino acid
  Coding DNA Sequence Number=SeqID_6978
  Gene Ontology: Mol. function=thioredoxin-disulfide reductase activity; Cellular component=cytoplasm; Biological process=removal of superoxide radicals
  Homolog annotation: Hit_ID=Q39242; Match level="QueryCoverage=91%, HitCoverage=47%, E-value=4e-59, Identity=70%"; Hit description =Thioredoxin reductase 2
  Pfam annotation: Domain name=Pyr_redox_2; Domain location=23-190; Score=4.0; E_value=1.4e-05; Accession=PF07992.4; Description =Pyridine nucleotide-disulphide oxidoreduc
NAPSLTSSASSSSPAAMETHKTKVCIVGSGPAAHTAAIYAARAELKPLLFEGWXMANDIAPGGQLTTTTDVENFPGFPEGILGIDIVEKFRKXQSERFGTKIFTETGNKGDFSSKPFKLFTDSRTVLADAGIISTGAVAKRLSFAGSGEGAGGFWNRGISAGAGCHRAAPIFRTSLWGVXSGGGDSGYGGGEFLTKYGSKG

SEQ ID NO: 10943 - protein, 186 aa, Zea mays
  Coding DNA Sequence Number=SeqID_6979
  Gene Ontology: Mol. function=protein domain specific binding; Cellular component=cytoplasm; Biological process=response to stress
  Homolog annotation: Hit_ID=P46077; Match level="QueryCoverage=98%, HitCoverage=69%, E-value=5e-89, Identity=91%"; Hit description=14-3 -3-like protein GF14 phi
  Pfam annotation: Domain name=14-3-3; Domain location=4-186; Score =283.6; E_value=4e-82; Accession=PF00244.10; Description=14-3-3 protein
MAAREEFVYLAKLAEQAERYEEMVEFMEKVAEGVELSVEERNLLSVAYKNVIGARRASWRIISSIEQKEESRGNDDHVTTIRDYRSKIESELSKICDGILKLLDSRLIPASSANGDSKVFYLKMKGDYHRYLAEFKTAQDRKDAAEHTLTAYKAAQDIATSELPPTHPIRLGLALNFSGFYYEIPH

SEQ ID NO: 10944 - protein, 182 aa, Zea mays
  misc_feature (108)..(108): Xaa can be any naturally occurring amino acid
  misc_feature (138)..(138): Xaa can be any naturally occurring amino acid
  misc_feature (166)..(166): Xaa can be any naturally occurring amino acid
  Coding DNA Sequence Number=SeqID_6980
  Gene Ontology: Mol. function=fructose-bisphosphate aldolase activity; Cellular component=cytoplasm; Biological process=metabolic process
  Homolog annotation: Hit_ID=O65581; Match level="QueryCoverage=97%, HitCoverage=48%, E-value=2e-78, Identity=87%"; Hit description =Fructose-bisphosphate aldolase
  Pfam annotation: Domain name=Glycolytic; Domain location=11-182; Score=69.4; E_value=1.2e-17; Accession=PF00274.9; Description =Fructose-bisphosphate aldolase class-I
MSAFVGKYADELIKTAKYIATPGKGILAADESTGTIGKRFSSINVENIESNRQALRELLFTSPGALPCLSGVILFEETLYQKTSDGKPFVEFLQENGVIPGIKVDKGXVVDLAGTNGETTTQGLDSLGARCQEYYKAXSQVGQIGVLSSQIGATEPSELSIQENAXKGLARYAIIAQEKRTG

SEQ ID NO: 10945 - protein, 168 aa, Zea mays
  misc_feature (135)..(135): Xaa can be any naturally occurring amino acid
  misc_feature (153)..(153): Xaa can be any naturally occurring amino acid
  Coding DNA Sequence Number=SeqID_6981
  Gene Ontology: Mol. function=nucleic acid binding; Cellular component= ribonucleoprotein complex; Biological process=nuclear mRNA splicing, via spliceosome
  Homolog annotation: Hit_ID=Q9SUN5; Match level="QueryCoverage=74%, HitCoverage=48%, E-value=2e-46, Identity=77%"; Hit description =Putative snRNP protein
  Pfam annotation: Domain name=LSM; Domain location=7-84; Score=68.6; E_ value=2.1e-17; Accession=PF01423.12; Description=LSM domain
MSMSKSSKMLQFINYRMRVTIQDGRQLVGKFMAFDRHMNLVLGDCEEFRKLPPGKGKKINEEREERRTLGLVLLRGEEVISMTVKGPPPPEESRAKAGSAAALAGPGVGRAAGRGVPTGPLVQAQPGLSGPVRGXVGGPSPGMMQPQISRAPXMRPPGQMLPPPPAFG

SEQ ID NO: 10946 - protein, 174 aa, Zea mays
  misc_feature (129)..(129): Xaa can be any naturally occurring amino acid
  misc_feature (150)..(150): Xaa can be any naturally occurring amino acid
  misc_feature (156)..(156): Xaa can be any naturally occurring amino acid
  misc_feature (174)..(174): Xaa can be any naturally occurring amino acid
  Coding DNA Sequence Number=SeqID_6982
  Gene Ontology: Mol. function=serine-type endopeptidase inhibitor activity; Cellular component=apoplast; Biological process=defense response
  Homolog annotation: Hit_ID=Q8GT65; Match level="QueryCoverage=98%, HitCoverage=43%, E-value=9e-52, Identity=63%"; Hit description =Serpin-like protein
  Subcellular localization annotation: CTP_CleavageSite=78; ConfidenceScore=5.14e-01
MDVRESISLQNHVSLSLAKNVISTVSKNSNVIFSPASINVVLGIIAAGSAGATKDQILSFLNFPSIDHLNTFSSDIVSAVLADGSANGGPKLSAANGVWIDKSLSFKPSFKQLLDGSYKAASNLADFQXRAVEVIAEVNSWAEKETNGLXTEVLPXEGSPDSLPRLIFANALYX

SEQ ID NO: 10947 - protein, 130 aa, Zea mays
  Coding DNA Sequence Number=SeqID_6983
  Gene Ontology: Mol. function=structural constituent of ribosome; Cellular component=ribonucleoprotein complex; Biological process =translation
  Homolog annotation: Hit_ID=Q43291; Match level="QueryCoverage=100%, HitCoverage=79%, E-value=8e-66, Identity=93%"; Hit description=60S ribosomal protein L21-1
  Pfam annotation: Domain name=Ribosomal_L21e; Domain location=2-100; Score=185.3; E_value=1.6e-52; Accession=PF01157.8; Description =Ribosomal protein L21e
MPAGHGVRARTRDLFARGFRKKGTIPLSTYLRTFKVGEYVDVKVNGAIHKGMPHKFYHGRTGRVWNVTKRAVGVEVNKQIGNRIIKKRLHVRVEHVQQSRCAEEFKLRIKKNDELKAAAKARGETISTKR

SEQ ID NO: 10948 - protein, 165 aa, Zea mays
  misc_feature (60)..(60): Xaa can be any naturally occurring amino acid
  misc_feature (78)..(78): Xaa can be any naturally occurring amino acid
  misc_feature (98)..(98): Xaa can be any naturally occurring amino acid
  misc_feature (104)..(104): Xaa can be any naturally occurring amino acid
  misc_feature (113)..(113): Xaa can be any naturally occurring amino acid
  misc_feature (117)..(117): Xaa can be any naturally occurring amino acid
  Coding DNA Sequence Number=SeqID_6984
  Gene Ontology: Mol. function=alpha-1,4-glucan-protein synthase (UDP -forming) activity; Cellular component=cellulose and pectin -containing cell wall; Biological process=cellulose biosynthetic process
  Homolog annotation: Hit_ID=O22428; Match level="QueryCoverage=93%, HitCoverage=40%, E-value=1e-66, Identity=85%"; Hit description =Reversibly glycosylated polypeptide-2
  Pfam annotation: Domain name=RGP; Domain location=13-166; Score=4.7; E_value=5.1e-10; Accession=PF03214.4; Description=Reversibly glycosylated polypeptide
MVEPANTVGIPLNHAALLKDELDIVIPTIRNLDFLEMWRPFLQPYHLIIVQDGDPSKTIXVPEGFDYELYNRNDINRXILGPKASCISFKDSACRCFXGYMVSXKKKYIFTIXDDDXCFRCQGSIWGKAVNALEQHIKNLLCPSSPLFFTTLYDPIPGRGAASPS

SEQ ID NO: 10949 - protein, 174 aa, Zea mays
  misc_feature (50)..(50): Xaa can be any naturally occurring amino acid
  misc_feature (162)..(162): Xaa can be any naturally occurring amino acid
  misc_feature (174)..(174): Xaa can be any naturally occurring amino acid
  Coding DNA Sequence Number=SeqID_6985
  Gene Ontology: Mol. function=nucleotide binding; Cellular component =nucleus; Biological process=small GTPase mediated signal transduction
  Homolog annotation: Hit_ID=P41916; Match level="QueryCoverage=98%, HitCoverage=76%, E-value=5e-91, Identity=92%"; Hit description=GTP -binding nuclear protein Ran-1
  Pfam annotation: Domain name=MMR_HSR1; Domain location=16-131; Score=- 5.3; E_value=0.0033; Accession=PF01926.13; Description=GTPase of unknown function
  Pfam annotation: Domain name=Miro; Domain location=17-131; Score =51.5; E_value=3e-12; Accession=PF08477.3; Description=Miro-like protein
  Pfam annotation: Domain name=Ras; Domain location=17-174; Score =175.7; E_value=1.2e-49; Accession=PF00071.12; Description=Ras family
  Pfam module annotation: Pfam domain module=MMR_HSR1::Miro::Ras; Domain location=16-131::17-131::17-174
SSMALPNQQTVDYPSFKLVIVGDGGTGKTTFVKRHLTGEFEKKYEPTIGXVEVHPLDFFTNCGKIRFYCWDTAGQEKFGGLRDGYYIHGQCAVIMFDVTARLTYKNVPTWHRDLCRVCENIPIVLCGNKVDVKNRQVKAQQVTFHRNRIPRAYEISAKSNYXFEKPFFVLARKX

SEQ ID NO: 10950 - protein, 168 aa, Zea mays
  Coding DNA Sequence Number=SeqID_6986
  Gene Ontology: Cellular component=anchored to membrane
  Homolog annotation: Hit_ID=A0T2P3; Match level="QueryCoverage=88%, HitCoverage=59%, E-value=9e-62, Identity=83%"; Hit description =Putative uncharacterized protein
  Pfam annotation: Domain name=Fasciclin; Domain location=49-167; Score= 50.7; E_value=5.1e-12; Accession=PF02469.12; Description=Fasciclin domain
MAITRLTLAPLLLIAAVILSTETSAQPAAPAPGPAGPINLTAILEKGGQFTTFIHLLKITQVGEQVNTQVNSSSEGMTVFAPTDNAFQNLQAGTLNKLSADEQVKLILYHVSPKFYTLDDLLSVSNPVRTQASGRGHGGFRLNFTGEANQVNVSTGYVETRVSNALRT

SEQ ID NO: 10951 - protein, 148 aa, Zea mays
  Coding DNA Sequence Number=SeqID_6987
  Gene Ontology: Mol. function=small conjugating protein ligase activity; Cellular component=cytosol; Biological process=regulation of protein metabolic process
  Homolog annotation: Hit_ID=P35132; Match level="QueryCoverage=100%, HitCoverage=100%, E-value=7e-83, Identity=97%"; Hit description=SUMO- conjugating enzyme UBC9
  Pfam annotation: Domain name=UQ_con; Domain location=5-142; Score =276.0; E_value=7.5e-80; Accession=PF00179.16; Description=Ubiquitin -conjugating enzyme
MASKRILKELKDLQKDPPTSCSAGPVAEDMFHWQATIMGPTDSPYAGGVFLVTIHFPPDYPFKPPKVAFRTKVFHPNINSNGSICLDILKEQWSPALTISKVLLSICSLLTDPNPDDPLVPEIAHMYKTDKNQYESTARSWTQKYAMG

SEQ ID NO: 10952 - protein, 169 aa, Zea mays
  misc_feature (147)..(147): Xaa can be any naturally occurring amino acid
  misc_feature (169)..(169): Xaa can be any naturally occurring amino acid
  Coding DNA Sequence Number=SeqID_6988
  Gene Ontology: Mol. function=methyltransferase activity; Biological process=porphyrin biosynthetic process
  Homolog annotation: Hit_ID=Q42606; Match level="QueryCoverage=99%, HitCoverage=46%, E-value=1e-51, Identity=64%"; Hit description =Urophorphyrin III methylase
  Subcellular localization annotation: CTP_CleavageSite=29; ConfidenceScore=5.38e-01
MALVQRIPSFSSNLRNWKNTNSTNHKPVSSLHYKTQITASSSPFTEKHSVERYQRDQWLYKASTPSPPSNQQDEVFVRENDIASQLPELKKLLEVLREKRESGCRGGDCGPGDVFLVGTGPGDPELLTLKAVRVIQSADLLLYDRLXSLRWCLELVAPDARLLYVGKTX

SEQ ID NO: 10953 - protein, 201 aa, Zea mays
  misc_feature (139)..(139): Xaa can be any naturally occurring amino acid
  misc_feature (167)..(167): Xaa can be any naturally occurring amino acid
  misc_feature (201)..(201): Xaa can be any naturally occurring amino acid
  Coding DNA Sequence Number=SeqID_6989
  Gene Ontology: Mol. function=serine carboxypeptidase activity; Cellular component=extracellular region; Biological process =proteolysis
  Homolog annotation: Hit_ID=Q9LEY1; Match level="QueryCoverage=99%, HitCoverage=41%, E-value=4e-89, Identity=82%"; Hit description =Serine carboxypeptidase-like 35 precursor
  Pfam annotation: Domain name=Peptidase_S10; Domain location=43-198; Score=-69.5; E_value=6.9e-11; Accession=PF00450.12; Description =Serine carboxypeptidase
MKKHALWLLCVLVLPAIAWGRNPEKKATTSSGRKEDDLVTGLPGQPPVNFRHYAGYVNLGPRQKQKALFYWFFEAQRNSSGRPLVLWLNGGPGCSSIAYGAAQELGPFLVRAGGDNLTFHKFSWNKEANMLFLEAPVGXVGFSYTNNSMDLHKLGDQVSAEDSLAFXLINWFMKFPEYGSHEFYIARREVTPGHYGPQLAX

SEQ ID NO: 10954 - protein, 202 aa, Zea mays
  misc_feature (202)..(202): Xaa can be any naturally occurring amino acid
  Coding DNA Sequence Number=SeqID_6990
  Gene Ontology: Mol. function=collagen binding; Cellular component =extracellular region; Biological process=peptide cross-linking
  Homolog annotation: Hit_ID=Q9LD84; Match level="QueryCoverage=99%, HitCoverage=45%, E-value=6e-50, Identity=56%"; Hit description=ATA20 protein
MAKGHQGKCFALVLLLCFFSSTLARRVLKDLSMMEMNHVVKPGMVSLSVQDHEMFNVESEHIVKPDHKLQSMPGEPEEPEDRIMPDRKMQSMPGEPEEPEDKVMPDHKLQSMPGEPEEPEDKIMPDHKLQSMPGEPEEPEDKVMPDHKLQSMPGEPEEPEDKVMPDHELQTMWGELEEPDPKTMLDHKEKPDHKVQSLASEX

SEQ ID NO: 10955 - protein, 184 aa, Zea mays
  misc_feature (123)..(124): Xaa can be any naturally occurring amino acid
  misc_feature (148)..(148): Xaa can be any naturally occurring amino acid
  misc_feature (153)..(153): Xaa can be any naturally occurring amino acid
  misc_feature (156)..(156): Xaa can be any naturally occurring amino acid
  misc_feature (182)..(182): Xaa can be any naturally occurring amino acid
  Coding DNA Sequence Number=SeqID_6991
  Homolog annotation: Hit_ID=Q8LAP7; Match level="QueryCoverage=99%, HitCoverage=53%, E-value=1e-44, Identity=57%"; Hit description =Putative uncharacterized protein
  Subcellular localization annotation: CTP_CleavageSite=86; ConfidenceScore=5.87e-01
MAGMLANSVLLPQPSIFLPVSSSRSSRSIRRTLVMVKASSKPSDSVSASTKSKSKSSDAVFTAPPGFKPPEPKRFAVKPGKLLDVLGAAIGVLLRLGAGVFVSGYSASFVSKDAIPADQYALXXGGITVKEPSKLGPRPEKPIEIYEXEGCPXLPXVGKMVHSAGILVFLYFPAPRGSPNFXPM

SEQ ID NO: 10956 - protein, 164 aa, Zea mays
  Coding DNA Sequence Number=SeqID_6992
EAELVMGRGRCRMVMCCEPNEFTEPRPYRPPALKRILFQQKRLAGLREGSQVSLEIQSDKSLKGTDQDQTTLVSGIDIQEKSSSDVVASTSKPQTPSSSLVGMKKTLGSQVSLLRCSACMQIIQSDKSLKGSSDQDQTTLVSQIDIQDQTTLVSQIDIQGKVVV

SEQ ID NO: 10957 - protein, 104 aa, Zea mays
  misc_feature (102)..(103): Xaa can be any naturally occurring amino acid
  Coding DNA Sequence Number=SeqID_6994
CILDRASQAVSSTTGLLHDKKQIFYRQQSCVPCPTEVLPSLLRCTAAASRLLSIPAPCAHDLLYLCKITNLQSLLLFPPLRCWKIIGLPFRFTNFMRLSNSXXS

SEQ ID NO: 10958 - protein, 196 aa, Zea mays
  misc_feature (171)..(171): Xaa can be any naturally occurring amino acid
  Coding DNA Sequence Number=SeqID_6996
  Gene Ontology: Mol. function=nucleotide binding; Cellular component =intracellular; Biological process=small GTPase mediated signal transduction
  Homolog annotation: Hit_ID=Q677H6; Match level="QueryCoverage=79%, HitCoverage=77%, E-value=7e-84, Identity=99%"; Hit description=ADP -ribosylation factor
  Pfam annotation: Domain name=Arf; Domain location=30-196; Score =395.3; E_value=9.4e-116; Accession=PF00025.11; Description=ADP -ribosylation factor family
  Pfam annotation: Domain name=MMR_HSR1; Domain location=43-154; Score =7.8; E_value=0.00021; Accession=PF01926.13; Description=GTPase of unknown function
  Pfam annotation: Domain name=Miro; Domain location=44-154; Score =20.4; E_value=0.00012; Accession=PF08477.3; Description=Miro-like protein
  Pfam annotation: Domain name=Ras; Domain location=44-175; Score= -57.2; E_value=4.7e-05; Accession=PF00071.12; Description=Ras family
  Pfam annotation: Domain name=SRPRB; Domain location=40-195; Score= -35.8; E_value=5.7e-05; Accession=PF00071.12; Description=Signal recognition particle receptor bet
  Pfam module annotation: Pfam domain module=Arf::MMR_HSR1::Miro::Ras::S RPRB; Domain location=30-196::43-154::44-154::44-175::40-195
  Subcellular localization annotation: CTP_CleavageSite=13; ConfidenceScore=5.01e-01
FIIVVASLLSFSRRSSGAEFKRKKKMGLSFAKLFSKLFAKKEMRILMVGLDAAGKTTILYKLKLGEIVTTIPTIGFNVETVEYKNISFTVWDVGGQDKIRPLWRHYFQNTQGLIFVVDSNDRDRVVEARDELHRMLNEDELRDAVLLVFANKQDLPNAMNAAEITDKLGLXSLRQRHWYIQSTCATSGEGLYEGLD

SEQ ID NO: 10959 - protein, 193 aa, Zea mays
  misc_feature (38)..(38): Xaa can be any naturally occurring amino acid
  Coding DNA Sequence Number=SeqID_6997
  Gene Ontology: Mol. function=protein binding; Cellular component =extracellular region; Biological process=response to DNA damage stimulus
  Homolog annotation: Hit_ID=Q9LT39; Match level="QueryCoverage=100%, HitCoverage=78%, E-value=9e-76, Identity=61%"; Hit description =Polygalacturonase inhibitor-like protein
  Pfam annotation: Domain name=LRRNT_2; Domain location=21-61; Score =38.9; E_value=1.8e-08; Accession=PF08263.3; Description=Leucine rich repeat N-terminal domain
  Pfam annotation: Domain name=LRR_1; Domain location=128-150; Score =7.1; E_value=15; Accession=PF00560.23; Description=Leucine Rich Repeat
  Pfam annotation: Domain name=LRR_1; Domain location=152-174; Score =9.7; E_value=4.8; Accession=PF00560.23; Description=Leucine Rich Repeat
  Pfam module annotation: Pfam domain module=LRRNT_2::LRR_1::LRR_1; Domain location=21-61::128-150::152-174
MKLNVAGSLLLLLISTATRCPPSDLRALLAFRAALHEXYLGIFNSWTRQDCCHNWYAVSCDAVTHRVADINLRGESEDPIFERAHRTGYMTGRISPAICDLARLSALTIADWERISGDIPRCITRLSFLRTIDLIGNRIPGEIPNDIGRLHRLAVLNVADNRISRFIPKCVTNLSSLMHLGRRHTLMNRVSPN

SEQ ID NO: 10960 - protein, 177 aa, Zea mays
  misc_feature (136)..(136): Xaa can be any naturally occurring amino acid
  misc_feature (177)..(177): Xaa can be any naturally occurring amino acid
  Coding DNA Sequence Number=SeqID_6998
  Gene Ontology: Biological process=response to desiccation
  Homolog annotation: Hit_ID=O80576; Match level="QueryCoverage=99%, HitCoverage=58%, E-value=6e-75, Identity=79%"; Hit description =Similar to late embryogenesis abundant proteins
  Pfam annotation: Domain name=DUF1511; Domain location=63-168; Score= -33.2; E_value=0.098; Accession=PF07427.2; Description=Protein of unknown function (DUF1511)
  Pfam annotation: Domain name=LEA_2; Domain location=26-177; Score =257.6; E_value=2.7e-74; Accession=PF03168.4; Description=Late embryogenesis abundant protein
  Pfam module annotation: Pfam domain module=DUF1511::LEA_2; Domain location=63-168::26-177
MSTSENKVEIVDRGHKEEEEKEEGKGGFLDKVKDFIHDIGEKIEGTIGFGKPTADVSAIHIPKINLERADIVVDVLVKNPNPVPIPLIDIDYLVESDGRKLVSGLIPDAGTIKAHGEETVKIPLTLIYDDIKSTYXDINPGMIIPYRIKVDPIVDVLVLGRLTLPLEGRGEIPIPQX

SEQ ID NO: 10961 - protein, 184 aa, Zea mays
  misc_feature (130)..(130): Xaa can be any naturally occurring amino acid
  misc_feature (135)..(135): Xaa can be any naturally occurring amino acid
  misc_feature (166)..(166): Xaa can be any naturally occurring amino acid
  misc_feature (175)..(175): Xaa can be any naturally occurring amino acid
  misc_feature (177)..(177): Xaa can be any naturally occurring amino acid
  misc_feature (180)..(181): Xaa can be any naturally occurring amino acid
  Coding DNA Sequence Number=SeqID_6999
  Gene Ontology: Mol. function=transcription regulator activity; Cellular component=nucleus; Biological process=regulation of transcription
  Homolog annotation: Hit_ID=Q8LD53; Match level="QueryCoverage=100%, HitCoverage=78%, E-value=4e-72, Identity=77%"; Hit description=BHLH transcription factor, putative
  Pfam annotation: Domain name=HLH; Domain location=72-123; Score=47.2; E_value=5.6e-11; Accession=PF00010.16; Description=Helix-loop-helix DNA-binding domain
  Subcellular localization annotation: CTP_CleavageSite=66; ConfidenceScore=5.07e-01
MVSPENANWISDLIDADYGSFTIQGPGFSWPVHQPLAVSSNSSAGVDGSAGNSEASKEPGSKKRARCESSSATSSKACREKQRRDRLNDKFTELSVILEPGNPPKTDKAAILVDAVRMVTQLRGEAQKVXGHHFXSFRDKIKELKTEKNELRDEKQRLKTEKEKLXQQLKAMNAXSXSFXXSSP

SEQ ID NO: 10962 - protein, 198 aa, Zea mays
  misc_feature (101)..(101): Xaa can be any naturally occurring amino acid
  Coding DNA Sequence Number=SeqID_7000
  Gene Ontology: Mol. function=transferase activity; Cellular component= cytoplasm; Biological process=response to stress
  Homolog annotation: Hit_ID=Q94II0; Match level="QueryCoverage=89%, HitCoverage=77%, E-value=4e-78, Identity=80%"; Hit description =Glutathione S-transferase
  Pfam annotation: Domain name=GST_N; Domain location=4-77; Score=66.7; E_value=7.7e-17; Accession=PF02798.10; Description=Glutathione S -transferase, N-terminal domain
MASDEVKVIGAWASPFVMRPRIALNLKSVPYEFLQETFGAKSELLLKSNPVHKKIPVLIHADKPVCESNIIVEYVDETWSASGPSMLPSTPYDRAIARFWXAAYIDEKWFPSLKVSLKAEGEEEKKAVLAQVEEGNALLEKAFNDCSKGKAFFNREHIRYLDIAFRCFLAWVKVTELAGVINFRWVRLLSVQWADRSV

SEQ ID NO: 10963 - protein, 164 aa, Zea mays
  Coding DNA Sequence Number=SeqID_7001
  Gene Ontology: Mol. function=protein transporter activity; Cellular component=mitochondrial inner membrane; Biological process=protein transport
  Homolog annotation: Hit_ID=Q2V409; Match level="QueryCoverage=98%, HitCoverage=92%, E-value=1e-77, Identity=90%"; Hit description =Uncharacterized protein At2g42210.2
  Pfam annotation: Domain name=Tim17; Domain location=12-141; Score =119.6; E_value=9.6e-33; Accession=PF02466.9; Description =Tim17Tim22Tim23 family
EGAMDPAEMRYLEEEDGPMMKTIKGSVTGFAAGTIYGTILATWKDVPRVERNVALPGLIRTLKMMGTHGLTFAAIGGVYIGVEQVVQGYRGKRDFFNGAIGGFVAGASVLGYRARSIPTAIAAGATLAVTSALIDSGGQTTRVDHGREYYPYAPVEKTAQAADA

SEQ ID NO: 10964 - protein, 181 aa, Zea mays
  misc_feature (175)..(175): Xaa can be any naturally occurring amino acid
  Coding DNA Sequence Number=SeqID_7002
  Gene Ontology: Mol. function=hydrolase activity; Cellular component =cellulose and pectin-containing cell wall
  Homolog annotation: Hit_ID=A7QFC7; Match level="QueryCoverage=93%, HitCoverage=92%, E-value=4e-57, Identity=59%"; Hit description =Chromosome undetermined scaffold_87, whole genome shotgun sequence
MMLSVIVAILVCLASYIYRSLKPPPPRVCGVPHGPPITSPRIKLSDGRYLAYRESGVDRANANHKIIVVHGFNNSKDMELPISKDLIEELGIYFLFFDRAGYGESDPHPTRTVKSEAYDIQELADKLNIGPKFYVIGLSVGAYSVYSCLKYIPHRLAGAVLVVPFVSYWWTKVPXDISSKA

SEQ ID NO: 10965 - protein, 148 aa, Zea mays
  Coding DNA Sequence Number=SeqID_7003
  Homolog annotation: Hit_ID=A2WMI6; Match level="QueryCoverage=58%, HitCoverage=37%, E-value=1e-30, Identity=68%"; Hit description =Putative uncharacterized protein
  Subcellular localization annotation: CTP_CleavageSite=6; ConfidenceScore=5.28e-01
MASSISSMSTRFCFILNNNGSHKPNPWLYQPSLSSNSLIFYSKHHPHRRPLSSSSQIPVVETDEGDDQDGLTFSGCSGCGKEVKENGCNGDGRIQGGIATVPGFGWWPIKAYRPCPGFVEAGGRYRRIGQSMDEVAFGRGDSKSSTDS

SEQ ID NO: 10966 - protein, 133 aa, Zea mays
  Coding DNA Sequence Number=SeqID_7004
  Gene Ontology: Mol. function=DNA binding; Cellular component =chromosome; Biological process=nucleosome assembly
  Homolog annotation: Hit_ID=Q53NE3; Match level="QueryCoverage=100%, HitCoverage=79%, E-value=7e-56, Identity=85%"; Hit description =Histone H3-maize
  Pfam annotation: Domain name=CBFD_NFYB_HMF; Domain location=64-129; Score=2.9; E_value=0.086; Accession=PF00808.13; Description=Histone -like transcription factor (CBFNF-Y) and archaeal histone
  Pfam annotation: Domain name=Histone; Domain location=58-132; Score =129.6; E_value=8.9e-36; Accession=PF00125.14; Description=Core histone H2AH2BH3H4
  Pfam module annotation: Pfam domain module=CBFD_NFYB_HMF::Histone; Domain location=64-129::58-132
  Subcellular localization annotation: CTP_CleavageSite=53; ConfidenceScore=5.45e-01
MARTKQTARKSTGGKAPRKQLATKAARKSAPATGGVKKPHRFRPGTVALREIRKYQKSTELLIRKLPFQRLVREIAQDFQTDLRVQSSAVAALQEAAEAYLVGLFEDTNLCAIHAKGVTIMPKDIQLARRIRG

SEQ ID NO: 10967 - protein, 198 aa, Zea mays
  misc_feature (190)..(190): Xaa can be any naturally occurring amino acid
  Coding DNA Sequence Number=SeqID_7005
  Gene Ontology: Mol. function=glutathione dehydrogenase (ascorbate) activity; Cellular component=cytoplasm; Biological process=tRNA aminoacylation for protein translation
  Homolog annotation: Hit_ID=Q8LB28; Match level="QueryCoverage=100%, HitCoverage=92%, E-value=3e-81, Identity=74%"; Hit description=GSH -dependent dehydroascorbate reductase 1, putative
  Pfam annotation: Domain name=GST_C; Domain location=98-191; Score =12.1; E_value=0.0056; Accession=PF00043.15; Description=Glutathione S-transferase, C-terminal domain
  Pfam annotation: Domain name=GST_N; Domain location=15-82; Score =23.6; E_value=0.00073; Accession=PF02798.10; Description=Glutathione S-transferase, N-terminal domain
  Pfam module annotation: Pfam domain module=GST_C::GST_N; Domain location=98-191::15-82
MALEVCVKAAVGAPDALGDCPFSQRVLLTLEEKNLPYKMHLINISDKPQWFLAISPEGKVPVLKNDDQWVSDSDVITGILEEKYPEPSLKTPPELASVGSKIFGTFVTFLKSKDSSDGSEKALLDELEALETHLKTHDGPFIAGGKVSAVDLSLAPKLYHLKVALGHYKSWSVPESLPHVHGYLEALVSXLDSFEKTR

SEQ ID NO: 10968 - protein, 144 aa, Zea mays
  Coding DNA Sequence Number=SeqID_7006
  Gene Ontology: Mol. function=protein binding; Cellular component=Cul3- RING ubiquitin ligase complex
  Homolog annotation: Hit_ID=A7Q3S6; Match level="QueryCoverage=95%, HitCoverage=49%, E-value=9e-33, Identity=48%"; Hit description =Chromosome chr13 scaffold_48, whole genome shotgun sequence
  Pfam annotation: Domain name=BTB; Domain location=19-125; Score=82.2; E_value=1.7e-21; Accession=PF00651.21; Description=BTBPOZ domain
MSEAAAQKAAFLGGLVVSFKEQMHTDVLVHPGDQSPPIPTHKAILSSRSKVFRNMLDSDECKASAEESITLPDLNHDELHSLLEFLYSGNLIAPYNQYRALYLAADKYDIAYLQDVCRDHFIASLTSRNVLDILELASIPSDTI

SEQ ID NO: 10969 - protein, 130 aa, Zea mays
  Coding DNA Sequence Number=SeqID_7007
  Gene Ontology: Mol. function=structural constituent of ribosome; Cellular component=ribonucleoprotein complex; Biological process =translation
  Homolog annotation: Hit_ID=Q8LPJ7; Match level="QueryCoverage=63%, HitCoverage=61%, E-value=1e-31, Identity=80%"; Hit description=40S ribosomal protein S26-2
  Pfam annotation: Domain name=Ribosomal_S26e; Domain location=1-114; Score=237.2; E_value=3.7e-68; Accession=PF01283.9; Description =Ribosomal protein S26e
MTFKRRNGGRNKHNRGHVKPIRCSNCGKCCPKDKAIKRFIVRNIVEQAAIRDVQEASVYDGYTLPKLYAKTQYCVSCAIHSHVVRVRSRTNRRVRTPPPRFVRRKEDAPKPGQPGQAARPAGGAPAAPRA

SEQ ID NO: 10970 - protein, 158 aa, Zea mays
  misc_feature (115)..(115): Xaa can be any naturally occurring amino acid
  Coding DNA Sequence Number=SeqID_7008
  Gene Ontology: Mol. function=lactoylglutathione lyase activity; Cellular component=cytoplasm; Biological process=carbohydrate metabolic process
  Homolog annotation: Hit_ID=Q39366; Match level="QueryCoverage=97%, HitCoverage=94%, E-value=8e-67, Identity=65%"; Hit description =Putative lactoylglutathione lyase
  Pfam annotation: Domain name=Glyoxalase; Domain location=17-140; Score=102.8; E_value=1.1e-27; Accession=PF00903.15; Description =GlyoxalaseBleomycin resistance proteinDioxygenase superfamily
MAENADLVEWPKKDKRRFLHVVYRVGDLDRTIQFYTECFGMKVLRKRDVPEEKYSNAFLGFGPETSNFVVELTYNYGVSSYDIGTGFGHFAISTQDVSKMVEAVRAKGGNVPREXSGPVKGGEQGPLPLAKDPDGYTFWSLTTERSTPLEPSLQRKVS

SEQ ID NO: 10971 - protein, 166 aa, Zea mays
  misc_feature (100)..(100): Xaa can be any naturally occurring amino acid
  misc_feature (113)..(113): Xaa can be any naturally occurring amino acid
  misc_feature (124)..(124): Xaa can be any naturally occurring amino acid
  misc_feature (131)..(131): Xaa can be any naturally occurring amino acid
  Coding DNA Sequence Number=SeqID_7009
  Homolog annotation: Hit_ID=Q9SL69; Match level="QueryCoverage=96%, HitCoverage=61%, E-value=7e-53, Identity=69%"; Hit description =Expressed protein
MGDEKPTVVMANRERDLELLMPVADKEEGSTSKPSSSSSSHHQASHETLSLFIRGWASKKFMTGCVILLPIAITFYITWWFIHFVDGFFSPIYAQLGINXFGFGFLTSSAFIXLGSGCSCPQWXGASVLTXGEWFIKRDAILFVTSYNASKQFSTALSPPQLHNHA

SEQ ID NO: 10972 - protein, 170 aa, Zea mays
  Coding DNA Sequence Number=SeqID_7010
  Gene Ontology: Mol. function=protein binding; Cellular component =cytoplasm; Biological process=mitotic cell cycle G2/M transition DNA damage checkpoint
  Homolog annotation: Hit_ID=Q9FH77; Match level="QueryCoverage=92%, HitCoverage=28%, E-value=8e-53, Identity=66%"; Hit description =Arabidopsis thaliana genomic DNA, chromosome 5, TAC clone:K9E15
MASESSQSSSPSPGDTFIGSFISLISKSEIRYEGILYHLNVHDSTLGLKKVRSCGTEGRKKDGPQVPPSDAVYDYILFRGSDIKDLQVNPSPSVQSRKDIQSEKDISQSSQSRPAVSSPPTGYEEGLWVWGEEGQWVHTPALTSNPVPTTLHSPVPFREGGSLTESPASM

SEQ ID NO: 10973 - protein, 193 aa, Zea mays
  misc_feature (61)..(61): Xaa can be any naturally occurring amino acid
  misc_feature (178)..(178): Xaa can be any naturally occurring amino acid
  Coding DNA Sequence Number=SeqID_7011
  Gene Ontology: Mol. function=3-deoxy-manno-octulosonate cytidylyltransferase activity; Cellular component=cytoplasm; Biological process=lipopolysaccharide biosynthetic process
  Homolog annotation: Hit_ID=A7P1L5; Match level="QueryCoverage=69%, HitCoverage=45%, E-value=1e-56, Identity=76%"; Hit description =Chromosome chr19 scaffold_4, whole genome shotgun sequence
  Pfam annotation: Domain name=CTP_transf_3; Domain location=23-193; Score=-33.7; E_value=0.00074; Accession=PF02348.9; Description =Cytidylyltransferase
SRGGIPQQNAETWRDFQGTSDVYRAKASSSVVGTQKIESLIQKRKPKFDTNKLQQVATDDXRIVDCCRGVGADVIMTSESCRNGTELCSEAIENLEKKYDVVLNIQGDEQLIEPVIIDSIVKALQVAPDAVFSTAVTSLKPEDGDDPNRVKCVVDNRGYTVYISSGLVPYNTSGNVNXRFPYMLHLEIQLRHL

SEQ ID NO: 10974 - protein, 198 aa, Zea mays
  misc_feature (131)..(131): Xaa can be any naturally occurring amino acid
  misc_feature (178)..(178): Xaa can be any naturally occurring amino acid
  Coding DNA Sequence Number=SeqID_7012
  Gene Ontology: Mol. function=oxidoreductase activity; Cellular component=integral to membrane; Biological process=metabolic process
  Homolog annotation: Hit_ID=Q3E9X4; Match level="QueryCoverage=94%, HitCoverage=58%, E-value=4e-80, Identity=82%"; Hit description =Uncharacterized protein At4g23430.2
  Pfam annotation: Domain name=KR; Domain location=31-190; Score=-95.2; E_value=0.08; Accession=PF08659.1; Description=KR domain
  Pfam annotation: Domain name=adh_short; Domain location=30-182; Score= 23.3; E_value=3.6e-07; Accession=PF00106.15; Description=short chain dehydrogenase
  Pfam module annotation: Pfam domain module=KR::adh_short; Domain location=31-190::30-182
MWFFGKKGASGFSARSTAEEVTHGVDGTGLTAIVTGASSGIGVETARVLALRGVHVVMAVRNTGSGAKVKEDIVNRVPGAKLDVMELDLSSMDSVRKFASDYKSSGRPLNLLVNNAGIMACPFMLSKDNIXELQFAPNHLGHFLLTKLLLDTMKNTSRESKREGRIVNLSSEAHRYSXPEGAPFHMISGEEPGLPVIP

SEQ ID NO: 10975 - protein, 184 aa, Zea mays
  misc_feature (90)..(90): Xaa can be any naturally occurring amino acid
  misc_feature (97)..(97): Xaa can be any naturally occurring amino acid
  misc_feature (112)..(112): Xaa can be any naturally occurring amino acid
  misc_feature (129)..(129): Xaa can be any naturally occurring amino acid
  misc_feature (168)..(168): Xaa can be any naturally occurring amino acid
  Coding DNA Sequence Number=SeqID_7013
  Gene Ontology: Mol. function=lactoylglutathione lyase activity; Biological process=carbohydrate metabolic process
  Homolog annotation: Hit_ID=A2Y228; Match level="QueryCoverage=73%, HitCoverage=19%, E-value=8e-39, Identity=65%"; Hit description =Putative uncharacterized protein
  Pfam annotation: Domain name=Glyoxalase; Domain location=83-184; Score=4.5; E_value=0.036; Accession=PF00903.15; Description =GlyoxalaseBleomycin resistance proteinDioxygenase superfamily
  Subcellular localization annotation: CTP_CleavageSite=66; ConfidenceScore=5.87e-01
MRIISMASTIRPSLLGCVSASPRFPVVSRNLSRSTLSFSHVTQSKLLTLRRSVSCLGVAESGNASTAATEEDLLKWVKDDNRRMLHVVYXRVGDLDXRTIKFYTECLGMKLXLRKRDIPEEKYTNAFPXGMGPKDSHFVIELTYNYGGDKYDIGAGFGHFGYGWSTMXAKTVELYKAKGGKVTR

SEQ ID NO: 10976 - protein, 184 aa, Zea mays; identical to SEQ ID NO: 10975
  misc_feature (90)..(90): Xaa can be any naturally occurring amino acid
  misc_feature (97)..(97): Xaa can be any naturally occurring amino acid
  misc_feature (112)..(112): Xaa can be any naturally occurring amino acid
  misc_feature (129)..(129): Xaa can be any naturally occurring amino acid
  misc_feature (168)..(168): Xaa can be any naturally occurring amino acid
  Coding DNA Sequence Number=SeqID_7014
  Gene Ontology: Mol. function=lactoylglutathione lyase activity; Biological process=carbohydrate metabolic process
  Homolog annotation: Hit_ID=A2Y228; Match level="QueryCoverage=73%, HitCoverage=19%, E-value=8e-39, Identity=65%"; Hit description =Putative uncharacterized protein
  Pfam annotation: Domain name=Glyoxalase; Domain location=83-184; Score=4.5; E_value=0.036; Accession=PF00903.15; Description =GlyoxalaseBleomycin resistance proteinDioxygenase superfamily
  Subcellular localization annotation: CTP_CleavageSite=66; ConfidenceScore=5.87e-01

SEQ ID NO: 10977 - protein, 193 aa, Zea mays
  Coding DNA Sequence Number=SeqID_7015
  Gene Ontology: Mol. function=structural constituent of ribosome; Cellular component=ribonucleoprotein complex; Biological process =translation
  Homolog annotation: Hit_ID=P41127; Match level="QueryCoverage=95%, HitCoverage=89%, E-value=2e-84, Identity=84%"; Hit description=60S ribosomal protein L13-1
  Pfam annotation: Domain name=Ribosomal_L13e; Domain location=5-183; Score=486.5; E_value=3.4e-143; Accession=PF01294.8; Description =Ribosomal protein L13e
  Subcellular localization annotation: CTP_CleavageSite=37; ConfidenceScore=5.47e-01
MKHNNVIPNGHFKKHWQNYVKTWFNQPARKTRRRVARQKKAVKIFPRPTAGPLRPVVHGQTLKYNMKVRTGKGFTLEELKAAGIPKKLAPTIGISLDHRRKNRSLEGLQSNVQRLKTYKAKLVIFPRRARKVKAGDSTAEELANATQVQGDYMPIVREKQATELVKLTSEMKSVNAYDKIRLERHKQGDMPGC

SEQ ID NO: 10978 - protein, 178 aa, Zea mays
  misc_feature (70)..(70): Xaa can be any naturally occurring amino acid
  misc_feature (95)..(95): Xaa can be any naturally occurring amino acid
  misc_feature (106)..(106): Xaa can be any naturally occurring amino acid
  Coding DNA Sequence Number=SeqID_7016
  Gene Ontology: Mol. function=structural constituent of ribosome; Cellular component=ribonucleoprotein complex; Biological process =translation
  Homolog annotation: Hit_ID=P41127; Match level="QueryCoverage=74%, HitCoverage=62%, E-value=8e-49, Identity=77%"; Hit description=60S ribosomal protein L13-1
  Pfam annotation: Domain name=Ribosomal_L13e; Domain location=5-174; Score=271.8; E_value=1.4e-78; Accession=PF01294.8; Description =Ribosomal protein L13e
  Subcellular localization annotation: CTP_CleavageSite=37; ConfidenceScore=5.47e-01
MKHNNVIPNGHFKKHWQNYVKTWFNQPARKTRRRVARQKKAVKIFPRPTAGPLRPVVHGQTLKYNMKVRXTGKGFTLEELKAAGIPKKLAPTIGXISVDHRRKNRXLSRGLQSNVQRLKTYKGLSWSSFPRRARKVQRLVILLLRRVGHCHSRSQGTPCPLWSVRSTQMKLCEADPLR

SEQ ID NO: 10979 - protein, 215 aa, Zea mays
  misc_feature (151)..(151): Xaa can be any naturally occurring amino acid
  misc_feature (202)..(202): Xaa can be any naturally occurring amino acid
  misc_feature (210)..(211): Xaa can be any naturally occurring amino acid
  misc_feature (215)..(215): Xaa can be any naturally occurring amino acid
  Coding DNA Sequence Number=SeqID_7017
  Gene Ontology: Mol. function=L-ascorbate peroxidase activity; Cellular component=cytoplasm; Biological process=hydrogen peroxide catabolic process
  Homolog annotation: Hit_ID=Q05431; Match level="QueryCoverage=89%, HitCoverage=76%, E-value=1e-101, Identity=90%"; Hit description=L -ascorbate peroxidase 1, cytosolic
  Pfam annotation: Domain name=peroxidase; Domain location=19-215; Score=154.9; E_value=2.3e-43; Accession=PF00141.13; Description =Peroxidase
MTKNYPAVSEEYQKAIEKCKRKLRGLIAEKNCAPIMVRLAWHSAGTFDCASRTGGPFGTMRFDDELAHGANNGLHIALRLLEPIREQFPTISHADFHQLAGVVAVEVTGGPEIPFHPGREDKPQPPPEGRLPDATKGCDHLRQVFLKQMGXLTDQDIVALSGAHTLGRCHKDRSGFEGAWTSNPLIFDNSYFKELLSGEKEXLLRLSLTXXLLDX

SEQ ID NO: 10980 - protein, 198 aa, Zea mays
  misc_feature (1)..(22): Xaa can be any naturally occurring amino acid
  Coding DNA Sequence Number=SeqID_6458
  Pfam annotation: Domain name=zf-CCHC; Domain location=139-156; Score =28.5; E_value=2.5e-05; Accession=PF00098.13; Description=Zinc knuckle
XXXXXXXXXXXXXXXXXXXXXXRLCNLVSLSLLPSDQMMNPNGNEVDDANDNIPTLTTMNERNESPRYSMNGMKNNKRNRKMFGYMISPPQPQAKAPKHMDTQMEESSQAQLHEIQTRNQPSPPVGQAKLTRKELKARGACYYCKNEGHLIRECPKKRLDRLEKKAAKHDLSNSSEDPPFYKYDDEGRLISIHCGAKK

SEQ ID NO: 10981 - protein, 171 aa, Zea mays
  misc_feature (47)..(47): Xaa can be any naturally occurring amino acid
  misc_feature (94)..(94): Xaa can be any naturally occurring amino acid
  misc_feature (112)..(113): Xaa can be any naturally occurring amino acid
  misc_feature (116)..(116): Xaa can be any naturally occurring amino acid
  misc_feature (121)..(135): Xaa can be any naturally occurring amino acid
  misc_feature (137)..(171): Xaa can be any naturally occurring amino acid
  Coding DNA Sequence Number=SeqID_6460
  Subcellular localization annotation: CTP_CleavageSite=53; ConfidenceScore=5.67e-01
YSHGPSGLNLMFPLPAASRGQVPLFRLQCTLLNAPGSPAVSKPAAGXLTQGPRRASAWRGSRLAALRISSHLCSRAWPNGARKQRGICRPEEGXAGHLFHRGSSRCNTSLSXXGRXSKQIXXXXXXXXXXXXXXXYXXXXXXXXXXXXXXXXXXXXXXXXXXXXXXXXXXX

SEQ ID NO: 10982 - protein, 123 aa, Zea mays
  misc_feature (64)..(64): Xaa can be any naturally occurring amino acid
  Coding DNA Sequence Number=SeqID_6462
  Subcellular localization annotation: CTP_CleavageSite=65; ConfidenceScore=5.19e-01
AVVRCGGGGRRRWRLWSRGPCSSCSWASLSSQLLSTPAPSSAPPRPLRSYCPLRAPDRPIPSGXKVQMVPVFTNRVSRTYRAKISDSSRSRGLMCVLWNTMRYVPCHGGAYFSSLKSLDSSRA

SEQ ID NO: 10983 - protein, 123 aa, Zea mays; identical to SEQ ID NO: 10982
  misc_feature (64)..(64): Xaa can be any naturally occurring amino acid
  Coding DNA Sequence Number=SeqID_6463
  Subcellular localization annotation: CTP_CleavageSite=65; ConfidenceScore=5.19e-01

SEQ ID NO: 10984 - protein, 147 aa, Zea mays
  misc_feature (113)..(147): Xaa can be any naturally occurring amino acid
  Coding DNA Sequence Number=SeqID_6464
PARIRARGCFPPTFGAGGSALGNLKKPRASSGIIRIHLGKGRQRKRWKKPWVGIKRGKLGGPRGLSPQNPGGGAKKGGAPQLGAKTLREQRGGGGEPPPSPFKPPRGGGELGXXXXXXXXXXXXXXXXXXXXXXXXXXXXXXXXXXX

SEQ ID NO: 10985 - protein, 186 aa, Zea mays
  misc_feature (89)..(89): Xaa can be any naturally occurring amino acid
  misc_feature (166)..(186): Xaa can be any naturally occurring amino acid
  Coding DNA Sequence Number=SeqID_6466
YMLETLQVHMVKEISGEVYLFLLLPYVRSSLQSARELLPWPAPVRPQFPRPVAQPPTFDVHRGGRRHHDRGWAPASWAAARRTRQRLAXARGPGCLKGFQPWSTRWGSPKGNPDFSGSISKPGTPQWGPPPPPWAPPKPKPIPGVPPSPPLLGPGEKVFFARPYKXXXXXXXXXXXXXXXXXXXXX

SEQ ID NO: 10986 - protein, 82 aa, Zea mays
  misc_feature (20)..(20): Xaa can be any naturally occurring amino acid
  Coding DNA Sequence Number=SeqID_6468
  Gene Ontology: Mol. function=protein transporter activity; Cellular component=nuclear pore; Biological process=protein import into nucleus, docking
  Homolog annotation: Hit_ID=A2Z8J6; Match level="QueryCoverage=79%, HitCoverage=8%, E-value=4e-17, Identity=69%"; Hit description =Putative uncharacterized protein
IGYGICRSVRAVEEIQTLYXQHKQSCFLYLSRESSLSFYIFGSNPSCEGYLTSLIQILFVHTVQLLRMIQDFTARPGASSRN

SEQ ID NO: 10987 - protein, 74 aa, Zea mays
  Coding DNA Sequence Number=SeqID_6469
  Homolog annotation: Hit_ID=A3BK53; Match level="QueryCoverage=68%, HitCoverage=10%, E-value=1e-19, Identity=88%"; Hit description =Putative uncharacterized protein
  Subcellular localization annotation: CTP_CleavageSite=35; ConfidenceScore=5.10e-01
FFFFFFFFKQISSFINNGSVCCRKGIEVNLWDITSSSKTWSAKSPRANSLGIFTRPWFTAGTFLCKNDHRKIVA

SEQ ID NO: 10988 - protein, 54 aa, Zea mays
  misc_feature (10)..(10): Xaa can be any naturally occurring amino acid
  misc_feature (14)..(14): Xaa can be any naturally occurring amino acid
  misc_feature (18)..(18): Xaa can be any naturally occurring amino acid
  Coding DNA Sequence Number=SeqID_6470
RYSCAHARWXVHCXHKEXRRSITPFVIVSIIKNKNPACTYVRPAWDDVGYSSRW

SEQ ID NO: 10989 - protein, 137 aa, Zea mays
  misc_feature (30)..(30): Xaa can be any naturally occurring amino acid
  Coding DNA Sequence Number=SeqID_6472
  Gene Ontology: Mol. function=oxidoreductase activity, acting on NADH or NADPH; Cellular component=mitochondrial respiratory chain; Biological process=mitochondrial electron transport, NADH to ubiquinone
  Homolog annotation: Hit_ID=A2ZXB2; Match level="QueryCoverage=53%, HitCoverage=47%, E-value=1e-11, Identity=58%"; Hit description =Putative uncharacterized protein
MALLPRTARLALLSTPRAYSAAAAAGASPXPQRHTGAPPHRGWSKTAEFVVSKVDDLMNWPRKGSIWGMTFGPRLLRRWKWIARPGRSRYDFPTGFGGIFPSRRRCRSDWHDPSPATLHQKRRLPTPSRKGLMDQRG

SEQ ID NO: 10990 - protein, 137 aa, Zea mays; identical to SEQ ID NO: 10989
  misc_feature (30)..(30): Xaa can be any naturally occurring amino acid
  Coding DNA Sequence Number=SeqID_6473
  Gene Ontology: Mol. function=oxidoreductase activity, acting on NADH or NADPH; Cellular component=mitochondrial respiratory chain; Biological process=mitochondrial electron transport, NADH to ubiquinone
  Homolog annotation: Hit_ID=A2ZXB2; Match level="QueryCoverage=53%, HitCoverage=47%, E-value=1e-11, Identity=58%"; Hit description =Putative uncharacterized protein

SEQ ID NO: 10991 - protein, 110 aa, Zea mays
  misc_feature (92)..(98): Xaa can be any naturally occurring amino acid
  misc_feature (102)..(109): Xaa can be any naturally occurring amino acid
  Coding DNA Sequence Number=SeqID_6474
AGGGRPAQQSGGVGRGDGEIFVSAEPATPARLCGGDAAAGDSPGQRQQLSPGLLDHHACDTELIPDFQVPGMYDGAQKLGYGGSLDESDMRXXXXXXXSKSXXXXXXXXI

SEQ ID NO: 10992 - protein, 99 aa, Zea mays
  misc_feature (80)..(99): Xaa can be any naturally occurring amino acid
  Coding DNA Sequence Number=SeqID_6476
  Subcellular localization annotation: CTP_CleavageSite=61; ConfidenceScore=5.06e-01
CVHELHLTKQVGGGDPFVYHLPHLLLLGPLPSPSWTRAVTECMGRGGGRSHPMGSGCRSVTCAAAPARPEGRGRSWPSLXXXXXXXXXXXXXXXXXXXX

SEQ ID NO: 10993 - protein, 93 aa, Zea mays
  misc_feature (36)..(36): Xaa can be any naturally occurring amino acid
  misc_feature (93)..(93): Xaa can be any naturally occurring amino acid
  Coding DNA Sequence Number=SeqID_6478
  Gene Ontology: Mol. function=transferase activity, transferring glycosyl groups; Cellular component=integral to membrane; Biological process=protein amino acid glycosylation
  Homolog annotation: Hit_ID=Q8W0S0; Match level="QueryCoverage=90%, HitCoverage=12%, E-value=9e-28, Identity=73%"; Hit description =Putative galactosyltransferase family
LEYSTLGCRSVSSPSSDDAWALNLTAWEDAAAFAGXPWALLAAATSHASDAAKCPSAVSQRARGRVVFLPCGLAAGSSVTVVGTPRAAHREYX

SEQ ID NO: 10994 - protein, 102 aa, Zea mays
  misc_feature (1)..(9): Xaa can be any naturally occurring amino acid
  misc_feature (49)..(50): Xaa can be any naturally occurring amino acid
  misc_feature (54)..(54): Xaa can be any naturally occurring amino acid
  misc_feature (57)..(57): Xaa can be any naturally occurring amino acid
  misc_feature (79)..(79): Xaa can be any naturally occurring amino acid
  misc_feature (89)..(90): Xaa can be any naturally occurring amino acid
  misc_feature (92)..(92): Xaa can be any naturally occurring amino acid
  Coding DNA Sequence Number=SeqID_6479
  Subcellular localization annotation: CTP_CleavageSite=58; ConfidenceScore=5.44e-01
XXXXXXXXXCSTYCSSSNALRCDALAKSSLTPSLCAAFLRCRQNPCMCXXRASXVVXRQEAKSTCMHAQLHLGFSQDRXVVIVQVMWCXXQXAVGGRPEEWT

SEQ ID NO: 10995 - protein, 107 aa, Zea mays
  misc_feature (1)..(1): Xaa can be any naturally occurring amino acid
  Coding DNA Sequence Number=SeqID_6481
  Gene Ontology: Mol. function=transferase activity; Cellular component= transcription factor complex; Biological process=positive regulation of transcription, DNA-dependent
  Homolog annotation: Hit_ID=A2WSM9; Match level="QueryCoverage=69%, HitCoverage=8%, E-value=1e-33, Identity=90%"; Hit description =Putative uncharacterized protein
XAQMRDLSGFVETRQQLLSLKPNHHMNWIGFAVAHHLNFDSSKAVEVLEAYEGTLEDDYPPENERYEHNEMLLYKYDRHFATKYELGKEVGRDHFGHTCSHAPARET

SEQ ID NO: 10996 - protein, 103 aa, Zea mays
  misc_feature (1)..(41): Xaa can be any naturally occurring amino acid
  misc_feature (45)..(46): Xaa can be any naturally occurring amino acid
  Coding DNA Sequence Number=SeqID_6482
XXXXXXXXXXXXXXXXXXXXXXXXXXXXXXXXXXXXXXXXXHPRXXPSPPSLCLRAIATVAAKLGLWNANFIFLDGVIPGFRRQTECKPCTCQDQKFTYTSIT

SEQ ID NO: 10997 - protein, 82 aa, Zea mays
  misc_feature (1)..(2): Xaa can be any naturally occurring amino acid
  Coding DNA Sequence Number=SeqID_6484
XXFFFFFFRNEYISTYKEYGSSFILSIMPQEIWWDRTRSGCSIKAGLVNRKIKGIYGAGIHLLFKLTRGSLSHGSPPFPRPN

SEQ ID NO: 10998 - protein, 98 aa, Zea mays
  Coding DNA Sequence Number=SeqID_6486
IPNLRLKKTKDKTPWSTAIGFRQVPCTTYSIDSHMYVDDGKGVTYFASHGRVWLDGNHLPCRYRLFPRSHVFRCPVLFSCGHRFFITSHCLIHAVWKS

SEQ ID NO: 10999 - protein, 102 aa, Zea mays
  Coding DNA Sequence Number=SeqID_6488
  Subcellular localization annotation: CTP_CleavageSite=36; ConfidenceScore=5.17e-01
HLNVCILHCSLAAGPPNRAGESLKPTRRQVTPRQLSCSEGKGQRPHPGPSDLARGSRRRRPRPRVYPNPYQWKTGVGWNRWDGGGRGRERDYLELWRAGGEY

SEQ ID NO: 11000 - protein, 77 aa, Zea mays
  misc_feature (59)..(60): Xaa can be any naturally occurring amino acid
  misc_feature (68)..(71): Xaa can be any naturally occurring amino acid
  misc_feature (73)..(75): Xaa can be any naturally occurring amino acid
  Coding DNA Sequence Number=SeqID_6489
  Subcellular localization annotation: CTP_CleavageSite=23; ConfidenceScore=5.60e-01
NGSRDGSFGPCASHGGWIRRRSTAGTRTSPGGRRRSGAGLWFTGPSVSALGLWFTGRSXXMADQISPXXXXAXXXAA

SEQ ID NO: 11001 - protein, 118 aa, Zea mays
  Coding DNA Sequence Number=SeqID_6490
  Subcellular localization annotation: CTP_CleavageSite=29; ConfidenceScore=5.00e-01
PLSSPPLPRDFAPSPLETPLRLLSHRTLRFQIHSPLSLPSPLGFCQHGRRYRSEAPLPSCLLVLPLCDPPPWCCPGVVIAAVPSHHRDGFQGGARRGGDRLRTSGVTEDGEDTCEGAL

SEQ ID NO: 11002 - protein, 66 aa, Zea mays
  Coding DNA Sequence Number=SeqID_6492
  Homolog annotation: Hit_ID=Q7XIG6; Match level="QueryCoverage=71%, HitCoverage=10%, E-value=1e-12, Identity=72%"; Hit description =Putative uncharacterized protein OJ1339_F05.121-1
VIKEGEKKDNYIGPYDSICGARLPRGLDPHSIPAEELSASLGLYFTLTILNYCSNGYISSFSYLLD

SEQ ID NO: 11003 - protein, 143 aa, Zea mays
  Coding DNA Sequence Number=SeqID_6493
PPIATTNQSITLAAPAPLLEVAQPAMACSKAVLLAALLAVAGALSSAAVWEDYDHHMYHRCYRSCMRKCDDDDADDALKNSISPVATSVSDDHDHDHDDHHDDHDHDHDHNHDDHHNDHDHDHDHDDHHNDHDHDHDHNDHHG

SEQ ID NO: 11004 - protein, 137 aa, Zea mays
  Coding DNA Sequence Number=SeqID_6495
  Homolog annotation: Hit_ID=A3C1G4; Match level="QueryCoverage=55%, HitCoverage=10%, E-value=2e-24, Identity=75%"; Hit description =Putative uncharacterized protein
  Pfam annotation: Domain name=DUF594; Domain location=24-80; Score =63.5; E_value=7.3e-16; Accession=PF04578.4; Description=Protein of unknown function, DUF594
MELQTTGRGTVFLPHPQACGLAMELLQLEASTRWRVMYRVWLGMLFYSASMCRGHEDAKSLGEGGEFLSYVWLVLSLKGAKTLADKLQMLEVEGDDRQGRRQGRKWVEMRNEELQIRGDDREPAPRSMPTTSSLFQT

SEQ ID NO: 11005 - protein, 274 aa, Zea mays
  misc_feature (206)..(206): Xaa can be any naturally occurring amino acid
  misc_feature (235)..(235): Xaa can be any naturally occurring amino acid
  Coding DNA Sequence Number=SeqID_6496
  Gene Ontology: Mol. function=acyltransferase activity; Cellular component=mitochondrion
  Homolog annotation: Hit_ID=Q2QX46; Match level="QueryCoverage=99%, HitCoverage=99%, E-value=1e-126, Identity=83%"; Hit description =Expressed protein
  Pfam annotation: Domain name=Hexapep; Domain location=119-136; Score =13.0; E_value=1.2; Accession=PF00132.14; Description=Bacterial transferase hexapeptide (three rep
  Pfam annotation: Domain name=Hexapep; Domain location=142-159; Score =1.6; E_value=94; Accession=PF00132.14; Description=Bacterial transferase hexapeptide (three rep
  Pfam annotation: Domain name=Hexapep; Domain location=70-87; Score =9.3; E_value=11; Accession=PF00132.14; Description=Bacterial transferase hexapeptide (three rep
  Pfam annotation: Domain name=Hexapep; Domain location=91-108; Score =1.1; E_value=1.1e+02; Accession=PF00132.14; Description=Bacterial transferase hexapeptide (three rep
  Pfam module annotation: Pfam domain module=Hexapep::Hexapep::Hexapep:: Hexapep; Domain location=119-136::142-159::70-87::91-108
MGTLGRAIYTVGKWIRGTGQAMDRLGSTIQGGLRTEEQVSRHRTVMSIFDKEPRINKDVFVAPSASVIGDVEIGHGSSIWYGSVLRGDVNSIRIGSGSNIQDNSLVHVAKTNISGKVLPTIIGSNVTVGHSAVLHACTIEDEAFVGMGAPLLDGVVVEKPGMVGAGSLVRRYTGIPSGEVWVGNPAKFLRKLPGGGFAFIAQSSTXNYFNLAQVHAAGTAKSFDGIGLEKMLGKXYAHKDEEYVSMLGVVREFPPQLILPDNILPHNARRAVAR

SEQ ID NO: 11006 - protein, 212 aa, Zea mays
  misc_feature (13)..(14): Xaa can be any naturally occurring amino acid
  misc_feature (193)..(197): Xaa can be any naturally occurring amino acid
  misc_feature (203)..(204): Xaa can be any naturally occurring amino acid
  misc_feature (206)..(209): Xaa can be any naturally occurring amino acid
  misc_feature (212)..(212): Xaa can be any naturally occurring amino acid
  Coding DNA Sequence Number=SeqID_6497
  Homolog annotation: Hit_ID=A2YLJ2; Match level="QueryCoverage=92%, HitCoverage=60%, E-value=7e-81, Identity=73%"; Hit description =Putative uncharacterized protein
  Pfam annotation: Domain name=Phi_1; Domain location=40-212; Score= -2.0; E_value=5.7e-10; Accession=PF04674.3; Description=Phosphate -induced protein 1 conserved region
PCHPTLTLLPLLXXAAIAGVRCAPVYRPEYLVDGNQLVDMQYHMGPVVSGAPTNLFLIWYGRWEAPAQAVLRDFLASLSAPAPFPAVSDWWARTPRLYTDQSGANVTATFAIAGEHSDAGYSHGASLKRIDMQSIIRTAVVAYPDPLPLDPYNGVYLVLSSPDVQVEEFCRAMCGFHYFTFASVVGVTVPYAXXXXXSSQCPXXCXXXXAAX

SEQ ID NO: 11007 - protein, 88 aa, Zea mays
  Coding DNA Sequence Number=SeqID_6498
WQASTTLKSSTSCLSEAYLMVSVLNTKDEEWWALIHSVASFDYSQIIDILLERSISYGERAEHEGRVGVGADSLSGKLRLLSNHRHPA

SEQ ID NO: 11008 - protein, 111 aa, Zea mays
  Coding DNA Sequence Number=SeqID_6500
ESLTSSRFVLSVIQSGWLTGFRIGLRFQGREQHQEEEQDGSWRAGGRRRRARGRGAIPRTVDPWRKALLCRESERGAPRGAAGLPGLPQVELHQNPAGNQWMDPAPEGGST

SEQ ID NO: 11009 - protein, 111 aa, Zea mays
  misc_feature (12)..(12): Xaa can be any naturally occurring amino acid
  misc_feature (36)..(36): Xaa can be any naturally occurring amino acid
  misc_feature (53)..(53): Xaa can be any naturally occurring amino acid
  misc_feature (60)..(60): Xaa can be any naturally occurring amino acid
  misc_feature (70)..(70): Xaa can be any naturally occurring amino acid
  Coding DNA Sequence Number=SeqID_6502
  Homolog annotation: Hit_ID=A3BHM8; Match level="QueryCoverage=96%, HitCoverage=28%, E-value=4e-28, Identity=56%"; Hit description =Putative uncharacterized protein
  Pfam annotation: Domain name=DUF239; Domain location=12-112; Score= -43.8; E_value=3.3e-05; Accession=PF03080.5; Description=Arabidopsis proteins of unknown function
MHAIACAEGDKXYGAKSSINVWEPKIQQANKFGLSXLWIFGGSFKVDVIMSTXRGWLIEXNNAYQATGCXMLCSGFVQINTKMAIATSILNISNYAGSQCDISILIYKVSI

SEQ ID NO: 11010 - protein, 81 aa, Zea mays
  misc_feature (64)..(64): Xaa can be any naturally occurring amino acid
  Coding DNA Sequence Number=SeqID_6503
  Gene Ontology: Mol. function=translation factor activity, nucleic acid binding; Cellular component=eukaryotic translation elongation factor 1 complex; Biological process=positive regulation of I-kappaB kinase/NF-kappaB cascade
  Homolog annotation: Hit_ID=P29692; Match level="QueryCoverage=76%, HitCoverage=22%, E-value=2e-26, Identity=93%"; Hit description =Elongation factor 1-delta
MATNFLAHERIWFDKFTHDDAERRFYEQMNGPVAGASRQENGASVILRDIARARESIQKSLAGXSGPGASSGTSETTVTRR

SEQ ID NO: 11011 - protein, 90 aa, Zea mays
  Coding DNA Sequence Number=SeqID_6504
RRRIYQSPRGSGSDASCMASPLTASAAGAAAANPTPSCAFDIVESGKNGCSVILAGVSVAVLGALHASSGAAHGHFMQARCRCRATSSSR

SEQ ID NO: 11012 - protein, 167 aa, Zea mays
  Coding DNA Sequence Number=SeqID_511
  Subcellular localization annotation: CTP_CleavageSite=39; ConfidenceScore=5.03e-01
IILGLMVFSSNKIIIWMDGWMVFKRLACPVLPFVPSSPRASACSHFPLLRFDFEPGIIFTCCFVPLLCASVLPQIPLGRFASARRWERAEYGLAGLFSLRCILPAILVFVLIRYHPRLLSVWVAGLGPIGVVRVRHDGVWRGDTGRFTIIVDFGFKDILKTMVHNLY

SEQ ID NO: 11013 - protein, 288 aa, Zea mays
  misc_feature (141)..(142): Xaa can be any naturally occurring amino acid
  misc_feature (269)..(269): Xaa can be any naturally occurring amino acid
  Coding DNA Sequence Number=SeqID_513
  Homolog annotation: Hit_ID=A2YVN6; Match level="QueryCoverage=80%, HitCoverage=73%, E-value=7e-12, Identity=27%"; Hit description =Putative uncharacterized protein
MAIPVARVHLAVAHAALPALVPTPPKCEMLPLLPTPCVAVVLPKPLAKPSRADSDERWDARKTMTGLAASTDQSSTSSSPRSTAGSVWSSARRRGSASRKIATTPPKPGRADSDERWDVRKTMTGLAASTDQSSASSTSSXXSTADSVWSSAQRRGSSCKSATALPPKPGRADSAVRWDAHKKTAIPASSSSSSSSGTSSHVSSGKWTMSRASSSAERWDVHKKYRPPQAAVALDDGESSTASSNDIDTDKEEIVWKPRAIYAEPCFIXAAPAPSMLPMPTAFLLRVA

SEQ ID NO: 11014 - protein, 228 aa, Zea mays
  misc_feature (175)..(175): Xaa can be any naturally occurring amino acid
  misc_feature (228)..(228): Xaa can be any naturally occurring amino acid
  Coding DNA Sequence Number=SeqID_514
  Gene Ontology: Mol. function=nucleic acid binding; Biological process= response to water deprivation
  Homolog annotation: Hit_ID=Q60EX7; Match level="QueryCoverage=88%, HitCoverage=18%, E-value=3e-58, Identity=59%"; Hit description =Putative transcriptional regulator
MAASVDAAAALAVTPPAVEEAGGAVEQARTLIGALNLLSRNLPLPPDVLRAVSSIYHDGGAGDDEEEEGGEREAEKEGNMEMTAAEEGYPVDGATKGSSLIEELEDAIYKNKKTPISYSELAALKEGRFNASIQHRLAELEGLPSTRGEDLQMKCLLEMYGLKLLDLQKKVRSDXSAEYWLQKKCAYPERQLFDWGLMRIRYPLSMYGIGDILSMDADDVHRKKRFTX

SEQ ID NO: 11015 - protein, 134 aa, Zea mays
  Coding DNA Sequence Number=SeqID_515
  Gene Ontology: Mol. function=rRNA (adenine-N6,N6-)-dimethyltransferase activity; Biological process=rRNA modification
  Homolog annotation: Hit_ID=O65090; Match level="QueryCoverage=67%, HitCoverage=25%, E-value=4e-14, Identity=50%"; Hit description =Dimethyladenosine transferase
  Subcellular localization annotation: CTP_CleavageSite=42; ConfidenceScore=5.33e-01
MVELTSLSPGPPRPSRLTPRRRPPPPTPHVHTSSRRRGRILGAATATPGADDYHSTIRSLNSRGRHVPRKSLGQNYTLNSKVNEELVAAAGVEEGDVVLEIGPGTGSLTSALLQAGATVFAVEKVCNVALLGVP

SEQ ID NO: 11016 - protein, 123 aa, Zea mays
  Coding DNA Sequence Number=SeqID_516
  Homolog annotation: Hit_ID=Q6Z750; Match level="QueryCoverage=100%, HitCoverage=23%, E-value=1e-23, Identity=53%"; Hit description =Ankyrin-like protein
MGLSPLSHQVLFAVVRSADATVVRSADGIFVRALLTDAEVSGTSMVVLAATQIDVVETVLYIVAEASCKQVVSLLPLYNLEAATVRSRLNLDAFHVVAKQGHNGELPFGPLRWCCGSGSKSQL

SEQ ID NO: 11017 - protein, 117 aa, Zea mays
  Coding DNA Sequence Number=SeqID_517
KKRNGNLSIKNKEIDPVLRKTSSKTYTECNPNNSNPTHNTHAESSLPSSTQETSNSNSLKRASQDQRKLDDDYKQEEDRDAHLLPSLETAPIFHQRDIQIMILLALVSSQTIKSSRN

SEQ ID NO: 11018 - protein, 162 aa, Zea mays
  Coding DNA Sequence Number=SeqID_519
DSRYQLAPHVTRDHAVVLRRRGGSPTSKADPRRKWCSSDGLPQPHRIPRRIGGSSSSHASRRCSLSPSTAPIGAAGTGSQWGAAPQRRPRTEEQSRPPGPKSPPERPRSPTRRTGESPAVGVEGQTSANRDVDDRGKKTHTAAGFLAARTPRGTVDSAHAHI

SEQ ID NO: 11019 - protein, 133 aa, Zea mays
  Coding DNA Sequence Number=SeqID_521
  Subcellular localization annotation: CTP_CleavageSite=59; ConfidenceScore=5.40e-01
PTGPMHQLLVPSFFSLTSLTAWASEPPPPTRAAATPLGSAPVAVWRICTLGLEGGRATAGSTRWGSWAAEPPPDLCRSATSQVRALGTGRVRAHPCRGARLSGLARPRRGSPAHVAATCPPVWWYLRAPRGGV

SEQ ID NO: 11020 - protein, 191 aa, Zea mays
  Coding DNA Sequence Number=SeqID_523
  Subcellular localization annotation: CTP_CleavageSite=79; ConfidenceScore=5.54e-01
PIFLSPPRREAPAPSVSSPPSSLVRSHGGCWPRHPIPSLGVVSKRDPPTQSSSGEPPSCSAVPRRRRRRNRERVVRRCCAAHTLAAVATPRPRRATAIVVPSTSARLPPRLPTDAIEPSSDCDLFLSFEESTIKHGNQVIELFEFYEIEDPEHLFGEGCLCCNLCSGKEEGERCRGGSPGVPGLRRVQGLG

SEQ ID NO: 11021 - protein, 123 aa, Zea mays
  Coding DNA Sequence Number=SeqID_525
  Subcellular localization annotation: CTP_CleavageSite=37; ConfidenceScore=5.37e-01
KRFAAASFCDPRVRKASYKILATNTASRVSPPAAYLRAAVPAAFRLVAEFRGVAVATWDSTAERFSVVSPLSHKSCTDRRRRHHPMWTNFSSSSNCSPSCEGNYRCRHQSTRFKQEGTPGLAA

SEQ ID NO: 11022 - protein, 106 aa, Zea mays
  Coding DNA Sequence Number=SeqID_527
  Subcellular localization annotation: CTP_CleavageSite=7; ConfidenceScore=5.08e-01
RLRSHGLATMKAKLNHPRHRVAWLKFQTPTRFKLPLDRSLHVAGRRVHSAFGRFPQAGHHERSRGVGKMEMWRCTALSFDPSKSSYGGCLFLSRFTAARSSSMPAL

SEQ ID NO: 11023 - protein, 148 aa, Zea mays
  Coding DNA Sequence Number=SeqID_6506
CSSLFPNSYGLNQQRTPHSHNGGQSQEHPSVQPAIDSDGHHRRSSHVLRSRNTGAVEPATNPLGAAATESRHTARQGTLDDYANWRAWIRMDHKVALMDPSRYGRLDQVSGLFMLAKRTSSNHTNIVYPRVLFPVVFQVVILFCCGWC

SEQ ID NO: 11024 - protein, 79 aa, Zea mays
  Coding DNA Sequence Number=SeqID_6508
  Subcellular localization annotation: CTP_CleavageSite=40; ConfidenceScore=5.29e-01
DLLRAPGCCFLHIVRLSGACSRPWPWSSNNYETPFVSRPRCERAPPRSMPTRSPLRRTPVRTRCFSCVYSSLVHVLGID

SEQ ID NO: 11025 - protein, 132 aa, Zea mays
  Coding DNA Sequence Number=SeqID_6510
TSHELIITCCIRLLLRYLILTVLSDVKFPGLSGRRPNGRRHTPARNSPALMDLWVRISMHTFLAHGESLITTRRPSSSSISAHILVGQVSLPPQESSATDFQQESMVSHGPCFGLVTAKGMDPVGGPHQAAT

SEQ ID NO: 11026 - protein, 45 aa, Zea mays
  Coding DNA Sequence Number=SeqID_6512
YLKPKVSGQDQVPQDEAHGGCCDVFVRGLGRRLPVNFGLLDRFLI

SEQ ID NO: 11027 - protein, 112 aa, Zea mays
  Coding DNA Sequence Number=SeqID_6514
CVGRRGHQASKRSHGGECRGAPPWPCVRRSPDRIWIPPLTATFPATSSRKGPSRHWPSSQERRASPRTRQRQRRNRARCESSEDHPGTWNLKSQVKNRYRRMRRMEDAAMSS

SEQ ID NO: 11028 - protein, 45 aa, Zea mays
  Coding DNA Sequence Number=SeqID_6516
LDSKRGYSSPVTLEVSIYKKAENDAKSKCSFGSHQLSARLLIAKF

SEQ ID NO: 11029 - protein, 82 aa, Zea mays
  misc_feature (76)..(82): Xaa can be any naturally occurring amino acid
  Coding DNA Sequence Number=SeqID_6518
DSRYQDDLQVTRNLTLNWETTVMLAPDCSVSKSPWQRTVLYLSPLLVAGVAATWSNLAVATVFLLYNFLGLLVYGXXXXXXX

SEQ ID NO: 11030 - protein, 54 aa, Zea mays
  Coding DNA Sequence Number=SeqID_6520
IYSTVCFGLSAAIRFSLCTTVQVKSLYQCITLAHGRSPCLDGLTFDGEEARQAI

SEQ ID NO: 11031 - protein, 117 aa, Zea mays
  Coding DNA Sequence Number=SeqID_6522
PRCRVPTETWPPPLTAEGSASGEIRGRRHHRLRPYTIGRSVGRSFLGSPWGFSSSISGVCDDRRAAISRRTSTSPHNYVSPRIGLLAGVSLLVTAPEGAPGQKESGPDLGKGARTTS

SEQ ID NO: 11032 - protein, 73 aa, Zea mays
  Coding DNA Sequence Number=SeqID_6524
  Subcellular localization annotation: CTP_CleavageSite=33; ConfidenceScore=5.26e-01
IGDLDQLGHTQQLDLHNRYILASCPNSRWRHQRARRRRSTSTWKNRSQIRSRDDSRFTTLDGAFPYQVLLTIS

SEQ ID NO: 11033 - protein, 102 aa, Zea mays
  misc_feature (1)..(10): Xaa can be any naturally occurring amino acid
  Coding DNA Sequence Number=SeqID_6526
  Subcellular localization annotation: CTP_CleavageSite=72; ConfidenceScore=5.40e-01
XXXXXXXXXXQGQAAICNLTLQVQAASGTPIQSRSTSCAKLYRFTNSLQASVNFVCLHAVKPHLRALESVTYAAQRNRMESVAAPPPCRIRFTPFPSSGFNF

SEQ ID NO: 11034 - protein, 93 aa, Zea mays
  Coding DNA Sequence Number=SeqID_6528
  Subcellular localization annotation: CTP_CleavageSite=44; ConfidenceScore=5.71e-01
TTAISHARVFISPPQARCRTPRLDSSRRIALLMFDVAKSSARLSSSTRRTYPFSACRLPAECLNARARESAAVGLASARHGRCLLLAGSLEIP

SEQ ID NO: 11035 - protein, 70 aa, Zea mays
  Coding DNA Sequence Number=SeqID_6530
ISSCRVRRFICAALTRDVTIPLSSVDVASRASRAQQKSQACGQHTRDLSLILPGTLVDHVMQRTKDESTT

SEQ ID NO: 11036 - protein, 66 aa, Zea mays
  Coding DNA Sequence Number=SeqID_6532
DSRYQLAFQMTRDLAHRRRAERKASCSTRRLDHESGLRCEIPGSSTVYLPRRDADHFPGPSMKVLG

SEQ ID NO: 11037 - protein, 62 aa, Zea mays
  Coding DNA Sequence Number=SeqID_6534
DRRRLPPPPRRILGRRINTEAIAPIPPNLQPRQLSERYCLGDWSLYIIRCQEQVPQDEAHGG

SEQ ID NO: 11038 - protein, 110 aa, Zea mays
  Coding DNA Sequence Number=SeqID_6536
APAQLLLLAEPQIPHWLARLGSRRQQVWPRGVAAASGCSTMVSNLLPGDPSQRTNYGGETCDERQGSHPCYELGLGSYNSRSQPRRPVTIAFTARDEGPEDGVDSGTRKN

SEQ ID NO: 11039 - protein, 124 aa, Zea mays
  misc_feature (119)..(124): Xaa can be any naturally occurring amino acid
  Coding DNA Sequence Number=SeqID_6538
APAQYFPPAVYQGLQSLARNDYEVPFPAHDVPKICGHGVNLAAPMSHSLPATTSTRSWSLDGLSRPRTRHQLVQFTPNDGGGLRRLPVLSLGGEYPNSGCWCVWSRGCPPFYRRRWRTXXXXXX

SEQ ID NO: 11040 - protein, 93 aa, Zea mays
  misc_feature (37)..(39): Xaa can be any naturally occurring amino acid
  misc_feature (49)..(52): Xaa can be any naturally occurring amino acid
  misc_feature (70)..(71): Xaa can be any naturally occurring amino acid
  misc_feature (88)..(89): Xaa can be any naturally occurring amino acid
  misc_feature (91)..(93): Xaa can be any naturally occurring amino acid
  Coding DNA Sequence Number=SeqID_6540
GRMYPQAARLSPEYSYKGGLHTVITEKLLQIGPVTHXXXRGLLQWAESXXXXRSSEDVRWGDVVVGLRLXXCKAKGGPCRFFCSRWRXXIXXX

SEQ ID NO: 11041 - protein, 52 aa, Zea mays
  Coding DNA Sequence Number=SeqID_6542
  Homolog annotation: Hit_ID=Q0WWS3; Match level="QueryCoverage=78%, HitCoverage=51%, E-value=2e-17, Identity=95%"; Hit description =Putative uncharacterized protein
MKNVAKCDTWCELQNPANHRVFERKLRPKPSGGGHVCLGVTQCARFSPGRCN

SEQ ID NO: 11042 - protein, 103 aa, Zea mays
  Coding DNA Sequence Number=SeqID_6543
TSSTPSTSTLQRDRREMTTRPAGRGLEVDVASASNDPRPPLSASTIHHRRHNSNHFLGPSSSLLSKSSTHILATTNPTTRSPHMSLEKIHWPPAPRNALPPQP

SEQ ID NO: 11043 - protein, 49 aa, Zea mays
  Coding DNA Sequence Number=SeqID_6545
FWFFFFFFFFFFFFFATVCHFSVALFSRFRSACDKHPSHHYVEWSRKLE

SEQ ID NO: 11044 - protein, 115 aa, Zea mays
  Coding DNA Sequence Number=SeqID_6547
GMGGERLMQGERRTPRSCCWPRLLTLRSISELRGIDGQASATKRPNSSSSTRLKILNICLVKVVHIATTAQEKMKPWKETPKSSKTTTSSRCGLAANSQSAACEGPIFTAFRLAL

SEQ ID NO: 11045 - protein, 120 aa, Zea mays
  misc_feature (1)..(1): Xaa can be any naturally occurring amino acid
  misc_feature (5)..(6): Xaa can be any naturally occurring amino acid
  misc_feature (27)..(28): Xaa can be any naturally occurring amino acid
  Coding DNA Sequence Number=SeqID_6549
  Subcellular localization annotation: CTP_CleavageSite=29; ConfidenceScore=5.03e-01
XRAPXXVFFFFFFLFFFFFFFFFFFFXXRCYMVHKYFLRFLKYFGHKKIIWTNEKTTRGSRDGLRFMGGHQRHRPLARPTVAGTQGQTVPIAGRRQYRRPLGPVLQFEQQNYRMPSWQNS

SEQ ID NO: 11046 - protein, 150 aa, Zea mays
  Coding DNA Sequence Number=SeqID_6551
  Subcellular localization annotation: CTP_CleavageSite=15; ConfidenceScore=5.00e-01
FSPTENVHSSQHTIGASVVVFLSIYKANNEFFPRRRRRRRWRRLYLHEHLDLIKYSTILLLLVDFAQVLIDQRLANQNGPLHRTVAKNVPNSHHGELVIDCVTWIRENIANEEGGHRWKGPCVTAVTSSKSRCRHCFYAVGWDEFHNCSF

SEQ ID NO: 11047 - protein, 132 aa, Zea mays
  misc_feature (83)..(83): Xaa can be any naturally occurring amino acid
  Coding DNA Sequence Number=SeqID_6553
  Gene Ontology: Mol. function=protein dimerization activity
  Homolog annotation: Hit_ID=A2ZG48; Match level="QueryCoverage=89%, HitCoverage=23%, E-value=3e-16, Identity=37%"; Hit description =Putative uncharacterized protein
MSSRNRKYDSGFERHKKKRRLEAADQSQTGSMDRFVVKDSQLNSKNQTPEANRVGEIESHGDQGQGDANIAVQHEAQVEEIGXGDGANTTEEVSGHTDDVDTYFQPDIFDPRMWDALDFCTLGAHFSFRPGA

SEQ ID NO: 11048 - protein, 132 aa, Zea mays; identical to SEQ ID NO: 11047
  misc_feature (83)..(83): Xaa can be any naturally occurring amino acid
  Coding DNA Sequence Number=SeqID_6554
  Gene Ontology: Mol. function=protein dimerization activity
  Homolog annotation: Hit_ID=A2ZG48; Match level="QueryCoverage=89%, HitCoverage=23%, E-value=3e-16, Identity=37%"; Hit description =Putative uncharacterized protein

SEQ ID NO: 11049 - protein, 107 aa, Zea mays
  Coding DNA Sequence Number=SeqID_6555
  Subcellular localization annotation: CTP_CleavageSite=69; ConfidenceScore=5.58e-01
THTFYGEEGGLLQRGSPLPLSSPSRSKLVSSPPLLSVRASSTSTTPSHHRDRAQPSPLTHCRRDLPRIRDGERHRRHRRGQLKMKLGFFICRSSQDPSSLEDTGALE

SEQ ID NO: 11050 - protein, 95 aa, Zea mays
  Coding DNA Sequence Number=SeqID_6557
  Gene Ontology: Cellular component=integral to membrane; Biological process=peroxisome organization and biogenesis
  Homolog annotation: Hit_ID=Q85V22; Match level="QueryCoverage=81%, HitCoverage=17%, E-value=7e-35, Identity=84%"; Hit description =Histidine amino acid transporter
MATQAPENHRHSPTTKDERSGAGAEDQAIDDWLPITSSRNAKWWYSAFHNVTAMVGAGVLSLPYAMSKLGWGPGIAVLMLSWVVTLYTMWQMVEM

SEQ ID NO: 11051 - protein, 230 aa, Zea mays
  misc_feature (188)..(189): Xaa can be any naturally occurring amino acid
  misc_feature (198)..(199): Xaa can be any naturally occurring amino acid
  misc_feature (203)..(204): Xaa can be any naturally occurring amino acid
  misc_feature (208)..(210): Xaa can be any naturally occurring amino acid
  misc_feature (213)..(216): Xaa can be any naturally occurring amino acid
  misc_feature (218)..(230): Xaa can be any naturally occurring amino acid
  Coding DNA Sequence Number=SeqID_6558
  Subcellular localization annotation: CTP_CleavageSite=67; ConfidenceScore=5.58e-01
ATLPPCFSLPLASTSLRTRRALDSSLSLASSSHCHGAPLPGAFPWHAPSSSQPNRSFLCSSLFAIALARLVAKLQEPAPLASLCRRRILVAALHSCTSPSMATAAPKPRALSSSLSSPPNTTICQPRLGSPASLALAVPCRACPTSVLVQPAGGPATHHRLPCPMRRQPTRWRTLLWSGSVARSATWXXTGATPGADXXCWTXXEAFXXXALXXXXWXXXXXXXXXXXXX

SEQ ID NO: 11052 - protein, 154 aa, Zea mays
  misc_feature (120)..(120): Xaa can be any naturally occurring amino acid
  misc_feature (135)..(139): Xaa can be any naturally occurring amino acid
  misc_feature (143)..(147): Xaa can be any naturally occurring amino acid
  Coding DNA Sequence Number=SeqID_6560
  Gene Ontology: Mol. function=binding
  Homolog annotation: Hit_ID=A2YN66; Match level="QueryCoverage=64%, HitCoverage=20%, E-value=3e-35, Identity=76%"; Hit description =Putative uncharacterized protein
FRFLLPRGLAMGKSKKSKVRGGGGDDLLDSSDADSVGSSSTALSDLSISYATENVNSHEFVLDKYIDALYEKRGSTREAALASLVDAFESFMLGGLVENKYATLLSLFNTSIKKGSTKEXCLASRAIGLLSITLXXXXXSHEXXXXXHSTAFVE

SEQ ID NO: 11053 - protein, 217 aa, Zea mays
  misc_feature (2)..(5): Xaa can be any naturally occurring amino acid
  misc_feature (9)..(9): Xaa can be any naturally occurring amino acid
  misc_feature (11)..(11): Xaa can be any naturally occurring amino acid
  misc_feature (15)..(19): Xaa can be any naturally occurring amino acid
  misc_feature (217)..(217): Xaa can be any naturally occurring amino acid
  Coding DNA Sequence Number=SeqID_6561
  Gene Ontology: Mol. function=hydrolase activity
  Homolog annotation: Hit_ID=Q7VUD6; Match level="QueryCoverage=97%, HitCoverage=42%, E-value=7e-95, Identity=81%"; Hit description =Putative uncharacterized protein
  Pfam annotation: Domain name=MlrC_C; Domain location=156-217; Score= -64.2; E_value=0.05; Accession=PF07171.3; Description=MlrC C-terminus
FXXXXIVEXVXVISXXXXXPHVDIREAGVRAANVIVRTLRGEIKPVMTWAGKPMLPHVMCQGTHAEPNKSLQERCRQLEADGVLAASVFVGFPHADIREAGLSAVVCTDANLAQAEQYRDELLERAWNDRAKWVFHPEPLAPTIARAKAIEQGPVVLLDHFDNTGSGGTMDTTAVLAEVLRQELDNVVFYAICDPQAAREAATAGVGSTITLPLGGX

SEQ ID NO: 11054 - protein, 131 aa, Zea mays
  misc_feature (1)..(2): Xaa can be any naturally occurring amino acid
  misc_feature (8)..(9): Xaa can be any naturally occurring amino acid
  misc_feature (13)..(13): Xaa can be any naturally occurring amino acid
  misc_feature (15)..(15): Xaa can be any naturally occurring amino acid
  misc_feature (17)..(17): Xaa can be any naturally occurring amino acid
  misc_feature (19)..(21): Xaa can be any naturally occurring amino acid
  misc_feature (28)..(29): Xaa can be any naturally occurring amino acid
  misc_feature (32)..(33): Xaa can be any naturally occurring amino acid
  misc_feature (36)..(44): Xaa can be any naturally occurring amino acid
  misc_feature (65)..(65): Xaa can be any naturally occurring amino acid
  misc_feature (71)..(71): Xaa can be any naturally occurring amino acid
  Coding DNA Sequence Number=SeqID_6562
XXPSPPRXXIRSXLXLXGXXXSRLHIQXXLTXXKFXXXXXXXXXTGHQSPKPSLSCDLFGCSSLXLDRHQXGGIPISRESVAASAASLRVAPHPPTGAPDSTNPTHSRGAWGLPCPTLTQIYMRSPTLHHQ

SEQ ID NO: 11055 - protein, 201 aa, Zea mays
  misc_feature (1)..(98): Xaa can be any naturally occurring amino acid
  misc_feature (186)..(186): Xaa can be any naturally occurring amino acid
  misc_feature (197)..(197): Xaa can be any naturally occurring amino acid
  Coding DNA Sequence Number=SeqID_6563
XXXXXXXXXXXXXXXXXXXXXXXXXXXXXXXXXXXXXXXXXXXXXXXXXXXXXXXXXXXXXXXXXXXXXXXXXXXXXXXXXXXXXXXXXXXXXXXXXXNGFLFSTLVETAADVMEATATKLPPLRRRAASGGERQSATSWRRSAIPEANGKGSRKRLRRYWLSQASDACCLVATGEREEQAIIQIXGQGENHVAANXSRLT

SEQ ID NO: 11056 - protein, 118 aa, Zea mays
  Coding DNA Sequence Number=SeqID_6564
  Homolog annotation: Hit_ID=Q6Z7V1; Match level="QueryCoverage=71%, HitCoverage=11%, E-value=9e-36, Identity=84%"; Hit description=LMBR1 integral membrane protein-like
MVVYTLLVASNFFGRVIDFLGSWKRFKLQQEEENIDGLDPSGMIIVQKERSWIEQGCKVGEHVIPLARNFNGVNTDIESQNVPLRISENCMHDLFYPLVMEGPNDNPCPCPKILSCVD

SEQ ID NO: 11057 - protein, 289 aa, Zea mays
  misc_feature (263)..(265): Xaa can be any naturally occurring amino acid
  misc_feature (267)..(268): Xaa can be any naturally occurring amino acid
  misc_feature (271)..(272): Xaa can be any naturally occurring amino acid
  misc_feature (276)..(276): Xaa can be any naturally occurring amino acid
  misc_feature (281)..(281): Xaa can be any naturally occurring amino acid
  misc_feature (283)..(285): Xaa can be any naturally occurring amino acid
  misc_feature (288)..(288): Xaa can be any naturally occurring amino acid
  Coding DNA Sequence Number=SeqID_6565
  Gene Ontology: Mol. function=catalytic activity; Cellular component =extracellular region; Biological process=cell wall organization and biogenesis
  Homolog annotation: Hit_ID=Q4K5E8; Match level="QueryCoverage=96%, HitCoverage=59%, E-value=1e-152, Identity=92%"; Hit description=UDP -N-acetylmuramate:L-alanyl-gamma-D-glutamyl-meso- diaminopimelate ligase
  Pfam annotation: Domain name=Mur_ligase; Domain location=2-103; Score= 102.4; E_value=1.4e-27; Accession=PF01225.15; Description=Mur ligase family, catalytic domain
  Pfam annotation: Domain name=Mur_ligase_M; Domain location=106-271; Score=10.4; E_value=8e-07; Accession=PF08245.2; Description=Mur ligase middle domain
  Pfam module annotation: Pfam domain module=Mur_ligase::Mur_ligase_M; Domain location=2-103::106-271
MHIHILGICGTFMGSMAVLAKELGHHVTGSDANVYPPMSTQLQAQGIELTQGYDPAQFDPVPDLVVIGNAMSRGNPAVEYVLNKGLPYVSGPQWLADHVLQGRWVLAVAGTHGKTTTSSMLAWVLEHAGMSPGFLIGGVPQNFSVSARLGDTPFFVIEADEYDSAFFDKRSKFVHYRPRTAILNNLEFDHADIFPDLAAIERQFHHLVRTIPSEGLVIHPTTEPALQRVIEMGCWTPVQTTGAGGQWQVKLLSENGSKFEVLXXXVXXGVXXWDMXGPHNXRXXXVPXK

SEQ ID NO: 11058 - protein, 192 aa, Zea mays
  misc_feature (128)..(128): Xaa can be any naturally occurring amino acid
  misc_feature (136)..(136): Xaa can be any naturally occurring amino acid
  misc_feature (139)..(142): Xaa can be any naturally occurring amino acid
  misc_feature (151)..(152): Xaa can be any naturally occurring amino acid
  misc_feature (156)..(156): Xaa can be any naturally occurring amino acid
  misc_feature (161)..(163): Xaa can be any naturally occurring amino acid
  misc_feature (165)..(169): Xaa can be any naturally occurring amino acid
  misc_feature (173)..(175): Xaa can be any naturally occurring amino acid
  misc_feature (180)..(187): Xaa can be any naturally occurring amino acid
  Coding DNA Sequence Number=SeqID_6566
  Subcellular localization annotation: CTP_CleavageSite=46; ConfidenceScore=5.52e-01
MAPAARVQPLAQSGAGRQRVGRPRRRGRQQQRMARRAVHARAQAVCAGRAGAPLRQQVGDGVRVEQGQVGQHQQQVMVGMGADVFAQRQALGIGERGVRQRLRQRRDRGRQRQDIRIGADDGHRRRAXRPRTAILXNLXXXXADIFPDLAXXERQXHHLVXXXPXXXXXIHPXXXPALHXXXXXXXXTPVQT

SEQ ID NO: 11059 - protein, 192 aa, Zea mays; identical to SEQ ID NO: 11058
  misc_feature (128)..(128): Xaa can be any naturally occurring amino acid
  misc_feature (136)..(136): Xaa can be any naturally occurring amino acid
  misc_feature (139)..(142): Xaa can be any naturally occurring amino acid
  misc_feature (151)..(152): Xaa can be any naturally occurring amino acid
  misc_feature (156)..(156): Xaa can be any naturally occurring amino acid
  misc_feature (161)..(163): Xaa can be any naturally occurring amino acid
  misc_feature (165)..(169): Xaa can be any naturally occurring amino acid
  misc_feature (173)..(175): Xaa can be any naturally occurring amino acid
  misc_feature (180)..(187): Xaa can be any naturally occurring amino acid
  Coding DNA Sequence Number=SeqID_6567
  Subcellular localization annotation: CTP_CleavageSite=46; ConfidenceScore=5.52e-01
